(19) United States
(12) Patent Application Publication
(10) Pub. No.: US 2003/0143606 A1
(43) Pub. Date: Jul. 31, 2003

(54) Diagnosis of diseases associated with the immune system by determining cytosine methylation

(76) Inventors: Alexander Olek, Berlin (DE); Kurt Berlin, Stahnsdorf (DE); Christian Piepenbrock, Berlin (DE)

Correspondence Address: DAVIDSON, DAVIDSON & KAPPEL, LLC, 485 SEVENTH AVENUE, 14TH FLOOR, NEW YORK, NY, 10018, US

(21) Appl. No.: 10/311,455

(22) PCT Filed: Jul. 2, 2001
(86) PCT No.: PCT/EP01/07537

(30) Foreign Application Priority Data
Jun. 30, 2000 (DE) 10032529.7
Sep. 1, 2000 (DE) 10043826.1

(51) Int. Cl. C12Q 1/68; C07H 21/04; C12P 19/34

(52) U.S. Cl. 435/6; 435/91.2; 536/24.3

(57) ABSTRACT

The present invention relates to chemically modified genomic sequences of genes associated with the immune system, to oligonucleotides and/or PNA-oligomers directed against the sequence, for the detection of the methylation status of genes, associated with the immune system as well as to a method for ascertaining genetic and/or epigentic parametres of genes, associated with the immune system.

### FIELD OF THE INVENTION

[0001] The levels of observation in molecular biology which have been studied well after the methodical developments of the recent years, are the genes themselves, the translation of these genes into RNA, and the proteins resulting therefrom. The question of which gene is switched on at which point in the course of the development of an individual, and the question of how the activation and inhibition of specific genes in specific cells and tissues are controlled is correlatable to the degree and character of the methylation of the genes or of the genome. In this respect, pathogenic conditions manifest themselves in a changed methylation pattern of individual genes or of the genome.

[0002] The present invention relates to nucleic acids, oligonucleotides, PNA-oligomers and to a method for the diagnosis and/or therapy of diseases which have a connection with the genetic and/or epigenetic parameters of genes associated with the immune system and, in particular, with the methylation status thereof.

### PRIOR ART

[0003] Very many human diseases are associated with the immune system. The immune system recognises micororganisms (bacteria, viruses, fungi) invading the body and disarms these. A distinction is drawn between two systems working closely together. The so called non-specific, humoral blocking system generally directs against pathogens invaded and—independently concerning the kind of pathogen and the causing disease—tries to kill them. The second system is the specific cellular blocking system. It acts much more specifically against pathogens by producing antibodies according to the structure of the particular pathogen helping to overcome the disease. Particular pathogens are recognised when appearing once again and are more rapidly eliminated; in many cases the organism is immune for a lifetime. However, diseases associated with the immune system are not only related to disease patterns developed by pathogens and generally being fought successfully by a healthy immune system. With many chronic diseases like rheumatism or asthma a so called immunodeficiency is basically involved in the cause of the disease. Last but not least stress and other mental impacts have a negative influence on the immune system.

[0004] Diseases, caused by false or overreaction of an intact immune system are integrated in the generic terms allergies, like e.g. asthma (Kuo M L, Huang J L, Yeh K W, Li P S, Hsieh K H. Evaluation of Th1/Th2 ratio and cytokine production profile during acute exacerbation and convalescence in asthmatic children. Ann Allergy Asthma Immunol. 2001 Mar;86(3):272-6) and autoimmune diseases like e.g. arteriosclerosis (Gordon P A, George J, Khamashta M A, Harats D, Hughes G, Shoenfeld Y. Arteriosclerosis and autoimmunity. Lupus. 2001;10(4):249-52), systemic lupus erythematosus (Lorenz H M, Herrmann M, Winkler T, Gaipl U, Kalden J R. Role of apoptosis in autoimmunity. Apoptosis. 2000 Nov;5(5):443-9) or Type I Diabetes mellitus (Not T, Tommasini A, Tonini G, Buratti E, Pocecco M, Tortul C, Valussi M, Crichiutti G, Berti I, Trevisiol C, Azzoni E, Neri E, Torre G, Martelossi S, Soban M, Lenhardt A, Cattin L, Ventura A. Undiagnosed coeliac disease and risk of autoimmune disorders in subjects with Type I diabetes mellitus. Diabetologia. 2001 Feb;44(2):151-5). There are also several correlations between the immune system and cancer diseases like anemia (Bron D, Meuleman N, Mascaux C. Biological basis of anemia. Semin Oncol. 2001 Apr;28(2 Suppl 8):1-6), pancreatic carcinoma (Shimura T, Tsutsumi S, Hosouchi Y, Kojima T, Kon Y, Yonezu M, Kuwano H. Clinical significance of soluble form of HLA class I molecule in Japanese patients with pancreatic cancer. Hum Immunol. 2001 Jun;62(6):615-9), chronic myelogenous leukaemia (Jahagirdar B N, Miller J S, Shet A, Verfaillie C M. Novel therapies for chronic myclogenous leukaemia. Exp Hematol. 2001 May;29(5):543-56), acute lymphoblastic leukaemia (Velders M P, ter Horst S A, Kast W M. Prospect for immunotherapy of acute lymphoblastic leukaemia. Leukaemia. 2001 May;15(5):701-6) or acute myeloid leukaemia (Harrison B D, Adams J A, Briggs M, Brereton M L, Yin J A. Stimulation of autologous proliferative and cytotoxic T-cell responses by “leukaemia dendritic cells” derived from blast cells in acute myeloid leukaemia. Blood. 2001 May 1;97(9):2764-71). The cells of the human immune system recognise many tumour cells for being unfamiliar and try to attack them. With a cancer patient, however, the defence of the body is not able to destroy the tumour. Cancer cells compared to normal body cells show modified characteristics and often also form different proteins that play an important role in the recognition of “self” and “unfamiliar” in the immune system. In the body they are presented to the killer T-cells, bound to MHC molecules at the outside of the cells. Killer T-cells control whether the peptides have their origin from normal proteins. If a peptide is not cut from a normal endogenic protein, the T-cells start destroying the cell, presenting the modified or unfamiliar peptide.

[0005] Further diseases associated with the immune system are Alzheimer's disease (Smits H A, van Beelen A J, de Vos N M, Rijsmus A, van der Bruggen T, Verhoef J, van Muiswinkel F L, Nottet H S. Activation of human macrophages by amyloid-beta is attenuated by astrocytes J Immunol. 2001 Jun 1;166(11):6869-76), acquired immune deficiency syndrome (Aids) (McGrath K M, Hoffman N G, Resch W, Nelson J A, Swanstrom R. Using HIV-1 sequence variability to explore virus biology. Virus Res. 2001 Aug;76(2):137-60.), progressive focal epilepsy (Ponomareva E N, Khmara M E, Nedz'ved' M K, Drakina S A, Kolomiets A G, Protas I I [The clinical characteristics of progressive focal epilepsy with a herpetic etiology]. Lik Sprava. 2000 Jul-Aug;(5):106-10), primary sclerosing cholangitis 1 (Bo X, Broome U, Remberger M, Sumitran-Holgersson S. Tumour necrosis factor alpha impairs function of liver derived T lymphocytes and natural killer cells in patients with primary sclerosing cholangitis. Gut. 2001 Jul;49(1):131-41), or neurofibromatosis (Gerosa P L, Spinelli M, Giussani G, Vai C, Fontana A, Canepari C. Neurofibromatosis (NF1) and neuroleprosy: immunoreaction against pathologic Schwann-cells. Physiopathogenetic observations. Minerva Med. 2001 Apr;92(2): 89-97).

[0006] Methods of treatment for immune diseases above all concentrate on allergies, autoimmune diseases as well as on the development of vaccines to stimulate stronger immune responses for pathogene organism and cancer (Fahrer A M, Bazan J F, Papathanasiou P, Nelms K A, Goodnow C C. A genomic view of immunology. Nature. 2001 Feb 15;409(6822):836-8).

[0007] 5-methylcytosine is the most frequent covalently modifiable base in the DNA of eukaryotic cells. It plays a role, for example, in the regulation of the transcription, in genetic imprinting, and in tumorigenesis. Therefore, the identification of 5-methylcytosine as a part of genetic information is of considerable interest. However, 5-methylcytosine positions cannot be identified by sequencing since 5-methylcytosine has the same base pairing behaviour as cytosine. Moreover, the epigenetic information carried by the 5-methylcytosines is completely lost during a PCR amplification.

[0008] A relatively new and now the most frequently used method for analysing DNA for 5-methylcytosine is based on the specific reaction of bisulfite with cytosine which, upon subsequent alkaline hydrolysis, is converted to uracil which corresponds to thymidine in its base pairing behaviour. However, 5-methylcytosine is not modified under these conditions. Consequently, the original DNA is converted in such a manner that methylcytosine, which originally cannot be distinguished from cytosine because of its hybridisation behaviour, can now be detected as the only remaining cytosine using “normal” molecular biological techniques, for example, by amplification and hybridisation or sequencing. All these techniques are based on base pairing which is now taken full advantage of. The Prior Art is defined in terms of sensitivity by a method which encloses the DNA to be analysed in an agarose matrix, thus preventing the diffusion and renaturation of the DNA (bisulfite reacts only on single-stranded DNA), and which replaces all precipitation and purification steps with fast dialysis (Olek A, Oswald J, Walter J. A modified and improved method for bisulphite based cytosine methylation analysis. Nucleic Acids Res. 1996 Dec 15;24(24):5064-6). Using this method, it is possible to analyse individual cells, which illustrates the potential of the method. Heretofore, however, only individual regions of a length of up to approximately 3000 base pairs are analysed, a global analysis of cells for thousands of possible methylation analyses is not possible [sic]. However, this method cannot reliably analyse very small fragments from small sample quantities either. These are lost through the matrix in spite of the diffusion protection. An overview of the further known possibilities of detecting 5-methylcytosines can be gathered from the following survey article: Rein, T., DePamphilis, M. L., Zorbas, H., Nucleic Acids Res. 1998, 26, 2255.

[0009] Heretofore, the bisulfite technology is only used in research with few exceptions (e.g., Zesch-nigk M, Lich C, Buiting K, Doerfler W, Horsthemke B. A single-tube PCR test for the diagnosis of Angelman and Prader-Willi syndrome based on allelic methylation differences at the SNRPN locus. Eur J Hum Genet. 1997 Mar-Apr;5(2):94-8). Always, however, short, specific fragments of a known gene are amplified subsequent to a bisulfite treatment and either completely sequenced (Olek A, Walter J. The pre-implantation ontogeny of the H19 methylation imprint. Nat Genet. 1997 Nov; 17(3):275-6) or individual cytosine positions are detected by a primer extension reaction (Gonzalgo M L, Jones P A. Rapid quantitation of methylation differences at specific sites using methylation-sensitive single nucleotide primer extension (Ms-SNuPE). Nucleic Acids Res. 1997 Jun 15;25(12):2529-31, WO Patent 9500669) or by an enzyme cut (Xiong Z, Laird P W. COBRA: a sensitive and quantitative DNA methylation assay. Nucleic Acids Res. 1997 Jun 15;25(12):2532-4). In addition, the detection by hybridisation has also been described (Olek et al., WO 99 28498).

[0010] Further publications dealing with the use of the bisulfite technique for methylation detection in individual genes are: Grigg G, Clark S. Sequencing 5-methylcytosine residues in genomic DNA. Bioassays. 1994 Jun;16(6):431-6, 431; Zeschnigk M, Schmitz B, Dittrich B, Buiting K, Horsthemke B, Doerfler W. Imprinted segments in the human genome: different DNA methylation patterns in the Prader-Willi/Angelman syndrome region as determined by the genomic sequencing method. Hum Mol Genet. 1997 Mar;6(3):387-95; Feil R, Charlton J, Bird A P, Walter J, Reik W. Methylation analysis on individual chromosomes: improved protocol for bisulphite genomic sequencing. Nucleic Acids Res. 1994 Feb 25;22(4):695-6; Martin V, Ribieras S, Song-Wang X, Rio M C, Dante R. Genomic sequencing indicates a correlation between DNA hypomethylation in the 5′ region of the pS2 gene and its expression in human breast cancer cell lines. Gene. 1995 May 19;157(1-2):261-4; WO 97/46705, WO 95/15373 and WO 97/45560.

[0011] An overview of the Prior Art in oligomer array manufacturing can be gathered from a special edition of Nature Genetics (Nature Genetics Supplement, Volume 21, January 1999), published in January 1999, and from the literature cited there.

[0012] For scanning an immobilised DNA array, fluorescently labelled probes have often been used. Particularly suitable for fluorescence labels is the simple attachment of Cy3 and Cy5 dyes to the 5′-OH of the specific probe. The detection of the fluorescence of the hybridised probes is carried out, for example via a confocal microscope. Cy3 and Cy5 dyes, besides many others, are commercially available.

[0013] Matrix Assisted Laser Desorption Ionization Mass Spectrometry (MALDI-TOF) is a very efficient development for the analysis of biomolecules (Karas M, Hillenkamp F. Laser desorption Ionization of proteins with molecular masses exceeding 10,000 daltons. Anal Chem. 1988 Oct 15;60(20):2299-301). An analyte is embedded in a light-absorbing matrix. By a short laser pulse, the matrix is evaporated, thus transporting the analyte molecule into the vapour phase in an unfragmented manner. The analyte is ionised by collisions with matrix molecules. An applied voltage accelerates the ions into a field-free flight tube. Due to their different masses, the ions are accelerated at different rates. Smaller ions reach the detector sooner than bigger ones.

[0014] MALDI-TOF spectrometry is excellently suitable for analysing peptides and proteins. The analysis of nucleic acids is somewhat more difficult (Gut I G, Beck S. DNA and Matrix Assisted Laser Desorption Ionization Mass Spectrometry. Current Innovations and Future Trends. 1995, 1; 147-57). The sensitivity for nucleic acids is approximately 100 times worse than for peptides and decreases superproportionally with increasing fragment size. For nucleic acids having a multiply negatively charged backbone, the Ionization process via the matrix is considerably less efficient. In MALDI-TOF spectrometry, the selection of the matrix plays an eminently important role. For the desorption of peptides, several very efficient matrixes have been found which produce a very fine crystallisation. For DNA, there are indeed several responsive matrixes now, however, the difference in sensitivity has thereby not been reduced. The difference in sensitivity can be reduced by chemically modifying the DNA in such a manner that it becomes more similar to a peptide. Phosphorothioate nucleic acids in which the usual phosphates of the backbone are substituted by thiophosphates can be converted into a charge-neutral DNA using simple alkylation chemistry (Gut I G, Beck S. A procedure for selective DNA alkylation and detection by mass spectrometry. Nucleic Acids Res. 1995 Apr 25;23(8):1367-73). The coupling of a charge tag to this modified DNA results in an increase in sensitivity by the same amount as that found for peptides. A further advantage of charge tagging is the increased stability of the analysis against impurities which make the detection of unmodified substrates considerably more difficult.

[0015] Genomic DNA is obtained from DNA of cell, tissue or other test samples using standard methods. This standard methodology is found in references such as Fritsch and Maniatis eds., Molecular Cloning: A Laboratory Manual, 1989.

### PROBLEM DEFINITION

[0016] The present invention is intended to provide oligonucleotides and/or PNA-oligomers for detecting cytosine methylations as well as a method which is particularly suitable for the diagnosis and/or therapy of genetic and epigenetic parameters of genes associated with the immune system. The present invention is based on the realisation that, in particular, cytosine methylation patterns are particularly suitable for the diagnosis and/or therapy of diseases associated with the immune system.

### DESCRIPTION

[0017] The object of the present invention is to provide the chemically modified DNA of genes associated with the immune system, as well as oligonucleotides and/or PNA-oligomers for detecting cytosine methylations, as well as a method which is particularly suitable for the diagnosis and/or therapy of genetic and epigenetic parameters of genes associated with the immune system. The present invention is based on the realisation that genetic and epigenetic parameters and, in particular, the cytosine methylation pattern of genes associated with the immune system are particularly suitable for the diagnosis and/or therapy of diseases associated with the immune system.

[0018] This objective is achieved according to the present invention by a nucleic acid containing an at least 18 bases-long sequence segment of the chemically pretreated DNA of genes associated with the immune system according to one of Seq. ID No.1 through Seq. ID No.2420 and sequences complementary thereto and/or oligonucleotide- and/or PNA-oligomers according to table 1. In the table, after the listed gene designations, the respective data bank numbers (accession numbers) are specified which define the appertaining gene sequences as unique. Gen-Bank was used as the underlying data bank, the internet address thereof is http://www.ncbi.nlm.nih.gov.

[0019] The chemically modified nucleic acid could heretofore not be connected with the ascertainment of genetic and epigenetic parameters.

[0020] The object of the present invention is further achieved by an oligonucleotide or oligomer for detecting the cytosine methylation state in chemically pretreated DNA, containing at least one base sequence solved having a length of at least 13 nucleotides which hybridises to a chemically pretreated DNA of genes associated with the immune system according to Seq. ID No.1 through Seq. ID No.2420 and sequences complementary thereto and/or oligonucleotide- and/or PNA-oligomers according to table 1. The oligomer probes according to the present invention constitute important and effective tools which, for the first time, make it possible to ascertain the genetic and epigenetic parameters of genes associated the immune system. The base sequence of the oligomers preferably contains at least one CpG dinucleotide. The probes can also exist in the form of a PNA (peptide nucleic acid) which has particularly preferred pairing properties. Particularly preferred are oligonucleotides according to the present invention in which the cytosine of the CpG dinucleotide is the 5th-9th nucleotide from the 5′-end of the 13-mer; in the case of PNA-oligomers, it is preferred for the cytosine of the CpG dinucleotide to be the 4th-6th nucleotide from the 5′-end of the 9-mer.

[0021] The oligomers according to the present invention are normally used in so-called sets which contain at least one oligomer for each of the CpG dinucleotides one of the sequences of Seq. ID No.1 through Seq. ID No.2420 and sequences complementary thereto and/or oligonucleotide- and/or PNA-oligomers according to table 1. Preferred is a set which contains at least one oligomer for each of the CpG dinucleotides from one of Seq. ID No.1 through Seq. ID No.2420 and sequences complementary thereto and/or oligonucleotide- and/or PNA-oligomers according to table 1.

[0022] Moreover, the present invention makes available a set of at least two oligonucleotides which can be used as so-called primer oligonucleotides for amplifying DNA sequences of one of Seq. ID No.1 through Seq. ID No.2420 and sequences complementary thereto and/or oligonucleotide- and/or PNA-oligomers according to table 1, or segments thereof.

[0023] In the case of the sets of oligonucleotides according to the present invention, it is preferred that at least one oligonucleotide is bonded to a solid phase.

[0024] The present invention moreover relates to a set of at least 10 n (oligonucleotides and/or PNA-oligomers) used for detecting the cytosine methylation state in chemically pretreated genomic DNA (Seq. ID No.1 through Seq. ID No.2420 and sequences complementary thereto and/or oligonucleotide- and/or PNA-oligomers according to table 1). These probes enable diagnosis and/or therapy of genetic and epigenetic parameters of genes associated with the immune system. The set of oligomers can also be used for detecting single nucleotide polymorphisms (SNPs) in the chemically pretreated DNA of genes associated with the immune system according to one of Seq. ID No.1 through Seq. ID No.2420 and sequences complementary thereto and/or oligonucleotide- and/or PNA-oligomers according to table 1.

[0025] According to the present invention, it is preferred that an arrangement of different oligonucleotides and/or PNA-oligomers (a so-called “array”) made available by the present invention is present in a manner that it is likewise bonded to a solid phase. This array of different oligonucleotide- and/or PNA-oligomer sequences can be characterised in that it is arranged on the solid phase in the form of a rectangular or hexagonal lattice. The solid phase surface is preferably composed of silicon, glass, polystyrene, aluminium, steel, iron, copper, nickel, silver, or gold. However, nitrocellulose as well as plastics such as nylon which can exist in the form of pellets or also as resin matrices are possible as well.

[0026] Therefore, a further subject matter of the present invention is a method for manufacturing an array fixed to a carrier material for analysis in connection with diseases associated with the immune system in which method at least one oligomer according to the present invention is coupled to a solid phase. Methods for manufacturing such arrays are known, for example, from U.S. Pat. No. 5,744,305 by means of solid-phase chemistry and photolabile protecting groups.

[0027] A further subject matter of the present invention relates to a DNA chip for analysis in connection with diseases associated with the immune system which DNA chip contains at least one nucleic acid according to the present invention. DNA chips are known, for example, from U.S. Pat. No. 5,837,832.

[0028] Moreover, a subject matter of the present invention is a kit which can be composed, for example, of a bisulfite-containing reagent, a set of primer oligonucleotides containing at least two oligonucleotides whose sequences in each case correspond or are complementary to an 18 bases-long segment of the base sequences specified in the appendix (Seq. ID No.1 through Seq. ID No.2420 and sequences complementary thereto and/or oligonucleotide- and/or PNA-oligomers according to table 1), oligonucleotides and/or PNA-oligomers as well as instructions for carrying out and evaluating the described method. However, a kit along the lines of the present invention can also contain only part of the aforementioned components.

[0029] The present invention also makes available a method for ascertaining genetic and/or epigenetic parameters of genes associated with the immune system by analysing cytosine methylations and single nucleotide polymorphisms, including the following steps:

[0030] In a first method steps, a genomic DNA sample is chemically treated in such a manner that cytosine bases which are unmethylated at the 5′-position are converted to uracil, thymine, or another base which is dissimilar to cytosine in terms of hybridisation behaviour. This will be understood by chemical pretreatment hereinafter.

[0031] The genomic DNA to be analysed is preferably obtained form usual sources of DNA such as cells or cell components, for example, cell lines, biopsies, blood, sputum, stool, urine, cerebral-spinal fluid, tissue embedded in paraffin such as tissue from eyes, intestine, kidney, brain, heart, prostate, lung, breast or liver, histologic object slides, or combinations thereof.

[0032] Preferably used for that is the above described treatment of genomic DNA with bisulfite (hydrogen sulfite, disulfite) and subsequent alkaline hydrolysis which results in a conversion of non-methylated cytosine nucleobases to uracil or to another base which is dissimilar to cytosine in terms of base pairing behaviour.

[0033] Fragments from this chemically pretreated DNA are amplified, using sets of primer oligonucleotides according to the present invention, and a, preferably heat-stable polymerase. Because of statistical and practicable considerations, preferably more than ten different fragments having a length of 100-2000 base pairs are amplified. The amplification of several DNA segments can be carried out simultaneously in one and the same reaction vessel. Usually, the amplification is carried out by means of the polymerase chain reaction (PCR).

[0034] In a preferred embodiment of the method, the set of primer oligonucleotides includes at least two olignonucleotides whose sequences are each reverse complementary or identical to an at least 18 base-pair long segment of the base sequences specified in the appendix (Seq. ID No.1 through Seq. ID No.2420 and sequences complementary thereto and/or oligonucleotide- and/or PNA-oligomers according to table 1). The primer oligonucleotides are preferably characterised in that they do not contain any CpG dinucleotide.

[0035] According to the present invention, it is preferred that at least one primer oligonucleotide is bonded to a solid phase during amplification. The different oligonucleotide and/or PNA-oligomer sequences can be arranged on a plane solid phase in the form of a rectangular or hexagonal lattice, the solid phase surface preferably being composed of silicon, glass, polystyrene, aluminium, steel, iron, copper, nickel, silver, or gold, it being possible for other materials such as nitrocellulose or plastics to be used as well.

[0036] The fragments obtained by means of the amplification can carry a directly or indirectly detectable label. Preferred are labels in the form of fluorescence labels, radionuclides, or detachable molecule fragments having a typical mass which can be detected in a mass spectrometer, it being preferred that the produced fragments have a single positive or negative net charge for better detectability in the mass spectrometer. The detection can be carried out and visualized by means of matrix assisted laser desorption/Ionization mass spectrometry (MALDI) or using electron spray mass spectrometry (ESI).

[0037] The amplificates obtained in the second method step are subsequently hybridised to a set of oligonucleotides and/or PNA probes of or to an array. In this context, the hybridisation takes place in the manner described in the following. The set used during hybridisation is preferably composed of at least 10 oligonucleotide or PNA-oligomer probes. In the process, the amplificates serve as probes which hybridize to oligonucleotides previously bonded to a solid phase. The non-hybridised fragments are subsequently removed. Said oligonucleotides contain at least one base sequence having a length of 13 nucleotides which is reverse complementary or identical to a segment of the base sequences specified in the appendix, the segment containing at least one CpG dinucleotide. The cytosine of the CpG dinucleotide is the 5th to 9th nucleotide seen from the 5′-end of the 13-mer. One oligonucleotide exists for each CpG dinucleotide. Said PNA-oligomers contain at least one base sequence having a length of 9 nucleotides which is reverse complementary or identical to a segment of the base sequences specified in the appendix, the segment containing at least one CpG dinucleotide. The cytosine of the CpG dinucleotide is the 4th to 6th nucleotide seen from the 5′-end of the 9-mer. One oligonucleotide exists for each CpG dinucleotide.

[0038] In the fourth method step, the non-hybridised amplificates are removed.

[0039] In the last method step, the hybridised amplificates are detected. In this context, it is preferred that labels attached to the amplificates are identifiable at each position of the solid phase at which an oligonucleotide sequence is located.

[0040] According to the present invention, it is preferred that the labels of the amplificates are fluorescence labels, radionuclides, or detachable molecule fragments having a typical mass which can be detected in a mass spectrometer. The mass spectrometer is preferred for the detection of the amplificates, fragments of the amplificates or of probes which are complementary to the amplificates, it being possible for the detection to be carried out and visualized by means of matrix assisted laser desorption/Ionization mass spectrometry (MALDI) or using electron spray mass spectrometry (ESI).

[0041] The produced fragments can have a single positive or negative net charge for better detectability in the mass spectrometer. The aforementioned method is preferably used for ascertaining genetic and/or epigenetic parameters of genes associated with the immune system.

[0042] The oligomers according to the present invention or arrays thereof as well as a kit according to the present invention are intended to be used for the diagnosis and/or therapy of diseases associated with the immune system by analysing methylation patters of genes associated with the immune system. According to the present invention, the method is preferably used for the diagnosis and/or therapy of important genetic and/or epigenetic parameters within genes associated with the immune system.

[0043] The method according to the present invention is used, for example, for the diagnosis and/or therapy of eye diseases, proliferative retinopathy, neovascular glaucoma, solid tumors, tissue inflammations, rheumatic arthritis, diabetic retinopathy, macular degeneration due to neovascularization, psoriasis, arteriosclerosis, inflammatory bowel diseases, ulcerative enteritis, Crohn's disease, and cancers.

[0044] The nucleic acids according to the present invention of Seq. ID No.1 through Seq. ID No.2420 and sequences complementary thereto and/or oligonucleotide- and/or PNA-oligomers according to table 1 also can be used for the diagnosis and/or therapy of genetic and/or epigenetic parameters of genes associated with the immune system.

[0045] The present invention moreover relates to a method for manufacturing a diagnostic agent and/or therapeutic agent for the diagnosis and/or therapy of diseases associated with the immune system by analysing methylation patterns of genes associated with the immune system, the diagnostic agent and/or therapeutic agent being characterised in that at least one nucleic acid according to the present invention is used for manufacturing it, possibly together with suitable additives and auxiliary agents.

[0046] A further subject matter of the present invention relates to a diagnostic agent and/or therapeutic agent for diseases associated with the immune system by analysing methylation patterns of genes associated with the immune system, the diagnostic agent and/or therapeutic agent containing at least one nucleic acid according to the present invention, possibly together with suitable additives and auxiliary agents.

[0047] The present invention moreover relates to the diagnosis and/or prognosis of events which are disadvantageous to patients or individuals, in which the important genetic and/or epigenetic parameters within genes associated with the immune system, obtained by means of the present invention, can be compared to another set of genetic and/or epigenetic parameters, the differences obtained in this manner serving as the basis for a diagnosis and/or prognosis of events which are disadvantageous to patients or individuals.

[0048] To be understood by the term “hybridisation” along the lines of the present invention is a bond of an oligonucleotide to a completely complementary sequence along the lines of the Watson-Crick base pairings in the sample DNA, forming a duplex structure. To be understood by “stringent hybridisation conditions” are those conditions in which a hybridisation is carried out at 60° C. in 2.5×SSC buffer, followed by several washing steps at 37° C. in a low buffer concentration, and remains stable.

[0049] The term “functional variants” denotes all DNA sequences which are complementary to a DNA sequence, hybridizing with the reference sequence under stringent conditions and having an activity similar to the corresponding polypeptide according to the present invention.

[0050] Along the lines of the present invention, “genetic parameters” are mutations and polymorphisms of genes associated with the immune system and sequences further required for its regulation. To be designated as mutations are, in particular, insertions, deletions, point mutations, inversions and polymorphisms and, particularly preferred, SNPs (single nucleotide polymorphisms). However, polymorphisms can also be insertions, deletions or inversions.

[0051] Along the lines of the present invention, “epigenetic parameters” are, in particular, cytosine methylations and further chemical modifications of DNA bases of genes associated with the immune system and sequences further required for their regulation. Further epigenetic parameters include, for example, the acetylation of histones which, however, cannot be directly analysed using the described method but which, in turn, correlates with the DNA methylation.

[0052] In the following, the present invention will be explained in greater detail on the basis of the sequences and examples without being limited thereto.

[0053] Seq ID No. 1 through Seq ID No. 2420

[0054] Sequences having odd sequence numbers (e.g., Seq. ID No. 1, 3, 5, . . . ) exhibit in each case different sequences of the chemically pretreated genomic DNAs of genes associated with the immune system. Sequences having even sequence numbers (e.g., Seq. ID No. 2, 4, 6, . . . ) exhibit in each case the sequences of the chemically pretreated genomic DNAs of genes associated with the immune system, which sequences beeing complementary to the different sequences (e.g., the complementary sequence to Seq. ID No.1 is Seq. ID No.2, the complementary sequence to Seq. ID No.3 is Seq. ID No.4, etc.).

[0055] Seq ID No. 2421 through Seq ID No. 2424

[0056] Seq ID No. 2421 through Seq ID No. 2424 show sequences of oligonucleotides, used in the examples.

### EXAMPLE 1

[0057] Carrying out the methylation analysis in the gene ESR1 (estrogen receptor) associated with the immune system.

[0058] The following example relates to a fragment of the gene ESR1, in which a specific CG-position is to be analysed for methylation.

[0059] In the first step, a genomic sequence is treated using bisulfite (hydrogen sulfite, disulfite) in such a manner that all cytosines which are not methylated at the 5-position of the base are changed in such a manner that a different base results with regard to the base pairing behaviour while the cytosines methylated in the 5-position remain unchanged. If bisulfite in the concentration range is used for the reaction, then an addition takes place at the non-methylated cytosine bases. Moreover, a denaturating reagent or solvent as well as a radical interceptor must be present. A subsequent alkaline hydrolysis then gives rise to the conversion of non-methylated cytosine nucleobases to uracil. This converted DNA serves for detecting methylated cytosines. In the second method step, the treated DNA sample is diluted with water or an aqueous solution. Preferably, a desulfonation of the DNA is subsequently carried out. In the third step of the method, the DNA sample is amplified in a polymerase chain reaction, preferably using a heat-resistant DNA polymerase. In the present case, cytosines of the gene ESR1 are analysed. To this end, a defined fragment having a length of 662 bp is amplified with the specific primer oligonucleotides AGGGGGAATTAAATAGAAAGAG (SEQ ID NO: 2421) and CAATAAAACCATCCCAAATACT (SEQ ID NO: 2422). This amplificate serves as a sample which hybridises to an oligonucleotide previously bonded to a solid phase, forming a duplex structure, for example TTTAATTTCGGGTTGTGT (SEQ ID NO: 2423), for the detection of a methylated state and TTTAATTTTGGGTTGTGT (SEQ ID NO: 2424) for the detection of a non-methylated state, wherein the cytosine to be detected being located at position 527 of the amplificate. The detection of the hybridisation product is based on Cy3 and Cy5 flourescently labelled primer oligonucleotides which have been used for the amplification. A hybridisation reaction of the amplified DNA with the oligonucleotide takes place only if a methylated cytosine was present at this location in the bisulfite-treated DNA. Thus, the methylation status of the specific cytosine to be analysed decides on the hybridisation product. In the present case (FIG. 1) for the oligomers in illustration A a non-methylated status and for the oligomers in illustration B a partly methylated status is detected.

### EXAMPLE 2

[0060] Diagnosis of diseases associated with the immune system

[0061] To relate the methylation patterns to one of the diseases associated with the immune system, it is initially required to analyse the DNA methylation patterns of a group of diseased and of a group of healthy patients. These analyses are carried out, for example, analogously to example 1. The results obtained in this manner are stored in a database and the CpG dinucleotides which are methylated differently between the two groups are identified, for example by labelled probes. It is also possible for the entire methylation status to be analysed simultaneously, and for the patterns to be compared, for example, by clustering analyses which can be carried out, for example, by a computer.

[0062] Subsequently, it is possible to allocate the examined patients to a specific therapy group and to treat these patients selectively with an individualized therapy.

[0063] Example 2 can be carried out, for example, for the following diseases: asthma, arteriosclerosis, anemia, pancreatic carcinoma, acute myeloid leukaemia, Alzheimer's disease, aids, epilepsy, neurofibromatosis.

TABLE 1
List of the preferred genes, associated with the immune system,
according to the present invention

| | Genbank Accession Nr.. |
|---|---|
| Gen | (http://www.ncbi.nlm.nih.gov) |
| A1BG | T80683 |
| C4A | K02403 |
| C4BPAL2 | X81360 |
| CD1A | M27735 |
| CD20 | L23418 |
| CDR2 | M63256 |
| CENPB | X05299 |
| COL11A2 | U32169 |
| CR1L | M31230 |
| CYP2A | X06401 |
| EBF | AA504812 |
| ERCC2 | L47234 |
| ESD | M13450 |
| ETV4 | D12765 |
| FCGR2C | M90737 |
| FLG | M24355 |
| FN1 | M10905 |
| ITGA1 | X68742 |
| ITGAD | U40274 |
| KRT4 | X07695 |
| KSR | U43586 |
| LY9 | L42621 |
| MEKK1 | U29671 |
| MFAP4 | L38486 |
| MMP18 | Y08622 |
| MYCL1 | M19720 |
| NOTCH1 | M73980 |
| PDE7A | L12052 |
| PIK3R1 | M61906 |
| SLC9A1 | M81768 |
| TCF3 | M31222 |
| TCRA | M12959 |
| TCRB | K02779 |
| TCRG | M27331 |
| TLR5 | U08888 |
| TNFSF11 | AF013171 |
| UBC | AB009010 |
| ZNF121 | M99593 |
| ZRK | L08961 |
| ALPPL2 | NM_031313 |
| AHSG | NM_001622 |
| FCGR3A | NM_000569 |
| FUT3 | NM_000149 |
| IL1R2 | NM_004633 |
| IL2RB | NM_000878 |
| LHB | NM_000894 |
| MDH2 | NM_005918 |
| SLC11A2 | NM_000617 |
| OMG | NM_002544 |
| PIK3CA | NM_006218 |
| TPM1 | NM_000366 |
| TUB | NM_003320 |
| ABAT | NM_000663 |
| ACADL | NM_001608 |
| ACO1 | NM_002197 |
| ADAM10 | NM_001110 |
| ADD1 | NM_014189 |
| ADH4 | NM_000670 |
| ADRA2C | NM_000683 |
| AGA | NM_000027 |
| AGTR2 | NM_000686 |
| AKT1 | NM_005163 |
| ALDH6 | NM_000693 |
| AMPH | NM_001635 |
| ANXA4 | NM_001153 |
| APBA2 | NM_005503 |
| APC | NM_000038 |
| APOA2 | NM_001643 |
| ARHGAP1 | NM_004308 |
| ATOX1 | NM_004045 |
| ATP2B2 | NM_001683 |
| ATP4B | NM_000705 |
| ATR | NM_001184 |
| AUH | NM_001698 |
| AXL | NM_001699 |
| BCL2 | NM_000633 |
| BENE | NM_005434 |
| BID | NM_001196 |
| BMI1 | NM_005180 |
| BN51T | NM_001722 |
| BUB1 | NM_004336 |
| C1R | NM_001733 |
| C4BPB | NM_000716 |
| C5R1 | NM_001736 |
| CASP3 | NM_004346 |
| CASP7 | NM_001227 |
| CBFB | NM_001755 |
| CCR4 | NM_005508 |
| CD151 | NM_004357 |
| CD36L1 | NM_005505 |
| CD4 | NM_000616 |
| CD81 | NM_004356 |
| CDH12 | NM_004061 |
| CDW52 | NM_001803 |
| CEL | NM_001807 |
| CES1 | NM_001266 |
| CGA | NM_000735 |
| CHS1 | NM_000081 |
| CLDN3 | NM_001306 |
| CNK | NM_004073 |
| CSF2RA | NM_006140 |
| CTSK | NM_000396 |
| CX3CR1 | NM_001337 |
| CYBB | NM_000397 |
| CYP11A | NM_000781 |
| DCC | NM_005215 |
| DFFB | NM_004402 |
| DOCK1 | NM_001380 |
| DPYD | NM_000110 |
| ELAVL2 | NM_004432 |
| ELAVL4 | NM_021952 |
| EPB41 | NM_004437 |
| EPHA3 | NM_005233 |
| EPHX2 | NM_001979 |
| EPS15 | NM_001981 |
| ETV6 | NM_001987 |
| F2 | NM_000506 |
| F8A | NM_012151 |
| FABP6 | NM_001445 |
| FADD | NM_003824 |
| FANCE | NM_021922 |
| FCAR | NM_002000 |
| FGA | NM_021871 |
| FGB | NM_005141 |
| FGFR3 | NM_000142 |
| FGG | NM_000509 |
| HFL3 | NM_005666 |
| FOXO1A | NM_002015 |
| ADAM2 | NM_001464 |
| FUCA1 | NM_000147 |
| FUT2 | NM_000511 |
| FY | NM_002036 |
| GABRA5 | NM_000810 |
| GABRA6 | NM_000811 |
| GAS | NM_000805 |
| GAS6 | NM_000820 |
| GBA | NM_000157 |
| GFI1 | NM_005263 |
| GH2 | NM_002059 |
| GHR | NM_000163 |
| GIF | NM_005142 |
| GNAQ | NM_002072 |
| GP9 | NM_000174 |
| GPR15 | NM_005290 |
| GPR30 | NM_001505 |
| GRB14 | NM_004490 |
| GRIK1 | NM_000830 |
| GUCY2D | NM_000180 |
| HADHA | NM_000182 |
| NRG1 | NM_013964 |
| HIVEP1 | NM_002114 |
| HLALS | NM_001531 |
| HLCS | NM_000411 |
| HMX1 | NM_018942 |
| HNRPD | NM_002138 |
| HSA277165 | NM_018411 |
| HRG | NM_000412 |
| HSPG2 | NM_005529 |
| HTN3 | NM_000200 |
| HTR2A | NM_000621 |
| HTR7 | NM_000872 |
| IFNA1 | NM_024013 |
| IL10RA | NM_001558 |
| IL1A | NM_000575 |
| IL1B | NM_000576 |
| IL1R1 | NM_000877 |
| IL3RA | NM_002183 |
| IL9 | NM_000590 |
| ILF1 | NM_004514 |
| ILF2 | NM_004515 |
| SCYB10 | NM_001565 |
| INPP5D | NM_005541 |
| ITGAX | NM_000887 |
| ITGB1 | NM_002211 |
| ITGB3 | NM_000212 |
| ITGB5 | NM_002213 |
| ITGB7 | NM_000889 |
| ITK | NM_005546 |
| KCNJ3 | NM_002239 |
| KPNA1 | NM_002264 |
| LECT2 | NM_002302 |
| LEPR | NM_002303 |
| LPA | NM_005577 |
| KCNH2 | NM_000238 |
| LSP1 | NM_002339 |
| LTF | NM_002343 |
| MAB21L1 | NM_005584 |
| MAL | NM_002371 |
| MASP1 | NM_001879 |
| MCF2 | NM_005369 |
| MAP3K3 | NM_002401 |
| MMP16 | NM_022564 |
| MMP17 | NM_016155 |
| MMP23A | NM_004659 |
| MMP7 | NM_002423 |
| MYC | NM_002467 |
| NAGA | NM_000262 |
| NAT2 | NM_000015 |
| NDUFS2 | NM_004550 |
| NEB | NM_004543 |
| NEU1 | NM_000434 |
| NFATC4 | NM_004554 |
| NFE2L2 | NM_006164 |
| NFRKB | NM_006165 |
| NGFB | NM_002506 |
| NTF3 | NM_002527 |
| NUMA1 | NM_006185 |
| TNRC11 | NM_005120 |
| SLC22A1L | NM_002555 |
| DUSP2 | NM_004418 |
| PAFAH2 | NM_000437 |
| PAPPA | NM_002581 |
| PCM1 | NM_006197 |
| PCTK1 | NM_006201 |
| PDE4A | NM_006202 |
| PDE4B | NM_002600 |
| PEX10 | NM_002617 |
| SERPINB9 | NM_004155 |
| PIGA | NM_002641 |
| PLAGL1 | NM_002656 |
| POU2AF1 | NM_006235 |
| PRKG1 | NM_006258 |
| MAPK10 | NM_002753 |
| MAPK9 | NM_002752 |
| PROP1 | NM_006261 |
| PSD | NM_002779 |
| PTK2B | NM_004103 |
| PTN | NM_002825 |
| PTPN13 | NM_006264 |
| PTPN6 | NM_002831 |
| PTPRD | NM_002839 |
| PTPRG | NM_002841 |
| QDPR | NM_000320 |
| RAC3 | NM_005052 |
| RELA | NM_021975 |
| REQ | NM_006268 |
| RMSA1 | NM_002932 |
| RSN | NM_002956 |
| S100A7 | NM_002963 |
| S100A8 | NM_002964 |
| IQGAP1 | NM_003870 |
| SCN1B | NM_001037 |
| SCN5A | NM_000335 |
| SCNN1G | NM_001039 |
| SCYA14 | NM_004166 |
| SCYA7 | NM_006273 |
| SDHC | NM_003001 |
| SELPLG | NM_003006 |
| SFTPA2 | NM_006926 |
| SGSH | NM_000199 |
| SHMT2 | NM_005412 |
| MYH11 | NM_002474 |
| SNRPN | NM_003097 |
| SOAT1 | NM_003101 |
| SORL1 | NM_003105 |
| SPP1 | NM_000582 |
| SSTR1 | NM_001049 |
| STATI2 | NM_003877 |
| STX1B | NM_003163 |
| TCF8 | NM_030751 |
| TCP1 | NM_030752 |
| TF | NM_001063 |
| TGFBI | NM_000358 |
| TGFBR3 | NM_003243 |
| TGM2 | NM_004613 |
| TLR1 | NM_003263 |
| TM4SF7 | NM_003271 |
| TNFAIP6 | NM_007115 |
| TNFRSF1A | NM_001065 |
| TNFSF12 | NM_003809 |
| TPH | NM_004179 |
| TPI1 | NM_000365 |
| TRAF2 | NM_021138 |
| TRAF5 | NM_004619 |
| TSTA3 | NM_003313 |
| TTR | NM_000371 |
| UBE1 | NM_003334 |
| UBE2V2 | NM_003350 |
| UMPK | NM_012474 |
| UP | NM_003364 |
| UPK1B | NM_006952 |
| USP7 | NM_003470 |
| VASP | NM_003370 |
| VDR | NM_000376 |
| NSEP1 | NM_004559 |
| ZFP161 | NM_003409 |
| AQP1 | NM_000385 |
| BDKRB1 | NM_000710 |
| F13A1 | NM_000129 |

1. A nucleic acid comprising an at a least 18 bases-long sequence segment of the chemically pretreated DNA of genes associated with the immune system according to one of the Seq. ID No.1 through Seq. ID No.2420 and sequences complementary thereto.

2. A nucleic acid comprising an at a least 18 bases-long sequence segment of the chemically pretreated DNA of genes associated with the immune system according to one of the sequences of the genes A1BG (T80683), C4A (K02403), C4BPAL2 (X81360), CD1A (M27735), CD20 (L23418), CDR2 (M63256), CENPB (X05299), COL11A2 (U32169), CR1L (M31230), CYP2A (X06401), EBF (AA504812), ERCC2 (L47234), ESD (M13450), ETV4 (D12765), FCGR2C (M90737), FLG (M24355), FN1 (M10905), ITGA1 (X68742), ITGAD (U40274), KRT4 (X07695), KSR (U43586), LY9 (L42621), MEKK1 (U29671), MFAP4 (L38486), MMP18 (Y08622), MYCL1 (M19720), NOTCH1 (M73980), PDE7A (L12052), PIK3R1 (M61906), SLC9A1 (M81768), TCF3 (M31222), TCRA (M12959), TCRB (K02779), TCRG (M27331), TLR5 (U08888), TNFSF11 (AF013171), UBC (AB009010), ZNF121 (M99593), ZRK (L08961), ALPPL2 (NM_{—}031313), AHSG (NM_{—}001622), FCGR3A (NM_{—}000569), FUT3 (NM_{—}000149), IL1R2 (NM_{—}004633), IL2RB (NM_{—}000878), LHB (NM_{—}000894), MDH2 (NM_{—}005918), SLC11A2 (NM_{—}000617), OMG (NM_{—}002544), PIK3CA (NM_{—}006218), TPM1 (NM_{—}000366), TUB (NM_{—}003320), ABAT (NM 000663), ACADL (NM_{—}001608), ACO1 (NM_{—}002197), ADAM10 (NM_{—}001110), ADD1 (NM_{—}014189), ADH4 (NM_{—}000670), ADRA2C (NM_{—}000683), AGA (NM_{—}000027), AGTR2 (NM_{—}000686), AKT1 (NM_{—}005163), ALDH6 (NM_{—}000693), AMPH (NM_{—}001635), ANXA4 (NM_{—}001153), APBA2 (NM_{—}005503), APC (NM_{—}000038), APOA2 (NM_{—}001643), ARHGAP1 (NM_{—}004308), ATOX1 (NM_{—}004045), ATP2B2 (NM_{—}001683), ATP4B (NM_{—}000705), ATR (NM_{—}001184), AUH (NM_{—}001698), AXL (NM_{—}001699), BCL2 (NM_{—}000633), BENE (NM_{—}005434), BID (NM_{—}001196), BMI1 (NM_{—}005180), BN51T (NM_{—}001722), BUB1 (NM_{—}004336), C1R (NM_{—}001733), C4BPB (NM_{—}000716), C5R1 (NM_{—}001736), CASP3 (NM_{—}004346), CASP7 (NM_{—}001227), CBFB (NM_{—}001755), CCR4 (NM_{—}005508), CD151 (NM_{—}004357), CD36L1 (NM_{—}005505), CD4 (NM_{—}000616), CD81 (NM_{—}004356), CDH12 (NM_{—}004061), CDW52 (NM_{—}001803), CEL (NM_{—}001807), CES1 (NM_{—}001266), CGA (NM_{—}000735), CHS1 (NM_{—}000081), CLDN3 (NM_{—}001306), CNK (NM_{—}004073), CSF2RA (NM_{—}006140), CTSK (NM_{—}000396), CX3CR1 (NM_{—}001337), CYBB (NM_{—}000397), CYP11A (NM_{—}000781), DCC (NM_{—}005215), DFFB (NM_{—}004402), DOCK1 (NM_{—}001380), DPYD (NM_{—}000110), ELAVL2 (NM_{—}004432), ELAVL4 (NM_{—}021952), EPB41 (NM_{—}004437), EPHA3 (NM_{—}005233), EPHX2 (NM_{—}001979), EPS15 (NM_{—}001981), ETV6 (NM_{—}001987), F2 (NM_{—}000506), F8A (NM_{—}012151), FABP6 (NM_{—}001445), FADD (NM_{—}003824), FANCE (NM_{—}021922), FCAR (NM_{—}002000), FGA (NM_{—}021871), FGB (NM_{—}005141), FGFR3 (NM_{—}000142), FGG (NM_{—}000509), HFL3 (NM_{—}005666), FOXO1A (NM_{—}002015), ADAM2 (NM_{—}001464), FUCA1 (NM_{—}000147), FUT2 (NM_{—}000511), FY (NM_{—}002036), GABRA5 (NM_{—}000810), GABRA6 (NM_{—}000811), GAS (NM_{—}000805), GAS6 (NM_{—}000820), GBA (NM_{—}000157), GFI1 (NM_{—}005263), GH2 (NM_{—}002059), GHR (NM_{—}000163), GIF (NM_{—}005142), GNAQ (NM_{—}002072), GP9 (NM_{—}000174), GPR15 (NM_{—}005290), GPR30 (NM_{—}001505), GRB14 (NM_{—}004490), GRIK1 (NM_{—}000830), GUCY2D (NM_{—}000180), HADHA (NM_{—}000182), NRG1 (NM_{—}013964), HIVEP1 (NM_{—}002114), HLALS (NM_{—}001531), HLCS (NM_{—}000411), HMX1 (NM_{—}018942), HNRPD (NM_{—}002138), HSA277165 (NM_{—}018411), HRG (NM_{—}000412), HSPG2 (NM_{—}005529), HTN3 (NM_{—}000200), HTR2A (NM_{—}000621), HTR7 (NM_{—}000872), IFNA1 (NM_{—}024013), IL10RA (NM_{—}001558), IL1A (NM_{—}000575), IL1B (NM_{—}000576), IL1R1 (NM_{—}000877), IL3RA (NM_{—}002183), IL9 (NM_{—}000590), ILF1 (NM_{—}004514), ILF2 (NM_{—}004515), SCYB10 (NM_{—}001565), INPP5D (NM_{—}005541), ITGAX (NM_{—}000887), ITGB1 (NM_{—}002211), ITGB3 (NM_{—}000212), ITGB5 (NM_{—}002213), ITGB7 (NM_{—}000889), ITK (NM_{—}005546), KCNJ3 (NM_{—}002239), KPNA1 (NM_{—}002264), LECT2 (NM_{—}002302), LEPR (NM_{—}002303), LPA (NM_{—}005577), KCNH2 (NM_{—}000238), LSP1 (NM_{—}002339), LTF (NM_{—}002343), MAB21L1 (NM_{—}005584), MAL (NM_{—}002371), MASP1 (NM_{—}001879), MCF2 (NM_{—}005369), MAP3K3 (NM_{—}002401), MMP16 (NM_{—}022564), MMP17 (NM_{—}016155), MMP23A (NM_{—}004659), MMP7 (NM_{—}002423), MYC (NM_{—}002467), NAGA (NM_{—}000262), NAT2 (NM_{—}000015), NDUFS2 (NM_{—}004550), NEB (NM_{—}004543), NEU1 (NM_{—}000434), NFATC4 (NM_{—}004554), NFE2L2 (NM_{—}006164), NFRKB (NM_{—}006165), NGFB (NM_{—}002506), NTF3 (NM_{—}002527), NUMA1 (NM_{—}006185), TNRC11 (NM_{—}005120), SLC22A1L (NM_{—}002555), DUSP2 (NM_{—}004418), PAFAH2 (NM_{—}000437), PAPPA (NM_{—}002581), PCM1 (NM_{—}006197), PCTK1 (NM_{—}006201), PDE4A (NM_{—}006202), PDE4B (NM_{—}002600), PEX10 (NM_{—}002617), SERPINB9 (NM_{—}004155), PIGA (NM_{—}002641), PLAGL1 (NM_{—}002656), POU2AF1 (NM_{—}006235), PRKG1 (NM_{—}006258), MAPK10 (NM_{—}002753), MAPK9 (NM_{—}002752), PROP1 (NM_{—}006261), PSD (NM_{—}002779), PTK2B (NM_{—}004103), PTN (NM_{—}002825), PTPN13 (NM_{—}006264), PTPN6 (NM_{—}002831), PTPRD (NM_{—}002839), PTPRG (NM_{—}002841), QDPR (NM_{—}000320), RAC3 (NM_{—}005052), RELA (NM_{—}021975), REQ (NM_{—}006268), RMSA1 (NM_{—}002932), RSN (NM_{—}002956), S100A7 (NM_{—}002963), S100A8 (NM_{—}002964), IQGAP1 (NM_{—}003870), SCN1B (NM_{—}001037), SCN5A (NM_{—}000335), SCNN1G (NM_{—}001039), SCYA14 (NM_{—}004166), SCYA7 (NM_{—}006273), SDHC (NM_{—}003001), SELPLG (NM_{—}003006), SFTPA2 (NM_{—}006926), SGSH (NM_{—}000199), SHMT2 (NM_{—}005412), MYH11 (NM_{—}002474), SNRPN (NM_{—}003097), SOAT1 (NM_{—}003101), SORL1 (NM_{—}003105), SPP1 (NM_{—}000582), SSTR1 (NM_{—}001049), STATI2 (NM_{—}003877), STX1B (NM_{—}003163), TCF8 (NM_{—}030751), TCP1 (NM_{—}030752), TF (NM_{—}001063), TGFBI (NM_{—}000358), TGFBR3 (NM_{—}003243), TGM2 (NM_{—}004613), TLR1 (NM_{—}003263), TM4SF7 (NM_{—}003271), TNFAIP6 (NM_{—}007115), TNFRSF1A (NM_{—}001065), TNFSF12 (NM_{—}003809), TPH (NM_{—}004179), TPI1 (NM_{—}000365), TRAF2 (NM_{—}021138), TRAF5 (NM_{—}004619), TSTA3 (NM_{—}003313), TTR (NM_{—}000371), UBE1 (NM_{—}003334), UBE2V2 (NM_{—}003350), UMPK (NM_{—}012474), UP (NM_{—}003364), UPK1B (NM_{—}006952), USP7 (NM_{—}003470), VASP (NM_{—}003370), VDR (NM_{—}000376), NSEP1 (NM_{—}004559), ZFP161 (NM_{—}003409), AQP1 (NM_{—}000385), BDKRB1 (NM_{—}000710), F13A1 (NM_{—}000129), and complementary sequences thereof.

3. An oligomer (oligonucleotide or peptide nucleic acid (PNA)-oligomer) for detecting the cytosine methylation status in chemically pretreated DNA, comprising in each case at least one base sequence having a length of at least 9 nucleotides which hybridises to a chemically pretreated DNA of genes associated with the immune system according to one of the Seq. ID No.1 through Seq. ID No.2420 according to claim 1 or to a chemically pretreated DNA of genes according to claim 2 and to the complementary sequences thereof.

4. The oligomer according to claim 3, wherein the base sequence comprises at least one CpG dinucleotide.

5. The oligomer as recited in claim 3, characterised in that the cytosine of the CpG dinucleotide is located approximately in the middle third of the oligomer.

6. A set of oligomers comprising at least two oligomers according to one of the claims 3 to 5.

7. The set of oligomers according to claim 6 comprising oligomers for the detection of the methylation status of all CpG dinucleotides from one of the sequences Seq. ID 1 through Seq. ID 2420 according to claim 1 or from a chemically pretreated DNA from genes according to claim 2 and complementary sequences thereof.

8. The set of at least two oligonucleotides according to claim 3, for the amplification of DNA sequences of a sequence from one of the Seq. ID 1 through Seq. ID 2420 and complementary sequences therof, and/or sequences of a chemically pretreated DNA from genes according to claim 2 and complementary sequences or segments thereof.

9. A set of oligonucleotides according to claim 8, characterised in that at least one oligonucleotide is bonded to a solid phase.

10. A set of oligomer probes, comprising at least ten oligomers according to one of the claims 6 to 9, for the detection of the cytosine methylation state and/or single nucleotide polymorphisms (SNPs) in chemically pretreated genomic DNA according to claim 1 or a chemically pretreated DNA from genes according to claim 2.

11. A method for manufacturing an arrangement of different oligomers (array) fixed to a carrier material for the analysis of [diseases] associated with the methylation state of the CpG dinucleotides of one of the Seq. ID 1 through Seq. ID 2420 and to sequences complementary thereof [and/or oligonucleotide-] and/or chemically pretreated DNA from genes according to claim 2, werein at least one oligomer according to one of the claims 3 to 5 is coupled to a solid phase.

12. An arrangement of different oligomers (array), bonded to a solid phase, according to claim 11.

13. An array of different oligonucleotide- and/or PNA-oligomer sequences according to claim 12, characterised in that these are arranged on a plane solid phase in the form of a rectangular or hexagonal lattice.

14. The array according to claims 12 or 13, characterised in that the solid phase surface is composed of silicon, glass, polystyrene, aluminium, steel, iron, copper, nickel, silver, or gold.

15. A DNA- and/or PNA-array for analysing diseases associated with the methylation status of genes, comprising at least one nucleic acid according to one of the preceding claims.

16. A method for ascertaining genetic and/or epigenetic parameters for the diagnosis and/or therapy of existing diseases or the predisposition for specific diseases by analysing cytosine methylations, characterised in that the following steps are carried out:
in a genomic DNA sample, cytosine bases which are unmethylated at the 5-position are converted, by chemical treatment, to uracil or another base which is dissimilar to cytosine in terms of hybridisation behaviour;
fragments from this chemically pretreated genomic DNA are amplified using sets of primer oligonucleotides according to claim 8 or 9 and a polymerase, the amplificates carrying a detectable label;
amplificates are hybridised to a set of oligonucleotides and/or PNA probes according to the claims 6 to 7, or else to an array according to one of the claims 12 to 15;
the hybridised amplificates are subsequently detected.

17. The method according to claim 16, characterised in that the chemical treatment is carried out by means of a solution of a bisulfite, hydrogen sulfite or disulfite.

18. The method according to one of the claims 16 or 17, characterised in that more than ten different fragments having a length of 100-2000 base pairs are amplified.

19. The method according to one of the claims 16 to 18, characterised in that the amplification of several DNA segments is carried out in one reaction vessel.

20. The method according to one of the claims 16 to 19, characterised in that the polymerase is a heat-resistant DNA polymerase.

21. The method according to claim 20, characterised in that the amplification is carried out by means of polymerase chain reaction (PCR).

22. The method according to one of the claims 16 to 21, characterised in that the labels of the amplificates are fluorescence labels.

23. The method method according to one of the claims 16 to 21, characterised in that the labels of the amplificates are radionuclides.

24. The method according to one of the claims 16 to 21, characterised in that the labels of the amplificates are detachable molecule fragments having a typical mass which are detected in a mass spectrometer.

25. The method according to one of the claims 16 to 21, characterised in that the amplificates or fragments of the amplificates are detected in the mass spectrometer.

26. The method according to one of the claims 24 and/or 25, characterised in that the produced fragments have a single positive or negative net charge for better detectability in the mass spectrometer.

27. The method according to one of the claims 24 to 26, characterised in that detection is carried out and visualized by means of matrix assisted laser desorption/Ionization mass spectrometry (MALDI) or using electron spray mass spectrometry (ESI).

28. The method according to one of the claims 16 to 27, characterised in that the genomic DNA is obtained form cells or cell components containing DNA, the sources of DNA comprising, for example, cell lines, biopsies, blood, sputum, stool, urine, cerebral-spinal fluid, tissue embedded in paraffin such as tissue from eyes, intestine, kidney, brain, heart, prostate, lung, breast or liver, histologic object slides, and all possible combinations thereof.

29. A kit comprising a bisulfite (=disulfite, hydrogen sulfite) reagent as well as oligonucleotides and/or PNA-oligomers according to one of the claims 3 to 5.

30. The use of a nucleic acid according to one of the claims 1 or 2, of an oligonucleotide or PNA-oligomer according to one of the claims 3 through 5, of a kit according to claim 29, of an array according to one of the claims 12 through 15, of a set of oligonucleotides according to one of the claims 6 to 9, for the diagnosis of diseases associated with the immune system.

31. The use of a nucleic acid according to one of the claims 1 or 2, of an oligonucleotide or PNA-oligomer according to one of the claims 3 to 5, of a kit according to claim 29, of an array according to one of the claims 12 to 15, of a set of oligonucleotides according to one of the claims 6 to 9, for the therapy of diseases associated with the immune system.

The application's sequence listing, which the Patent Office published only in electronic form, follows.

SEQUENCE LISTING (2424 sequences)

SEQ ID NO: 1 - DNA, 7351 bp, Artificial Sequence
  chemically treated genomic DNA (Homo sapiens)
aaaaaaaatatatatatatatatatatatatatatatatacgttagtgggatagtataaatgagaaaaattttgttttttgattattgagtatatttttgtagatatatattttttttattgtagattttgtttaagatatttcgttaaagataaagttagtatattttttaatagggtgaatatggttatgttatttattgagtttgtttttgatattagttaatatgtaattagatgaaattgttattatcgttattgttaggattatgggaagtttaagtgttttttttttaaggataatgtgcgttaattgtataattggtataattaaataagttatatttagtttttgggaagtattatagtaatataaggagaaaatttgattttatttatttttgttaaggtttatttattttttaattttaattttttttattttttaaatattttttgtttgtttttattgttatgtgtttttttgtattttgtttttttatttttttttttatggattatttttttttttttttttttttcgttttatttttttattttagttttttagtagtatttgttaaatattttaaaattgtatagaattggtttaaattgtgtgtttttttttttgttaagaatttgttatttaggtaatttaattggtgattttttttggaaatattgatggatgttgtttttatagcgaaatttagaatagagatgaaatagatgttatttttagttattagtatttaaattataaaaattaatttatattggtatagtaaggattagaatgttaaagttgtgttatatttagtattttgtatgaaattattttattaaggtgagattatagatattattgttttattattggtatgaaagttgaggtttagagtagttaattgagttatttaggattatatagttaagttagaagtagggtttaggtgttttggtaattaattggtttagttatttttttttttaagttcgtttttttttttttaaagaataggaggttttgtcgtggtgaaaggcgattttagtaatatttttttttttatttgtgattataatgaatgcggtattttttttattaaggattatttttttatttatatttttaatatatttgttgtatgtattttttagagatttttttttgggattatttttttttattttaaaaagtttaattttttttttgttatttgtattttttatttagtatttttagaagtaatattttatttaaatttatttaagtttatttttatttaaagaaatattttttttattttggtattttcgttaggtattgttttgttgttttttttttttttagataaattgttaaattggttttagttttttatattttttattatttttagtaagtttttgttttatatcggtattgaaatagttgaattttaatgtttttgtttttaaatttagtagaaaaaaaaaattaattaattatttgattttatagcggtatttgatatgggtagttaggaatttattaatgataatttttatagattatttttgtaatttattatgaggtattaaatgaatgttattaatattaattttttttattttaagttattaatttaagtaaatgtttatttatttttagcgttttagaaattatttaaattatgttatattatgaattaatatattataaaattatattattatttgtaataattttttaaaatgttgtgtgttattaatattgatgttttggtataaagttatgattattttggtttagtagtaattttttattgattatttttttattaaagcggtttttttcgtgggatttagagattttatatttttttgtttgtgtttttttttttttaattggttttttttgttttatttgggtgtttttgtttattgtttagataagagtattttttgtaattttgttttgggttttttttttttttttattaatattttttacgtgggtattattatttatttttatggtattagtttgtttaataaattgataaatttatagtttttataagtatagtagattttattaagttagtggtatttagattgttttaattttaattaaaaataagggattttgtatatgtttaataagtagtttttattgtgatattgtaattatatttttataattgtgatttaggatatttagagtaaaggatatagatgattgagatagaaatagtgataaagaaaaataaggttaggatatagattttaatgttgtaatagattttaaaatataatggtttaattaagagaatgtatttttttgttatataaaggttttaattggcgtagatttttgatgatttaagggtttaggttgtgtttggtttgtggttttgttttttttaatatatggtttttatttgatgagttatagtagtatttattattagttagtatgtttatattttagtttgggtaaggaagaaaggggaagcgtagaattgtatttttttttttttaagttatgaattgaaagttgtatgtattatttttatttgttttttagttattagaatttagttatatgttatatttagttttaagggagtgggttaaaaatatagaagttaattaggtagtttgtatttagtaaaggatcgggagttttattattaaagtagaattggagaagtggtaataggaaataattattagtttttgttgtatgtatatgaaatagatgttttttaaattattatttttatttattttgtttgatatattgtattttttattatatttttttttattttttaaaattttggttatgatttatagggtatgatgttataatttatttagatgttaatattataatttgaaaaatattatttatattatgtttaatattggttatttgaagtatggttagtttaaattgatttatgttgtaagtataaaatttatattagtttgtgaaaataaattatgaaaaaaaagtttttaagatattattaataattttatattggttaaatgttgaaatgattatattttggatatattggattaaataaaatatattattaaaattaatttaatgtttttttttatgtggttattagaaaatttaaaatttaaaattatatagggcgattatattttatttttagtagattatattgttgtaagtttaagatttaaatgttaaatttttgtgaatattaatacgtgaatattttataagtatttattttatttttttaatttttagtttttttgttttttttttgtttttattaatttgtgttttttttgttttatttatttagttaaaggtaatataatttatttcgtgacgagttaggaaaatggaaagatatatttttttttattttttatattgatatatttattgagtattataattattttttaaatatgatataaatttgtaagttttttttaatattattataaattttatagtttaaaatgttattagtttttatttatattattatattagtttttatttggtttttttgtattttggattatttttttttagttgtttttttaaattttaataagagtaagttttttaggaaataaatttgaagttaatttattgagtatttttttgaatattttaatattgttgataaatttttttttgatttgaagtattagaaaggaatattttttttatattaaatagtttttattttatgtatgtgtcgtgattttttttttttttttgtatttgttattcgttatgtttagaaagttttttttatttttttgtttttcgagataattattatttatattttagagtttaatttatattttgtttttttttaaaatttttttaaaaggttttaggtttgggttatgtgtttttttatgtgtttttagagtattttgaatttttgtaataatatgtttggttattgtattttatatagtagttttatattgtattttatattgtattttatatagtaggtgttatattgtattttatatagtagttgtttttttgtttgtttttgttttaataagaatgtaaaatttttaagtgtttgtttttatatttatttgattattttatttttagaattttgtatgatgtttagttttagtaggattaaaaaatatttataaagtaattgaatagttatatgaatagatggatgaataaatgtatgggtggatggatggattaatgaaattatttatatgatttaaagtttgtagaggagtattatatttggaaggtagtaaggaagtttgtgtagtcgatggtaaaggtaattgggaagtttgttaggtataataggttaaaatttgtttttgaagttttgttattttacgtttttttgttttatttttttaaaataggaaatttttttttatgattatttttttagggtttggttttttatttgtaatttagtaatatttttaatgttaaaaagttattggtttaattcgtgttatttttaaagaggattattgaattttgatgtggttttaaatatttaggttaggtatatttaatggagaatttgtagttatattgatttgtagtgaaatatttattttgagtttgtttagtgttgtttaaattgtagttttttttgttagttatttatataagagatgtgagaagtattataaaaggcgttgtgaggagttgtgggggagtgagggagagaagaggttgaaaagtttattagttgttgtacggtaaaagtgagtttttacgggaatgggaatgtagttttagttttttagggattttatttagttcgttaggaattaattttgattataaataggttattaatgatttttttagagaatgtttagagattttaattttgtttagagattttgtgtgggtggaattttttgtttgtatatagagtagtataaagtttagttgttttgggaagtgtttgggattagatggattgtagggagtagggtataatatagtttgtttttttttagttttttttttttgtaatatggggaagaataaatttttttatttaagtttggtttttttttttttggtttttttgtttatagacgttttagtttttggaaaatcgtgagttttatatagagagcgtgaagtatgaatttagagttttttatttattgtagatttttttttatattattttttttttttttttatgatattgttatttttttatttttaagattttttttagattttataaatttagtttatttattatttgtttatttttaattatttttttttaattttttgaagttttaatatgtaaagtttttttaaggggtgttagaaatttttagttttttaaaagaataaattttagatatttatatttatattgatttatttgagattatgttatttatttttttttatttttttttttttaagggtttattttttattttataaaaataaagataatttttttttataattaaatatggaataatgttttggagtataaaaatttatagagtgttaaataaaggaataatttgaaatattggtgttgatattgaaaaagtaagggattttaatgttagaagagaaatttttttgtagatgaggtggtgatgaattttttgttttaatataattgaaggaggaattgaaggaaatattagttgatgagtgatgagaagggatttttgataatagagtattaggtgatttttggtatgtaatgtagaagttgtaagaagtggtaataatgatgtaattgttttatttgttatttatttatttttatgtgagttattttttttagtatttatagttatataaaataaaaatagtaatagaattaatgttgtttaatttttgtaatttatggatgtataaatttattgggggaaaaaatagtttattatttttattaaagatgtgttttaaaagtattttaattttatatttaatatgtatgaattatattttgtatttattttgttttgattagttatatataagtatttttgaatatagtttagttagaaggaaatgtttaatatttataaatttatggttatattttatttaaaagaggagttaaagttaaatttatttatttatatatgttatatatatatgtatttatgtatatgtatttatatatgtatatatgtgaatataagtatatatacgtatatgtatagatgtttgataataaagaagtaagaataatttataatattttttgaaatataaaaatttaggataaatttttgtatggtaattggtatggaaatttaaatttaaaaaggaaaaaagaagagaaagatattaaatattagattattaaaagaattttttaatgtatttttaaatagtgatagtaggtattttatattatagtgtttattatttatgagaaaattgtaaaagtaatttaagtattaatttaaaatattattaaaaataatattttttgttattatttaaaattatgataaaaatatgtttatttgaaaatatgtaaggagtgtatagagtttaaaaattattttaggagttttgtgagtaaaaatgtataaaaattatagggttgattttaaattatatgttagggtattgagaaagtttttgtattgtatatgagttattaaggtttaaagttaattattagaggattatttttggatggagttattgtttaattatgagttgaaaggtaaatatttaaaatgtaaatatttatggttaggtaatatttttaagattttattagttgtttattataattgagattgtgaagtaatggtttattttttttgaggtttagattttatatttgtggagtggaagcgagtgtttattatataatttttatagggttgttgaatgtgtgtatgtatgtatgtgtgtatatatattttaatgaaaattttataatttgattagtttttgtaatgttcgtatgattgagagtttgtttattttttatagtaatttgaaggtaaaaatagattttataatatgaataaatgtaattatatatttttatttgaatttagatgtttataaattgttttttaaagtgaagtatgtttataagttttaatttgtttaagatttattttaagtaaaatgtttattgttatggtatgtgagggaaaagggaaataatttttatgtatggtttttaacggttaaattttatgtttattagtatatttttttttggtgtagaattgatgatgataattatgatgatggaaaaaagtgttgttgatagtaatgtttttttttttttatttttttttaattgaatcgttttatttttagg

SEQ ID NO: 2 - DNA, 7351 bp, Artificial Sequence
  chemically treated genomic DNA (Homo sapiens)
tttgggaatgagacggtttagttagaggaaagtgaaggaagagaggtattgttattaatagtatttttttttattattataattattattattagttttatattaagagaagatgtattgatgagtatgaaatttggtcgttgaaggttatgtataagaattatttttttttttttttatatgttatggtagtgaatattttatttgaggtaggttttaaatagattaaaatttgtaggtatgttttattttaaggaataatttgtgaatatttgaatttaaataaaaatatgtagttatatttgtttatgttgtaaaatttatttttatttttaagttgttgtaaaaagtaagtaagtttttagttatgcggatattataaaaattaattaaattatagaatttttattaaaatatatatatatatatatatatatatatatatttagtagttttgtgaaaattgtatggtaagtattcgtttttattttatagatatggaatttgagttttaaagaaagtgagttattattttatagttttagttgtggtaagtagttaataaggttttaagagtgttatttaattatggatgtttgtattttaaatatttgttttttagtttatgattagataatggttttatttaaaaatggttttttggtgattgattttagattttggtaatttatgtgtagtatagaaatttttttagtattttgatatgtaatttaagattaattttgtagtttttatatatttttgtttatagaatttttaaaataatttttggattttgtgtattttttatatatttttaagtaaatatatttttattatgattttaagtaatagtaaaagatattatttttgatgatattttaaattaatatttagattatttttataatttttttatgaataataaatattgtagtataagatatttattattattatttaaaagtatattaaaaaatttttttaatggtttgatatttaatattttttttttttttttttttttttgaatttgaatttttatgttaattattatatagaaatttattttaaatttttatattttaaaaaatgttgtgaattatttttatttttttattgttaagtatttatatatatacgtatgtatatttatgtttatatatatatatatatgaatatatatatataaatatatatatatgtaatatatgtgggtaggtaaatttaattttaattttttttttaaatagaatgtaattataaatttataaatattaaatatttttttttgattgagttatgtttaaaaatatttgtatataattgattaaaataaaataaatataaagtatgatttatatatattagatataaaattaaaatatttttgaagtatatttttaatgagaatgatgagttgtttttttttttagtgaatttatgtatttatggattgtaagaattaaataatattaattttgttattatttttgttttgtgtagttataagtgttaagaagaatggtttatataaaagtaaataaatggtaggtaaaataattgtattattgttattattttttgtaatttttgtattatatgttaaaaattatttagtattttattattaagaatttttttttattatttattagttggtattttttttagttttttttttagttgtgttgaaataaagaatttattattattttatttgtaaaaggattttttttttgatattagagttttttgtttttttaatattaatattagtattttaaattgtttttttatttggtattttatagatttttatattttagggtattgttttatgtttggttgtgggagagaattgtttttatttttataaaatagaaaatggatttttgagaaagaggaaataagaaaagataaatagtatggttttaagtagattaatatgaatgtgaatatttaaaatttatttttttaaaaagttaaaaatttttgatattttttaggaaggttttgtatattagagttttagagagttggggaagaatgattaaaagtaagtaagtaatgagtaaattagatttgtaaaatttggaaggaattttagagataagaagatgatagtattataggaaagaaaaaggaatgatataaagaaaaatttgtaataaatgaaggattttaggtttatgttttacgttttttgtgtggaatttacggttttttagagattgaggcgtttgtgggtaggaggattaagaggagaagaattagatttggatgaaggagtttgtttttttttatgttgtagaaagaaggagttggaggagaatagattgtattgtattttattttttataatttatttggttttaaatattttttaaagtaattgggttttatgttgttttgtgtgtaaataggaagttttatttatataagatttttaaataaagttgaggtttttgaatattttttggaaaggttattgatggtttatttatagttaaggttaatttttggcgggttaaatagaatttttggagggttaaaattatatttttattttcgtaagagtttatttttatcgtatagtagttaataagttttttaatttttttttttttttatttttttataattttttataacgttttttatggtgttttttatattttttgtatgaatagttggtaaggaaaattataatttaagtaatattgggtaggtttaaaatagatattttattataagttagtgtggttgtaagttttttattagatatgtttaatttaaatgtttgaagttatattagaatttagtagttttttttgaaaatggtacgaattaaattagtagttttttgatattagggatattattgggttgtagatgaagagttaggttttggaagaatgattatagaaaagagttttttgttttaagaaagtgaaataaagaaacgtgaagtaataggattttaaaaataaattttgatttattgtgtttaataaattttttaattgtttttattatcgattatatagatttttttattgttttttaaatatgatatttttttgtaaattttaagttatataaatgattttattaatttatttatttatttatgtatttatttatttatttatttatgtagttatttagttgttttgtaagtattttttgattttattagggttagatattatgtaagattttagagatagggtggttaaataagtatgaaaataggtatttaaagattttatatttttgttggggtaaaaatagatagaaaaataattattgtataaaatataatataatatttattgtataaaatatagtataaaatataatataaaattattgtataaaatatagtagttaaatatattattgtagaagtttaggatgttttgggagtatataagagagtatataatttagatttggaattttttaaaaaaattttgagggaaagtaaaatgtaaattaagttttgaagtatgagtagtggttgtttcgaagaataaagagatgaaaagagttttttaagtataacgaatgatagatgtaaaggagggagaagaattacggtatatgtatgaaatgaaaattatttggtatggaggaaatatttttttttgatattttaaattagaaaggaatttgttaataatattaaggtatttagaggagtatttagtggattgattttaggtttgttttttggaaagtttgtttttattgaaatttgaaagggtagttagaaagaggtgatttaggatgtaggaagattagatgggagttggtgtaataatataggtgaaagttgatggtattttgaattatggaatttgtggtggtattgaaaagagtttgtagatttatattatatttaagaggtaattatagtgtttagtgaatatattaatgtgaggaataaaggaaaatgtgtttttttatttttttggttcgttacggagtgaattgtgttgtttttagttgggtgagtgaaatagaagaaatatagattggtgggagtagaaggaggatagaagggttgagggttgggaagatggagtaagtgtttgtgggatatttacgtattaatatttataggagtttgatatttgaattttgagtttatagtagtgtggtttattagaaatagaatgtgatcgttttgtgtaattttaaattttaaattttttagtaattatataaagagaaatattaaattaattttaatagtgtattttatttaatttaatatatttaaaatatgattattttaatatttagttaatataaaattgttaatgatattttaaagattttttttttataatttgtttttataagttggtgtgaattttatatttataatatagattaatttaggttagttatattttaagtggttaatattagatataatataggtaatattttttagattatggtgttagtatttaagtgggttgtaatattatgttttgtgagttatgattaggattttaaaaaatgaaagagaatataataaaaaatatagtgtattagatagaataagtgagaatagtgatttgggaaatatttgttttatatatatgtagtagaggttggtggttgttttttgttattatttttttaattttgttttaataatagaattttcgattttttgttgggtgtagattgtttagttgatttttatgtttttaatttatttttttgaagttgggtatggtatatgattaagttttggtgattggagggtaagtggaagtgatatatgtaatttttagtttatgatttaaaaaaggaagggtatagttttgcgtttttttttttttttttgtttaggttggaatgtggatatgttgattagtgataggtattgttgtagtttattagatggaagttatgtgttaaggaaggtagaattataaattaggtatagtttgagtttttgagttattaaaagtttacgttagttgggatttttatgtgatagagaaatgtatttttttagttaagttattgtattttgaggtttgttatagtattaaaatttatattttaattttatttttttttgttattatttttgttttaattatttgtattttttattttaagtgttttaggttataattgtgaaaatgtgattatagtgttatagtgggaattgtttattgaatatgtataaaattttttatttttggttaaagttaaagtagtttgaatgttattagtttgatgagatttgttgtatttatagagattatggatttattagtttattgggtaagttgatgttatggaaatggatgataatatttacgtagaagatgttgatgaaaagagaaaaagagtttaagatagagttatagggaatgtttttgtttaggtaatgggtaggagtatttaagtggagtaagaagggttaattagagaggaagaaatataggtaggagagtgtgaggtttttgagttttacggaagggatcgttttagtaagagaatagttaatagaagattgttattagattagaatgattatgattttatattaaggtattaatgttaatagtatataatattttaaaaaattattataaatgatggtataattttataatgtattgatttataatgtaatataatttaaatggtttttaagacgttagaaataagtgagtatttatttggattaatgatttaaaataggagggattaatgttaatagtatttatttgatgttttatgataaattataaagatgatttgtaaaggttgttattgataaatttttggttatttatgttaagtgtcgttgtgaaattaaataattgattgattttttttttttgttgggtttaaggataaggatattgggatttagttgttttagtgtcggtgtggggtagaagtttgttgagggtgatggggaatgtgaggaattagagttagtttggtagtttgtttgaaggggagaaaaataatagagtagtatttgacggagatgttagggtgaaaggaatatttttttaggtggaaataaatttgaataagtttgaatgaaatattgtttttaaaaatgttgagtgggaggtataaatgataggggagaagttgagttttttggagtgagaagggatgattttagagggaggtttttgaaggatgtatgtagtagatgtattaagaatgtgggtggaggaatgatttttaatgggagagatgtcgtatttattataattatagataaaaaggaaagtattattaaaatcgttttttattacgatagagttttttattttttaggagagggaaaacgagtttgagagaaaaaataattggattagttagttgttaggatatttgagttttatttttaatttagttgtgtggttttgggtaatttagttaattgttttgagttttagtttttatgttaatagtggggtaataatatttgtggttttattttaatggggtagttttatataagatgttaggtgtaatatagttttgatattttgatttttattatattagtgtaaattaatttttatagtttgaatgttaatggttgaggatgatatttattttatttttgttttgggtttcgttataggaatagtatttattagtgtttttaggaaaaattattaattgggttatttgagtagtaagtttttgatagaaaagggagtatataatttgaattagttttatatagttttgaagtatttagtaaatattgttagaaagttgaggtaaaggggtagagcgaaaaaaaggaagggaaaaagatagtttatggaaaagaaagtagaagagtaaaatataggaaaatatataatagtaagaataaataaggaatatttgggaaatgagagaaattaggattaggaggtaggtgggttttaataaaaataaatagaattaaattttttttttgtattgttatagtgttttttaggaattgaatataatttatttaattgtattaattgtatagttagcgtatattgtttttgaaaagagaatatttaagttttttatagttttgatagtgacgataatgataattttatttggttatatattaattagtattaaaaataagtttagtaggtggtataattatatttattttattagagggtgtattggttttgtttttgacgaagtattttgggtaaaatttgtagtgaaggaaatatatatttatagagatgtatttagtgattaaagagtagagttttttttatttgtgttattttattaacgtgtgtgtgtgtgtgtgtgtgtgtgtgtgtgtatttttttt

SEQ ID NO: 3 - DNA, 6072 bp, Artificial Sequence
  chemically treated genomic DNA (Homo sapiens)
aattgttttttgtgattataggtgtttgtttttgattttgtaaagagaaaagatatatttatttaaaataaatattttttatttcgtttcgtaattgattgtagttagaatattgtattgtattagttggttttttttttatttaaaaattttatgttttttttttattttgtttcgttttttagttttatttattattttagaaaataggtttttttgatagaaaataaatagatggtaattttattattttaaaattggttgtgacggggttttaaaattaagtgtttatggggtttttagaaagtttaggtttgtatggtatgtgtggttgatttgtgagttacgattggaggggtaagagaaggttttttatatatagatggttttttatatagtgttatagtttttgaagtgttgttttttgaggtttgtttttttaggttaggtattgttgttttgttagtatttttttaaattgttaatatttttgggaagagtaatacgttaggttattaatattgaaagaatttgggaaagagaggagggggtgtagcgggaagggaataaaaggggttttgaagattatttttgtgtgttttatagtgatattttttgtaagaggggaagtgtaggtttttatttttttttttgtttttttttgttatatatatatatatatatatatatatattgtaggacgttttttgataattataatatagtagtgaatttatcgaataggattgttttttgaaatatttatatataatttcgttggaagatttttgaaatagttttgtagtgattaaaaattttgtttttagtgttatttgtttaattttatagtttttatagattaaaggtagtttttttttggttaatatgaaaatattaaatagttagattgttttgttaaataaagtggattacggtgaatttgtttatttttatgttttatattgtttttattttataaattatagaagatatttattttttttttagttaaattttgttattataattattataaataaatgtttatataattaaaatgttagttagttttattttaatggagtatattttaagtgatgtttaatgggatataatttgaatataaaattttatttgtgtattgtttttaagtttttgaattaggtttttatttatagatgttggttatttattagggagtaataggtgatgttaaggattattttgtaaaaattaggaattatatttttgtaattgataggaaattgattatatttattagggttttttagaaaaatagaattaatagaatgtgtatatatataggaggaaattttgtttaaggaattgattcgtgtgatcgtggagattttgggagtttaaaatttgatgggagaagttggtatgtaggaggtttagggaagagttatagttttagtttataggtaatttgttagagaatttttttttgttttggatgagtttggttttttgtttatttaggtttttaagtgattggatgaggtttatttatattatggagggtaattttttttatttaaagtttatagatttaaatgtaaattttatttaaaaatatttttatagaaatatttagaataatatttgattaagtatttgggtaatatggttaagttaagttgatatagaattaatcgttatattggattataagggttgtgtttagtaagaattgattttggttaaattttgtttttgtttttatgttttatttttttttattttgggttttgttatttttattttattatgtttttattttttttttttattttttaggtattttttttttttgattttatttttagatttattttttattttttatttaaagtttttttttttttaaaaaatgatgttagttattatattttaggatttaaattaattattttgttagtcgttttattaatttttttattgtgaaaggaaagtatattaaaagaattttagggatcgacgaagagttgagggaggtatttttttaggaagagaaagtgattaatagaaattaagataaagggggataattagattttttagatgatagaaagtaggtaaattttagagatttagagaattagtaaatggtttttttagggtgttattattgtagtaaatgagttttagttatttttgtttttattttttagggtatttaagattgtagttatttaggagagatagagtatttgattgattgaatttgggttttgtatttatttttgggttagggggaggtagggtatttggtttgatagtttttttaaggttgtatgaattagaggagttgttattagaaaagggtagagtgaatttggggtagtaaaaatatttattgtttatcgattattattgtaaggattatttagagggtgatgtagaattagtatttttttatttttaagatgattttgaatgttagagtaaggtataaataggttgtagagatatgtggagtatttggagtattgttttaggatttttttttttttgttggatgttaaggattttaaggataagagttatttttgtttgtaatttatttggtaggttttgtagggttgtgtaaatgattttatttaatttttattatttgtgagaaggtatagagggttttgagagggtatagagggttttttataatgggtagatatgtatattagttgatatattggaaattttttagtaggtatatttttttaagatgataaatatttttttttgttggagaaattgaagatatttgtatttgtaatttagtttatttagtaaaataagataaattaattagtgatagggagaaatatgtttgtattattttttaattttgaaaataatgttagattattggattgagaattaatgttattttttggatttggtaattatttggataaaatttttttgattttaggtttaaagttaaggtgttaaaaaaaaaaaaaaggatataattgttaagtttatttaattatattttttattgtataaataaggaaattaggttaggcgtggtggtttatttttgtaattttagtattttgggaggataaggttagtggattatttgaggttaagagttcgagattagtttggataatatggtaaaattttgtttttattaaaaatataaaaattagttgggtgtggtggtaggcgtttgtaatattagcgatttgggaggttgagataggagaatagttagaattcgggaggcggaggttgtagtgagtcgagattatgttattgtgttttagtttgggtgatagagtaagattgcgtttgaaaaataaataaataaaaataaataaggaaattgggtttagagagatgaaggtatataggtgatgggtagatagggataaagaaaagaatttaattttttggattttttaagttattttaatatttgtttttgtaagttagtagtttttgtacgttagtatgttagaatttaattagttttttattttttttgataattttttcgatttatttatgatttagttaatatttgatttggttaattaagtattttggtttttaggtttagtgtgagatttaatgaaataggcgtgaatttttttttttttttttttttttttaaacggagtttcgttttgttgtttagtttcgtaattttaatttattttaatttttgttttcggggtttaagcgatttttttattttagttttttgagtagttgagattataggcgttcgttattacgttcggttaatttttgtatttttagtaaagacggggttttattatattggttaggtcggtttggaatttttgattttaggtgatttatttaaagtgtttggattataggtatgagttatcgcgtttggttggtatgaatttttttttttgtttttagtttatttttaggttattgtttgattttattagtttttaaatttaaattattatgtatgtttagtttttttagttattttttttttttttttatgttgggaaaaaaatttcgatttattttaattgtgagaaatgaaagcgaataaattttattattttttattgttttgtgtaaatatgaagagagatatgatagtggggtaaataaaagtattagggaatttattcggtagaatttttttttttttagcgtgtttgtagttagatattttgagattttagtggagaaatggtatggtggaaatattgaggtttaataaggtttaatttagggtatattttatttagattttattatatatattgtttaaaatgaaataatattggggaatgaaaaggttggtcgaagatgtaagttgtttttattaaataaagataaatatttaataaaaataatgtataaaaataattataatttatttttaaatttgaaaatattgagttttttaggttatatataaataaaattgttaacgatgataattttagtaattaggaaaataagtacgtttataaagaaaagtgagaaaatttatggagaatttgaatttagaattaatttttcggagttgattttttttgggggaagttagggaacgcgtcgggcgtttttattagtaagattatgtttaaagagagtgtggaagtatagattaaaatggatattcgagggcgaatagtagttggtaaagggataagtgattcgaagtattaaagtttttgagataaatttcggcgcgaatcgttagtgggggatgagattcgtaggcgtagttttttaggtttcggcggattgatacgtacgttggaaacggagttatttattatagtttcgtagttttagttaaaatggcgtcgtcgttttgtttatttcgcgtattttaggcggtcgtagtttcggcgcgcgcgttttgtggagcgaggacgtcggggacgcggttagggacgcgcgcgtttttacggcggttgtacgtttgcgcgagggcgggcggcgggggcgcgcgcgcggcgggggcgggttttgtcgagcgtagagttgtagtcgtcgagtcggacgtgttcgcgaagatggcgggtcgggtgagtgtcggtttgggagtttaggtttgaggtaggggcgtcgggttcgcgggtattttggggtttaggcggttttagaggagtgggagtgaattcgagtaatggggcgcgaggttagagcgggatttgagggtagtaggggagcggtggtaggggattagttttttttaataatttttatttttttcgaggggagatgatttttcgttatacgcgtttgttgcgtttttcgttattttttttttttattttttggggtttgttttttcgttttttatatagtcgtagggtcgcggtcgtcgaagttttttttgacgggttttgggggttttttcgtatttttttgcgagggtttattagggggcgtcggagtaattgtcgggagtatttttgttgtattcggggtaaggggtgtaggaaggatttttaggaatttatgtttggttttttataaattaaaggtcgttgggaaagaggagggggtgttaatgatttttagtgttaaagttcggttatttgggggatttgttaattgtcgggttaggtaggaattggttttagtttggagtgaggatggatttggggtgttacgttttgtttttatggatgatattcgtttcgaatgtagtaggatatgttgtagttttagggttttaaatttatttttttttttagtttttaggatcgttgggtaggatgggtttggcgaggagagagagttggttgagtgttgtattgtagtttgttttgagttaaaagtttttaagggatgagttttgttcggagattatattggttataaatttgaggatattaattgcgttattgggggtgaaagatgtgattgattgatttatttataatagaatttttgaataagtttgtatagatttatgtatatatgtaaatgttttatttgaagggatttgtaggttatgagattttagagtaagaagggattttaaaggttatttagtttggttttttttttttttttttt

SEQ ID NO: 4 - DNA, 6072 bp, Artificial Sequence
  chemically treated genomic DNA (Homo sapiens)
gaaaaggaagagaaagaagttaaattaaatgatttttaagatttttttttattttagaattttatgatttataagtttttttagatagggtatttgtatatatgtataaatttatgtaaatttatttaaaaattttgttataaatagattagttaattatattttttatttttaatgacgtagttaatgtttttaggtttatgattagtgtaattttcgggtaggatttattttttgagagtttttagtttaaggtagattgtaatatagtatttaattagtttttttttttcgttaaatttattttatttaacgattttaaaggttaaaggaggaagtaaatttaaaattttgaaattatagtatattttgttgtattcgaagcgagtgttatttataaaaataaaacgtgatattttaaatttatttttattttaagttaaagttaatttttgtttgattcgatagttgataggttttttagatggtcgggttttaatattaaaagttattggtattttttttttttttttaacgatttttaatttgtgaagagttagatatgggtttttgaagattttttttatattttttgtttcgaatgtagtagaggtgttttcggtagttatttcggcgttttttaataagttttcgtaagggggtgcggaaagatttttagagttcgttagagggggtttcggcgatcgcgattttgcggttgtgtggaggacgagggaataagttttaagggatgggaagggaggatgacgggaggcgtagtagacgcgtgtaacgaggggttattttttttcgaggggggtgggagttgttgaggagggttaattttttgttatcgtttttttgttatttttaagtttcgttttggtttcgcgttttattgttcggatttatttttatttttttggggtcgtttggattttagagtgttcgcgagttcggcgtttttgttttaagtttgggtttttagatcggtatttattcggttcgttattttcgcggatacgttcggttcggcggttgtagttttgcgttcggtaaagttcgttttcgtcgcgcgcgcgttttcgtcgttcgttttcgcgtaggcgtgtaatcgtcgtgaggacgcgcgcgtttttggtcgcgttttcggcgttttcgttttatagggcgcgcgcgtcggggttgcggtcgtttggggtgcgcggggtgggtagagcggcggcgttattttggttggagttgcggggttgtggtgggtgatttcgtttttaacgtgcgtgttagttcgtcggggtttggagggttgcgtttgcgagttttattttttattggcggttcgcgtcggaatttgttttaagggttttaatgtttcggattatttatttttttgttagttgttgttcgttttcgaatgtttattttggtttgtgtttttatattttttttaaatatggttttgttgatgagagcgttcggcgcgttttttggttttttttaaaaaagattagtttcgaggagttggttttgagtttaaattttttatgaatttttttatttttttttgtaggcgtatttgtttttttagttgttggaattgttatcgttggtagttttatttatgtgtagtttggaaaatttagtatttttagatttgaaagtgaattgtgattatttttatatattatttttattaaatatttgtttttatttaataaaggtaatttgtattttcgattaatttttttattttttagtgttgttttattttagataatatatatggtagaatttgaataaaatatgttttaaattgagttttgttgaattttaatgtttttattatattatttttttattggaattttagaatatttaattgtaagtacgttgagaggagaaagattttgtcgaatggattttttgatgtttttatttattttattattatatttttttttatatttgtataagataatagggaatgataggatttgttcgtttttattttttataattagaataaatcggggttttttttttaatatgaggaaagaagggaaataattagaagagttgagtatgtatagtgatttaaatttgagaattaataaaattagatagtgatttgaagatgaattagggatagaagaaaaaatttatgttagttaggcgcggtggtttatgtttgtaatttaagtattttgggtggattatttaaggttaggagttttagatcggtttggttaatatagtgaaatttcgtttttattaaaaatataaaaattagtcgggcgtggtggcgggcgtttgtgattttagttatttaggaggttgaggtgggagaatcgtttgaatttcggaggtagaggttgaagtgagttgagattgcgaggttgggtaatagagcgagatttcgtttaaaaaaaaaaaaaaaaaaaaaaaaatttacgtttattttattaagttttatattgaatttgaggattagggtgtttggttgattaaattagatgttagttaaattatgggtgggtcggagaggttattaggaaagataggaaattagttgagttttgatatattaacgtgtagaagttattaatttataaaaataaatattagaatggtttggggagtttaaagggttaggtttttttttttgtttttatttatttattatttgtgtatttttatttttttgagtttagtttttttatttgtttttgtttgtttgttttttagacgtagttttattttgttatttaggttggagtatagtggtatgatttcggtttattgtaattttcgtttttcgggttttagttatttttttgttttagttttttaagtcgttggtattataggcgtttgttattatatttagttaatttttgtatttttagtagagatagggttttgttatgttgtttaggttggtttcgaatttttgattttaggtgatttattggttttgtttttttaaagtgttgggattatagaagtgagttattacgtttggtttagtttttttatttgtatagtgagaggtataattaaataagtttaatagttgtatttttttttttttttttgatattttgattttgaatttagaattaaagagattttgtttaaataattattagatttagaagatgatattggtttttagtttaataatttgatattatttttaaggttggaaaataatgtaaatatgtttttttttattattggttagtttgttttgttttattagataagttagattgtaagtataaatgtttttaatttttttaataaggaagaatatttattattttggaaggatatgtttgttggaaagtttttagtgtattagttaatgtgtatatttatttattataagaggttttttgtgtttttttaaagttttttgtgtttttttataagtagtaaaaattaaatagaattatttgtatagttttgtagggtttgttaaataaattgtaagtaaagatagtttttgtttttaaggtttttagtatttagtaggagaggaaggattttgagatagtgttttagatattttatatgtttttgtaatttgtttgtgttttgttttgatatttaaggttattttagaaatagaggggtgttgattttgtattattttttgagtaatttttgtagtgatagtcgataagtaataaatgtttttgttgttttaaatttattttgtttttttttggtaatagtttttttggtttatgtagttttggaaggattgttagattaggtattttgtttttttttggtttaggagtgaatatagaatttaagtttaattagttagatgttttgttttttttaagtaattgtaattttgaatattttgaagaataaagatagaaatagttagagtttatttattgtaatgatgatattttgaagagattatttgttagttttttagatttttagagtttatttgttttttgttatttgaaaaatttgattgtttttttttgttttgatttttgttagttattttttttttttagaaaaatattttttttagtttttcgtcgatttttgaaatttttttaatatgttttttttttatagtgagaaagttagtaagacggttaatagaatgattaatttaaattttaaagtgtaatgattaatattattttttaaggaaggaagggttttgagtggggggtaggaggtgagtttagggatagggttagagaggaaaggtatttgaaaggtggggaaagaagatgaagatatgataaaatggaaatagtaggatttagaatgaagaagagtggggtataagggtaggggtagggtttgattaaggttagtttttgttgaatatagtttttgtgatttagtgtgacggttaattttgtgttaatttggtttggttatgttgtttagatatttgattaaatattattttggatgtttttgtgagggtgtttttggatgagatttatatttaaatttgtagattttgagtaaagaaggttgttttttataatgtaggtgggttttatttaattatttgaaagtttgaatagataaaaggttaaatttatttagaataagaaggaattttttagtaggttatttgtggattagaattgtaatttttttttgggttttttgtatgttagttttttttattagattttgggtttttaaagtttttacgattatacgagttaattttttaaataaaatttttttttatgtatatatatattttgttagttttatttttttggagaattttgatgaatatagttagttttttgttagttatagggatgtgatttttggtttttataaagtgatttttagtattatttgttgttttttgataggtaattaatatttataggtggaggtttgatttaaagatttgaaaatagtgtatagatagaattttatgtttaaattatgttttattaaatattatttaaaatgtgttttattggaatggggttgattaatattttggttatatagatatttgtttgtaatggttgtggtaatagaatttaattgggggaaaaataaatattttttgtgatttgtggagtgagggtaatataaaatatagaagtgaatagatttatcgtaatttattttatttaataaagtaatttgattatttggtgtttttatattaattaaaggaaaattatttttagtttgtggaaattgtagggttaaataagtggtattggggatagagtttttagttattgtagggttgttttaaaggttttttagcgggattgtatgtaggtgttttagggaatagttttgttcggtgaatttattattgtattgtaattgttagaaggcgttttgtagtgtgtgtgtgtgtgtgtgtgtgtgtgtgatagagagagataaagagagagatgaagatttgtatttttttttttgtagaagatgttattgtgaagtatataaaggtggtttttagagttttttttatttttttttcgttgtattttttttttttttttttaagtttttttagtattagtaatttaacgtattattttttttaggagtattggtaatttaggaaaatattgataggatagtagtgtttgatttaagaaaataaattttaaaaggtaatattttagagattgtgatattgtatggggagttatttgtgtatagaaagtttttttttgtttttttaatcgtaatttataggttagttatatatattatgtaagtttaggttttttgggagttttatgaatatttaattttagagtttcgttatagttagttttaggatgatggagttgttatttgtttgttttttgttagagaaatttgttttttaaaatgatggataaagttagagaacggagtaaaatggagaaaggatatggaatttttaaatgaaaggaagattagttgatgtaatgtagtattttagttgtagttagttgcggggcggggtggggggtgtttgttttaaatgaatatgttttttttttttgtaggattaaggataaatatttatagttataaaaaataatt

SEQ ID NO: 5 - DNA, 9770 bp, Artificial Sequence
  chemically treated genomic DNA (Homo sapiens)
atgtaaaaaatttgtacgttgtgtatatgtattttataatttaaagtataatttaagaaaagaaagaaagaaggaaaatgatgttttgaggtcggagaatttgagaatatttagataatgttttgaggtaagatgattagttatttttaatgtttattttttttgttttttttatggtaatggaattttgaatttttagttgggaggtggttatttagaattttgattgtattgtatagttttttttgtagttaggtatggttatgggataaaattttaggtaatataatataagtgggaatgataggtaatgtttaaggtattttttttaaaagaaagggtgtgtttttttttttttttgtggttttttttatggattggaaggtggatatagtagtgagttattttagtttagataaatagacgtggaggggtagttgagtaattagataggaggacgtggtttttgataacgtggaggtattatattaatttattgtttttagttggatttgtaggagagggaaatgaattttagttttattttagtaattatttttttaggattttgtgtaatttaaatatatgtattggttaggtatagtggtttatatttgtaattttagtattttgggaggttgaggtgggaggattttttgaggttaggattttaagattagtttggataatataatgaaattttgtttttataaaaaaataaaaatttaaaaattagttaggtatggcgttgtgtatttatggttttagttatttagaaggttgaggcggtaggatattttgagtcgaggcggtaggatattttgagtttaggagttagagtttttagtaagtaacgagtaatgattgcgttattatattttagtttgggtgataaagcgagtttttttttttttttttttttttttttttttatatatatatatatatatatataatatatatataaaaatatataatatattatatatgtgtatacgtatatatgtatatatatatatatatatatatagagagagatatatatataaagatatatatatatatatatatatatatatatatatatatatatatatttaattttaaaattgggagtttgaaagttatttaagaaagatgggtttagatagttattggttattttagtgttttatagttaataaatatgtaagttttttaaagatgtagtattatcgtaatagataaataaaaaattttgttttcgtagagtgtatatttaatattattttattttattttgattattattttgttagggaatattgttttgtattttagatatgaggaaattaagttgtagagattttttatgatttgtttgaagtgagttagttggtgagttagatattagagatttaagttaggttagtttatgttagagttagaatttcgttattggtttggtggtttttaaagtatgttttttagagaggtttgttagggttatttcggatggggattgtgattatgaggaattaagaggaaggatttttttttttttgagatagagtttttttgtgttgtttaggttggagtgtagtggcgtgattttggtttattgtaatttttgttttttgggtttaagcgatttttttgttttagtttcgttttttaagtagttgggttataggtatgcgttatgatgttttgttagtttgtttgttttttttttttttgtatttttagtaaagatggggtttcgttatgttggttaagttggttatggatttttgattttaggtggtttgtttacgttagttttttaagatgttgggattattagtatgagttattagtttcgtttaggattttttttttttttttttatgagttaaagaaagattttagattagttaagagagaggtttaaggatatttgaaggtcggggaggagggataattatttgttggggtgaattaatcgtagaggtttagtaggatagaggttaaggttgaggaggtttttatagagaaatagagtttgaggataaggggttttttataatatttgtgtttttcgaaagtttttttttatatttttttttaggtgttttattttttggggttggtgaaggggtgttaaaaatgtaaattgatttatagaaaaatagagttttgtattttaaaaatatatttaggtttgtatatggatatttatattatatagatatatagatatatatgtagttatatatatatatatatatagagatattaaagaaaagtgttttagaaatatattaaaatgtggttgggtgcggtggtttatgtttgtaattttagtattttgggaggttgaggtgggtagattacgaggttaggagtttaagattagttcgattaataaggtgaaattttgtttttacgaaaaatataaaaattagttgggcgtggtggtgtgtgtttgtagttttagttattcgggaggttgaggtagaaagttgtttgaattcgggagttagaggttgtagtgagttgagattacgttattgtattttagtttgggtaataaagtaagattttgttttaaaataaaaataaaaaataaaaagaaataaaaaagaaatatattaaaatgttagttggggttttttttgggtagtaaagtgttgggggatattttttaaagtttttttttatattttttgagtttttttatgttttttaatgagtatttaataagtagataaaaattaatataataaaggattttttttgtgtgtttttttgatttttggaggaagagattagagttagttttataattaggttatttgagtaggtttaataagttcgtattattagaaattattatttggttatttttagttcgagaatagaatatttggttgttttggtattttttaagtagggggaggagttttttgtaggaataaataagttttagtatttatgaaaatttattattttagatagacggttttggaatttattagttatatttagttttttgaggtaggtaatttatgatgttttatattttgggagcggaggaatttgtttttttaggagagttttaggtagtagtttggagtgtgtggagtgtgaggggtaagtagaggttaggaggaggtgtatttaggtgttaggggttaggggtttgtttttggttgttattgattttttgtgttttttttagaggtattttttgtgtttgggtttttatatttgtaaagggtggaggtgttttggggtttttatggttatttttgttttgatatttatagattcggatttgagttagttgtgtatttgatttttagggaagaggtgttgtttttttgtttggagtagggtgtagtttttagaatatgtggtagatgtgattattgtagtaggtttttttgagtagaggttataggttttattatgattttagggtttttatggggttgtttcgggagttttatttttttaaaaggatttttggttaagtcgatagatgggttgtgtttttgtttagtaatagaaaagataaattgttgggaaatagttagttttttaatttgtttaaatagaaaagataagtttttgtttttgaaataattttggagaaaaatattgtttaatatttatttagagaaatgattgtattagtttgagagtgaatagttgaagtaaataaggtgtttttgtttttgggtttggttaaaggtatttttattggttttttttttttttttttttttttttttttttttttttttttttttttttttttttttttttttttttatttttttttttttttttttttttttttttttattttttttttttttttttttttttaatcgttttttttttttatttttttttttagtatttaagttgtttttttttttttttgaattttaggattgagtgggcggaggttgaaggtgaataattttgtttgttgcggttatcggtttggaatttagtttttttagggttttttgtgtagtagtttatggtttttttttggtttgtagttttaggaaaggggtagtatgggaggtggtgattgttcggtacgtttaatatgaattaggtgtttttattatttattttatttgagttatttaataggttgtgtagagacggaaataggttgagagatgtatagttatttgtttgttagtatatagtaattaaaagtggttaaaataaaattttagtttaagtttgggagattttaaagttttttttgttttttttttattaagaggtttttttaggtttatggtggatatagatattacgtggtaatttggtaggggtagagaagaatatttgtttttttttggttttgttgttaattattattagggttatcgaggttttagatattgtattagggatttttattttttttttttagtcgatttttattgttatttagtattatatcgtggaggtttgtggaggttatattacgtgatatttagaggttgggagagttattgtggtttttatttttgtttagggtttttttatttttgggttttattttggtggtagttgggagaatgaaggaagggagtttttgttttttaattttttaggatgagatttgtttattaagtaggagaggagtaggtattttgattggattgaatttcggattttttattagtttatagatcgaggagttaggtaaatttggttgtttattgggtttttttatttgtttgttgtatgattttgggtaagtttttttatcgttttgtgttcggtttttttattgtaagaaaatggtaataattatggtatttattttaaagggtgaaatgaagtagagtgatgtgtgtcgggtgttttagagagtatttatttgagggaggttttaaagttagtaagaggtagtaggatagggattaggacgtaggttgggtggagggtagtgggaggtggtcggggttttatttggttttttgagatttaaaggagttttgttttttagagttgagaatggagagaatgttattttttttggttttggggtttttggcggttgggttttgttttgttgttttttgttattttaatagtttatttgacgaggagaatttgatttaggagaattaagatcgagggatatacgtggatttcggattagttttcgttaacgtggatttcgtttttagtttgtataagtagttagttttgaaggtttttgataagaatgttattttttttttattgagtatttttatcgttttggtttttttgtttttgggggtttataatattattttgatagagatttttaaaggttttaagtttaattttacggagatttttgaggtagaaatttattagagtttttagtattttttgcgtatttttaattagtttagcgatgagttgtagttgagtatgggaaatgttatgtttgttaaagagtaatttagtttgttggataggtttacggaggatgttaagaggttgtatggtttcgaggtttttgttattgatttttaggatttagttgtagttaagaagtttattaacgattacgtgaagaatggaattagggggaaaattatagatttgattaaggattttgattcgtagataatgatggttttggtgaattatattttttttaaaggtgagtgtgtttggtttggggtttagaagaggtggattttagggttatttttgttttgatttaataatggtgttattaggtaaattattgtagaggagagtgtttatagtatgggggtagtataagtattaaggttttattttgtttataggtatcgtcgttttttgtggggtttttttaaattatagtttgtttttggaagatataatttagtggagtttattagtttttggtttgagttagtgtggtgttttttattttgatttaaatttgttcggtaaatagaaagaaggagttttttttttaaattattttagggcgcgtaggagttagagttttttttttgtaggggtgttgttagattaggttaggaagtttttttgtttggatgtatttggggtttttgttttgtatatgtgggaggagtatattttagttaggggttttggtgtttggaggtggttaggtggggttggggttatttttatagggtaagataatttttaaggagtttggttatttttaagattttatgattttattttgttattatttttaattattttaaaaaatatgttattgatatataataaatgagggtagaaatggtattgtttttatttggggaagagttttaagggtgggtagtatataaaatatgattttttgttagattttaattggtttagtgtttaattttattgatagaaatttaattaatgtaaattttagtttgtaagtttcgaaggggtagagtgtaagtcggtagtttttgttttttggagtttatagtttagatggggataaaaaaagagatagggatataaagagtgattattgagttagagggtggaaaggtgtttaggagatatgagttgtttggaggtagagttttgtttggaagttgttggttgatttttgggtaagttatttttttttttgggtttgggtttttatttgtaaatgaaggcgtggatttagatttttttttaagattattttacgttttacgtgttatttgttttttgagttttttatgttttcgttttttattatttagttttatgttaggatttttttttttaggatatagtagttagtttagtttttttttttttatttgtttttaataatgggaaataggtaggtggtaaataggtgggtagtggaggtggttttatgtttttagttttttttggaagtttttattttttttattgtttagtgttttggtttttttggagtggagatttgtagggttttttttttttttttgttgatttttttttattttttaggtgttagttttgttttttgttttagtttggtttatatatagtgtatgtgacggggtttggttattgttggggtagttttgtggaaggtggaggggatcgagtatgtatgagttttaggttgagatagttttagtttagaattttggagtgtttgttttttttttttttgtttttttttttttattgtatttattggatttaagagtatgtaaggattgatttatttagtgatgttagaattatgtatttagttgaaagtaagggggtgggggtatttaattaggggtagaagatgggaatttaagaaaggaaggttttttttagaaaacggttttcgtttttttttttaaatttagatagaataagaagcgaaggtcgttatagtagagagaaagttgagttaagtagagattagatattaaagatattagattaattagatattcgggtttttagttgaatagttgaggatgttagaagatgttaaggaggtaaaattggaaaatttggtggttggtagatagaaatggggggagatgggagtagatgtgagaagatttaaaggtttgtagagtttgggtggtgattttatttattaaatttatttttttttttattttggtatataaggtagtagttagggtttttagaggtagtttatttttttggtagggatttatgttggagatttggttagttgaaaggttttaaaggagttcggtgttttgggtaatatgggaaggtgttttatggtattgtttttatatggaggttatagaagtttttgaatggttgttgtaattggtaacggggatatttgtttaattgaaatattttttattttgagatgggttttttttttaagggatttttataattatatttgtttttagttattttatgttgggaggttgtagggattagagaagttgagatggtttttggggaggggaaaggaaagatggatagttattttggttttagaaagtttaaaggtggggaagtgttaagaaggaagatgagggtataagagaatgtagggttatttagaagttggtttttattgtaattatagaaagaaaaattaaaataaagaaagaaaggaaagaagtttttatttattgagtagttatttttattagttatttatatgtaatatttcgtttaattttcgtagcggttttgaaaggtggatggtggtattgttatttgttaggtaggagatatgtcgtttagaaaagtaaataattaaatatttaaagttgatttgggtttatttgaaaattttttttgtttttttattttaatttttaaagtaaagtcgtttgtgattttatgagtttttattaagtattttttaaaattaagaatggaggtgaaagattgtggagtttataatttagagaaaggattgataattttttttttataaagggtttagtagtatgtattttaggttgtgtggtttatatgagggtagatttttttttttgatttttttttttgtattttttttatttttttttttttttttattttttttataatttttgaaaaatataagtattatttttagttttaggtatatataaaaataagttatggttgtattggtttataggttatagttttttgatttttgttttaggggaggaaaataattgtatttaattaaatgcgtgcgaattatgggtttatgttatgatttttaaagaatgagttttatggaatttttaatattttaaatattttattttattttttttttgtttgtatagtttttgatgagaagtttgttgttatttttatttttatttttttttagataaggtggagtttttttttttttgtttttatttttattttttttaagattttttttttttttttattatggtaaataggtttttagtgagaggagttatgttagtttggttaggagttaggttgtattttaggtttgtgatagttagaggtattagaggtagttttatggaattttatttttgtaatattgagagtttaggtagttttagagttagaatatttatagttgaatttttagtttgatagatattgaatttagggtaaattttagttgaatatttatggtttgtagaggtggatatgagttagatatgagttaaggattatagttagtttatggtttttgtgatgtttaatatcgttattttttaagatgttataagtgtttttaggtttttatttttatggttttttttggttttgagttttattttttattaaggttttttttgtttttttttttatttatattgattggtattttttttgtttgtttttattaatttatatatagaatttagtttttttttttttatttttatttaaagtttttttataagttattgttatatgtttatatttttgtaatattagtgagtaataattgttaatgagatatttttttttttatggaataaaggttgttttatttttttttaggtattagttttttatatgttgttatgttttttttttttattttttttaaatttttttttttttttgtattttttattttttggtttttattgattttttatttagtataaggaattaggttttttttttgtggttttttttttaatttaagtttgttgggtttttttttatttttaataatttttatttttgttaagttatttttttaaattaaagtagggttttttttatgagggattttgggtatttttattgttgcggaagtagggtcgagtagggcgatttttgtatttatattttttttaattgtttgttttatttttagt

SEQ ID NO: 6 - DNA, 9770 bp, Artificial Sequence
  chemically treated genomic DNA (Homo sapiens)
gttgaaggtggagtaagtagttggagaaggtgtgagtgtaagggtcgttttgttcgattttgttttcgtagtagtggaagtgtttagagttttttataggagggattttgttttggtttagagaagtagtttggtaagagtaaaagttattgggggtgagggagagtttagtaggtttggattgggaaaagggttataaaagaaagatttagttttttgtgttaaatgagaaattaataggaattagggaataaggagtgtaagagagaaagaaggtttagggaaagtgggggaaagaggtatgataatatgtgggaggttggtgtttgaggagaaatgggatagtttttgttttataaaaggaaaaatgttttattagtaattattatttattggtattatagggatgtgaatatataatagtggtttgtgggagggttttgggtggaaataagaggaaagagattgggttttgtatgtgagttggtgagggtagatagaagagatgttaattagtgtgaatgaggggaggaataggaagaattttaatggaagatagaatttagagttaggagagattatgggaataaaagtttagggatatttgtgatattttagaggatagcggtgttggatattataaaagttatgagttggttatggtttttagtttatatttagtttatgtttatttttatagattatgaatatttagttaagatttgttttggatttagtgtttgttaggttgaggatttaattgtgggtgttttgattttgaggttgtttaggtttttagtgttgtaaaggtaaaattttatgaaattgtttttggtatttttagttattataaatttgaaatgtagtttgatttttagttaggttgatataattttttttattaaaggtttatttattatagtaaagagaaagagaaaattttgaaagaggtagaggtagaggtagagggaggaaaattttattttatttaaaaaggaataaggatgaaaatgatagtagattttttattagaaattatgtaagtaagggaagaatggagtaaaatatttaaaatgttgaaaattttatgaaatttattttttgggaattatgatataggtttatgattcgtacgtatttagttgggtataattattttttttttttagaataggggttaggaaattatagtttgtaagttaatatagttatagtttatttttgtgtgtatttaaagttaagaatggtgtttatattttttaaaggttgtaaaaaaaatgaagaggaaagagaagatgaagaagatgtagaggaggaagttaaaaagaagaatttgtttttatgtggattatatagtttaaaatatatattattaggttttttatggaaaaaaaattgttaattttttttttaggttgtgggttttataattttttatttttatttttggttttaggagatgtttggtaaaagtttataaagttataaacggttttattttaggggttaaaatgagggagtaaaaggaatttttaaatgggtttaggttaattttgaatgtttaattatttgtttttttggacggtatgttttttatttaataaatggtaatattattatttattttttagagtcgttgcgagaattaaacgaggtattgtatgtgaatggttggtgagagtagttgtttaataaatgggagttttttttttttttttttttattttggtttttttttttgtaattgtaatgagagttagtttttgggtggttttatatttttttgtgtttttatttttttttttgatatttttttatttttgggttttttaggattaaaataattgtttatttttttttttttttttttaaagattattttagtttttttggtttttgtagttttttaatatggaatgattggggataaatgtaattgtaaagattttttggagaaaggatttattttagggtaggagatattttagttgaataggtgttttcgttattaattgtagtagttatttaggggtttttgtggtttttatgtgagggtagtgttatggagtatttttttatattatttagggtatcgagtttttttggggttttttagttggttagatttttagtatgggtttttgttagaaagatgggttgtttttggggattttgattgttgttttgtatgttagaatggggagagagataggtttggtggatgaaattattatttaagttttataagtttttaaatttttttatatttgtttttatttttttttatttttgtttgttagttattaagttttttaattttgtttttttaatattttttgatatttttagttgtttaattgagggttcgaatgtttggttagtttagtgtttttagtatttgatttttgtttgatttaattttttttttgttgtaacggttttcgttttttattttatttggatttaagagaaaagacgaaaatcgttttttaggggaaattttttttttttgaatttttattttttgtttttggttggatgtttttatttttttatttttagttgaatatatagttttagtattattgggtgagttaatttttgtatgtttttgggtttagtgggtgtaatggaagaggaagagtagaaagggagggaataagtattttagggttttgagttgggattgttttagtttgaagtttatgtatgttcggttttttttattttttatagggttgttttagtagtgattaagtttcgttatatatattgtatgtaaattaggttgaggtagggagtaaaattggtatttggagagtgaggagaggttaatagaggaaggggaggggttttgtaggtttttattttaggaggattagagtattgaataatgaggggggtgggagtttttaggggaggttggagatatggggttatttttattgtttatttgtttattatttgtttgttttttattgttagaggtaggtggggaggggaaagttaggttggttattgtgttttggaggggagagttttagtatagggttaggtagtaggaggcgagaatatgggaaatttagagaataaatggtacgtgaggcgtggagtagttttagagggagatttggatttacgtttttatttatagatgaaaatttaggtttaggaggggaagtggtttgtttaggaattaattaatagtttttaagtaggattttgtttttaagtagtttatgttttttaagtatttttttattttttggtttagtgattattttttgtgtttttatttttttttttgtttttatttggattgtgggttttaggaggtaaaagttatcggtttgtattttgttttttcggagtttgtaggttgaggtttgtattggttgagtttttattaatgggattgggtattggattagttagaatttggtaaagggttatgttttgtatattgtttatttttgaggtttttttttagatgggaataatgttatttttgtttttatttgttatgtgttagtgatatattttttaaaataattaaagatgatagtagagtagaattatagaattttggaagtggttaggttttttggggattattttgttttgtgaagatggttttagttttatttggttatttttagatattaaggtttttggttggaatgtgttttttttatatgtgtagggtaggagttttaggtgtatttagatagagggattttttggtttagtttagtagtatttttgtaaggagggagttttagtttttacgcgttttggagtggtttgaaaggagagttttttttttttgtttgtcggataagtttaaattagagtgaaaagtattatattgatttagattagaggttgatgggttttattgaattatgttttttaaggataaattgtaatttggaaaaattttataggagacggcgatgtttatgggtagggtggggttttgatgtttatgttgtttttatgttgtgggtatttttttttatagtggtttgtttaataatattattgttgagttaggatagaaatggttttgagatttattttttttgaattttaagttaggtatatttatttttaaagaagatgtaatttattaggattattattgtttgcgagttaaggtttttgattagatttgtgattttttttttagttttattttttacgtagtcgttgatgagttttttagttgtagttgagttttgaaagttagtggtaaaggtttcggagttatatagttttttggtatttttcgtgaatttgtttagtagattgagttgttttttgataaatatggtattttttatatttagttgtagtttatcgttggattgattgagggtgcgtaggaggtgttggaagttttggtgaatttttgttttagaagttttcgtgaggttgaatttgaggtttttgagaatttttgttagggtggtattatgggtttttagagataggaaggttaaggcggtggagatgtttagtggggagaagatgatatttttattaggggtttttaggattaattgtttgtataggttgaaagcgaagtttacgttggcggaggttaattcgaggtttacgtgtgtttttcggttttggtttttttgggttagatttttttcgttaagtgggttgttagggtggtagaggatagtagggtagaatttagtcgttaagagttttagagttaggagaggtaatattttttttatttttaattttgaaaagtaaagtttttttaagttttagagggttagatggagtttcgattattttttattgttttttatttagtttgcgttttggtttttgttttgttgttttttgttagttttggagttttttttaggtaggtgttttttggggtattcgatatatattattttgttttattttattttttgaggtaggtattataattgttgttatttttttgtagtggaaaagtcgggtatagagcggtgagggggtttgtttaagattatatagtaaataggtaaaggagtttagtgggtagttaggtttgtttggtttttcggtttgtaagttgatggggggttcgaggtttagtttaattagaatgtttgttttttttttgtttggtgagtagattttattttaggggattagaaagtaggggttttttttttttatttttttaattgttattaaagtagaatttagggatgaaggagttttgggtagagatagaggttatagtgatttttttagtttttagatgttacgtggtgtggtttttataggtttttacgatgtgatgttgggtggtagtgagggtcgattgagagagggaaatgaaagtttttggtatagtgtttggagtttcgatggttttgataatggttggtagtaagattaaagaaaggtaaatgtttttttttgtttttgttaggttgttacgtggtgtttgtgtttattataagtttggaagggttttttagtggggagaaggtagagagggttttggagttttttagatttggattgggattttattttggttatttttgattgttgtgtattggtaagtaggtgattgtatattttttaatttgttttcgtttttgtataatttgttaagtggtttaggtgagataaatgatgaaggtatttggtttatattagacgtatcgagtagttattattttttatattattttttttttgaaattataagttagagaagagttatgagttattgtataagagattttggaagggttgagttttaagtcggtgatcgtagtaaataagattatttatttttagttttcgtttatttagttttagaatttagaagagaaaaggggtagtttgggtgttggggagaagagtggggaagagaggcgattggaagggaggggaggggagaggggtagagagaggagaagaaaaggggaagagagagtggaaggaagggaaggaaggaaaggaagggaaggaggggaaggaggggaaggaggggaaggaggggaggttagtggaaatgtttttggttaagtttagggatagaggtattttgtttgttttaattgtttatttttaggttgatgtaattatttttttggataaatgttagataatatttttttttagaattattttaggggtaaaggtttgttttttttgtttgggtaagttggagggttggttgttttttagtagtttgttttttttgttgttggatagagatatagtttatttgtcgatttggttaggggtttttttggggaagtggagttttcgaggtagttttatggagattttgaaattatggtgaggtttgtggtttttgtttagagggatttgttgtaataattatatttgttatatgttttgagagttgtattttgttttaggtaaggggatagtattttttttttgagggttagatgtatagttgatttaaattcgaatttgtaagtattaaggtagaaatgattatagaggttttagggtatttttattttttgtaggtgtgaaaatttagatatagaggatgtttttaaaaaaggtatagggaattagtggtagttaagaatagatttttggtttttaatatttgagtatatttttttttggtttttgtttattttttatattttatatattttaggttgttgtttaaaatttttttggaaaaatagattttttcgtttttaggatgtaaaatattatggattatttgttttagggagttggatgtagttggtggattttaaagtcgtttgtttggagtagtggatttttatgaatgttgaggtttatttatttttgtagagaatttttttttttgtttgggaaatgttaggataattaagtgttttgttttcggattggaaatgattagatgataatttttggtaatacgggtttgttagatttatttaaataatttggttatgggattagttttaatttttttttttaaaggttaaaaaagtatatagaaaaaattttttgttgtattagtttttatttgtttattaaatatttattgaagaatatggaaaaatttagagaatgtaaagaaggattttggaaaatattttttagtattttattatttagagaagattttagttaatattttggtatattttttttttatttttttttattttttatttttattttgagatagagttttgttttgttgtttaggttggagtgtagtggcgtgattttagtttattgtaatttttgattttcgggtttaagtaattttttgttttagtttttcgagtagttgggattataggtatatattattacgtttagttaatttttgtatttttcgtagagatagggttttattttgttggtcggattggttttgaatttttgatttcgtgatttgtttattttagttttttaaagtgttgggattataggtatgagttatcgtatttagttatattttggtgtatttttaaagtatttttttttggtgtttttgtgtgtgtgtgtgtgtgtggttgtatgtgtgtttgtgtgtttgtgtgatgtgaatgtttatatataaatttagatatatttttaaaatataggattttatttttttgtggattagtttgtatttttggtatttttttattaattttagagagtagggtatttagagaggggtgtggaggggagttttcggggagtataggtgttgtgaggaattttttgtttttaggttttgtttttttgtgggggtttttttagttttggtttttgttttgttgagtttttgcgattggtttattttaataagtggttgtttttttttttcggtttttaggtatttttgggttttttttttagttagtttggggtttttttttggtttatgaaaaaggaaaaaaaaaattttgggcgggattagtggtttatgttggtaattttagtattttgggaggttgacgtgggtagattatttgaggttaggagtttatgattagtttggttaatatggcgaaattttatttttattaaaaatataaaaaaaaaaaaaataaataaattagtagggtattatggcgtatgtttgtaatttagttatttgggaggcgaggttgaggtaggagaatcgtttgaatttaggaggtagaggttgtagtgagttaagattacgttattgtattttagtttgggtaatatagagagattttgttttaaaaaaaaaaaaatttttttttttgattttttatggttatagtttttattcggggtagttttgataggtttttttagagggtatgttttggaggttattagattagtggcgaggttttagttttggtatgagttgatttggtttgaatttttgatgtttgatttattaattgatttattttaaataaattatgggaaatttttatagtttaatttttttatgtttaagatgtaaggtaatattttttgatagagtggtaattaagatgaaatgaaatgatattaaatgtatattttacgaggataggattttttgtttgtttgttgcgatagtgttgtatttttagaggatttatatatttgttgattgtaaggtattaagatgattaataattgtttgggtttattttttttaaatgatttttaggtttttagttttggaattgaatgtgtgtgtgtgtgtgtgtgtgtgtgtgtgtgtgtgtgtgtgtgtttttatatatatatttttttttatgtgtgtgtgtgtatatatatatatatatacgtatatatatatataatatattatatatttttatatatatattatatatatatatatatatatatagagagagagagagagagagagagagagagattcgttttgttatttaggttggaatgtagtggcgtaattattgttcgttgtttattgaagattttgatttttggatttaagatattttgtcgtttcgatttaagatattttgtcgttttagttttttgagtagttggaattataggtgtataacgttatgtttggttaatttttaaatttttatttttttgtagaggtagggttttattgtgttgtttaggttagttttgaaattttggttttaagggatttttttattttagttttttaaagtgttggaattataggtgtgagttattgtatttggttaatatatatgtttaagttatatagaattttaaagaaatagttgttaaaatgagattgaagtttattttttttttttgtaggtttagttggaggtagtgggttgatatggtgtttttacgttgttagaaattacgtttttttgtttggttgtttagttgtttttttacgtttgtttgtttaggttaagatggtttattgttatgtttattttttagtttatagaaagggttataggggaagggaagggtatatttttttttttgaaaggaatgttttgaatattgtttgttatttttatttgtgttgtgttgtttggagttttgttttatggttatatttagttataaaggaggttgtgtagtgtagttaagattttaggtagttattttttagttaaaaatttagagttttattattatgagagagataaagagagtggatattggggatgattagttattttgttttagagtattatttgagtgtttttaagtttttcggttttagagtattattttttttttttttttttttttttaaattatattttaagttgtggggtatatgtgtataacgtgtaggttttttatat

SEQ ID NO: 7 - DNA, 18011 bp, Artificial Sequence
  chemically treated genomic DNA (Homo sapiens)
aaaattttatatttattttattaaaggagttatatttttaaattgttaaaattattagtttttttaaaagttagaagttttacgggatagtttttaagggttattcgatttttagtttttgatgttaattttattttatgttttttatggtaaggggaaaatttgacgtttttcggaaatttgatgggatgtattgggtttaaatttttttaagagttaattagttagttagttttaatttatttttaagtagatgtatagtggtattgtgggggattaatattgagtattttgttaaataattggagtagtatttgtatttcgatttaattggttattttttttattttggtattttaataattagataggaagtaggtaatttaaaggaaaagagaaattttttacgggttttttgattttttatatttatatagatagtatcggggttgcgttggggggtataaaatgaatttaaagttcgaaattaaatagttattaggtttgagtttgtattattttggtggtttattataaataaaaatgtagattggatatattatatatattataattaatagtgatttattaattatattagagatgttataaaaagaatagtttaataattaggttttattagttagatggtttgggaaaataggatagtttttgatatgatattggttaaaaaaaggcggagtttgtgttatgattggggtttaatgttgtatttttatttttaataatatagttttggataggataattataaaagttttataagttttattattttagtaaatgaattagtcgagaattttggaatagatgatttttttgtaggtgttatggagaaatggtttggaaaatggaagggatttatgatttaaatatttattttttttgtaatagttataggtgtatttatttttgtgggttgttgtattatattttgtattcgtgggttaatttaaaggtttatagaagtagtttttataaaaattttttttatttttttttatttatagttagataagtttttgtttttagatgataaagaagaataataaagttaatttttgttaaataaatttgaaggggaagaattataaaatagaagaggggaaattgttgggataattaagtttttttttaaagatttaattttttggttataatttggaaataaattttatttttataatttttttaaaaattatatttttattttatttgggaaggtttaagtattagtttgtcggggttagtttagattatgcggtttaattttagttaataggggaaggatatagaaatagaaattgtattagggataaaaatttttttttttttttgtttagtgtgtttttgggattgtaataggtataggtagtatttttttatagaagtaaaagtgatttgttgagaaattttttaagtgcgggttttttttcgttatatcgagtatttgtttttaatatatgtaaattagaatggaggtttttttggatttgggtttgggttataagtttgtaagattttgggtaagattgtttttttttttgaattaagtttttttttggtttagtcgtttgtgagtaatatattagttttatgtttatattttttggttttgtgagtaatatatcggttttatgtttatattttttggtttgatcgggtttttttttgtagagttttttattttttttttttttttgaatattggttggttgtttttagggaagaagtttaaggtagtggtagggagttttttgtatatcgttatgataaatgttttatggaaatagtgagttgatgggacgaggggtcggggttagaaagttagttaaaaggtgtgagaattcggattagtttttagttttgaatatggtaggttattgtgttatggtaggggagtgaaagtttttttttgttttttttagggttttagttggggttttttataaaagagaaaaatagtttattaatgtatgtagtgtattttattgaagaagttttaataaaaagtaatttagaatagtgatttagaattgggttatggagtaattttaataaagaataattaacgtgtggggaaatgataggatttaggagagcggttttaggtttttaagtttgggaaatcggtaaggtgagtattgggaggaaattaaggcggaagttttatttatagagttttagggtgtttttttttttttggttgatgcgttttttttttataatttttattttgttttagatagtagagggatagggtagagagagatttttttgtttttgttgtattttagttgtttttaatttaagataatttttgaggtttattttggagtgatatattttggtgttttttacggtatagggtatagttttagaggattagatttatagttgattattgagtttttttatgtgttaggttcgtttagggagaatatttagttttataaatagggtaggtggtattaggatgttgggcggtagtttaatttttagtttatgggtgggtggagtggagagtattttttttatgtggggttttttggtcgtggatttggagattattaaggttttgtagttttagaagtggtttgttggaatggggtttgtaggtagggaagttttgggttagagttttttaggggtaggaatatagtttttaggtttgttttatttgtttttttgaatagttaagggttgtttatagggaatttttttttttttttttttttttttttttttttttgttttttttttttttttttttttttttttttttttttattttttttttttttttttttttattgtggtaaaatatatataatatgaaatttattattttaattatttaaatacgtatagttttatggtgttgagtttatttatatcgttgtatagttattattagtatttatttataatattttttttatttttttagattgaaatttaatatcgtttatagttttttattttcgttttttttaggcgtttattatttttttttttatttttacgaatttgatgattttagttttttagatatgtggaattgtggttgggcgcggtggtttatatttgtaattttagtatttttagaggttaaggtaggtaaattattttaggttaggagttttagaatagtttggttaatatggtgaaatttagtttttattaaaaatataaaaataagtcgggtatggtggtatatatttgtggtgttagttatttaggaggttgaggcgggagaatcgtttgaatttgggaggtagaggttgtagtgagttgagattttattattgtattttagtttgggagagagagcgagattttgttaaaaaaaaaaaaaaaaagttaatagaatcgtatggtatttttttttgttggattggattttatttagtataaggtattaaggtttatttacgttgtagtaggtgttagcgttttttttttttttagggttgagaaatattttatttagagatagatttatttcgtgtagttatgacgttttggtgaatattacggttgtttttagtttttggttatggtgagtttcgttgttaggaatatagatgtgtatatgttttttttagatttttttttaattttttgggtgtatatataaaagtaggattgttagtttatacggtaataatatttttatttttatttttattttttgagaaggagttttgttatgttgtttaggttggagtgtagtggtgcgattttggtttattgtaatttttattttttaagtttaagcgatttttttgttttagcgttttaagtagttggggttatagattcgagttattacgatcggttaatttttgtatttttagtggagatggaggatttattatgttggttaggttggtttcgaatttttgattttaagtgattcgttcgtttcggtttttgaaagtgttaggattgtaggtatgagttatcgcgttcggtttcgtacggtaattttgtgtgatgtttagggatacgtttcggagttggcgaattggatttggggtgggagggaaaggaagtattaaagatgtttttagtttttacggagatgagaacggtgtttcgggagggcgggacgggattagggttttgtgaacggggtattagtgtaaatttttttgagagatattaggaaaagtaggaagaagtttttgggatttttcgggaggtaattttttttcgtagcggggcgcgtttttttagtttttgtagtcgtcgtcgtttttttttgagttttttcgagcggacgttaggtaagggcgggggtcgtagcggggcggagcggggttttgtttacggatcgcgcgaagaggttttagggttcggcgcgggcgtcggagggggattcgttcgtagggggaacgcgaaggttttttagtttgcgggacgtagagtttcgtggggtcgcgagtcggggtcggggaagcgattttgtttagggggacgtcgcgggcgcggggtatagggttttgcggggttggagggttataggttgcggcgcgcgcgagtcggaaggtcggggatcgtgggttttggggtcgtagttttacgggttcgtttttttcgttttttcgggggagtaggatgttagggggtcgttttcgttcgggagatagggtgttaaggggttttcggggacggggttttaggggtattcggagtcgttcggttttagggcgggatgcggggatagggttttaaggtattagggttacgaggggcgcgcgggttttttggggatgcgcgcgaggaggcgtcgtttttttttagtaggggtttttggggattcgcggtcgtttttcgcgtttttttgttttttttcgtgttcggtttcgggaagtcggggcggcgggcggcgcgggtcgggagggggcgtttcgggtttatttcgttttagggtcgtcgggcggaaggcggaggtcgagattagacgcggagttatggtcgaggtgttgcggacgttggtcggtgagtgtaggtttcggtttcgggtgttcgcgagggagtcgttatcgtagggaatgcggggtgtattcgatagtcgggtcggggtgggggcgtttagggttgcgaggttttaggtcggtcgtcgttttagttttcgagattttgcgttttggggagtcggcgggtaggtgggttcggtcgcgttgtgggtgtttgggattcgtagggaggatgggcgcggtggcgcggtttggcggggggttcgttttcggggttttcgggttttggtgagagcggggtttttcgacgtcgtggcggtttttagttttttttcgtttttttacgtttttcgttttttatgagttgttatttttagtatttatcgttcgattttggattaggataaggttttgggttgttttgttcgttttttagtttttttttcgggtacggcggttaggcgttcgggttgatcgggaatagtttttatattttaaacgcggaggcgtttcgggaaggcgaggtgggtaagtttaatgttaagcgtgacgggggaattgtgtttcgggtttttaggtgatataggagttaagaagaaattattgaggtaattagatgcggtgatttaggtttgtaattttagtattttgggaggtcgagggtggattatttgtttttaatttttttggcgttagaagatgaattgagtatttatttagataataacgtcgttttagagggagggatgtagaacgtagggttacggggtgtaggttgtaggttagtgaattttaacgttaaaggttagggagagtcgggtggggtatttagagttagtatatagttttttaatttagaggagtgttgtgtatatatttggggagagaattttattttgatttggaattaggtggcggataaggtatattgaggtttgatttggtgagggtttttgtttcggaggtgtagttttggaggagcgggaggtagaggagtggaaaatttatgaagaaaatcgggtatggtgtaggtcgaggttttgtttttagtaatgtttattatttgttagtgtttattgtgaggtagtattgtgtttagtatcgttgagtttttaggaaggaacggtaaatatttttcgggttatttttttatttacgggaaaataggtttggagagatttgggatagtgttttggttttaggtaggaagggttgagtggggtttgggatttaggtttgattgtaaatatttgttttttttttgtgttgttagcgtttttcgggtttttttttgttttttttttgtggtttttgtttttttttttttgttttaatatgttttaacggatgtatataataaatcgtatatgaaaggtatagttggatatattttgatttagttaagatgatgaatatagttgttattttaggagtttgttttgttttacgggttatgttgttttagttggttttatgttagggagttttggaggattagggtcgggtagttggtttttatatttttggggttttggtattggttttggtttatgatcgtatttaagataaacgttttgaagattaagaggttaggtttttgagaaatttggtaaatgagtgtttatttttaggttatttatattttgtatgttgatttagttatttaattaatgttggttgaatattgatgagaataagtaggtttgtgttagaaggtgtttgtagttaggagttggtgagttggtgtttttagggatattaatggcgagggatttagtgtgtggaaatttgggggataagtatgttagggagaagagtttatatggggaaggttcggttttataaattagttaggtttgttggggcgggtaggagagtagggtagtggagttagagggagtgatttttcgaaaggtaggaagaggatatgagagagttttggagatgacggtgaggatgtggttggtgggcggtgagttgggtgttatgtgttggttttttagagaatgtttagtttttttatatttattataatttttggaggattgagattacgtgtaggagttttggaagttggtagtgtatttagtttcggtttttttttattttggtgggttttattagagattggttaagaagagattaaattgtttttggattaaattgagggtggggttgttatttttcgcggtttaataacgagatgtagatgaattggggagaaagagagtttttatttttgtaattagttataaggagaagatttggaaattatttttagattaatttaaaattataaagttttttagagtttatatattttttaagttatatgtttatgtgtaagtgtgtatttattttaagatataagtaattgatttatgttaatttataattaaggtttgagttttgaagatttttttttggatttttagtaaatttatttaatttaaaatttttattttgttttttaaattatgggggtttgggaagtttttttagatttttagtaaatttatttgtggagttttggggaatttttttagatttttaataaaatttgtttaattttaaatgggttttgttaagaattttttcgttattttgttatgtttgaaggtttaggaaaggtttaggtaaaatttttggtgggattttgttatattttagtttttttataagggtattggtttttaatatttaatttaattatttagttagtattgaaatagttgttagggaggtttgcgttagtgagatttgatttgttataatatattttattcggaatgttgtttataattttaaaaaattagttttgacggagttttattgaatatatttagtatttttttttttttagtttagggttaaggggttggggttgatggtattattgaaagaaatagttttattgtcgtgttattgatatgttataaaatttatttgttttaaatgaattatttttagttagtttatagagttgtgaaataaattttataatttttttatttttagtttattaaaattttttggaattttttcgtagttattttttatttttatttggttttagataattattttttgtttttttagttttgttttttttggatagtttttatgaatggagttttgtgttatatggttttttgtatttgattttttttatttagaataatgatttcgagatttatgtatgttgtagtatgtattagtatttaatttttttttattattgaataatttattgtatagatagattatattttgtttatttatttattagttgaaggatatttcggttgtttttgtttttttagttattttaaattgtacgtagtattgttatgaatatttgtgtataagattttgtgtgaatatgtttttattttttttgggttgatatttagtagaggaattgttgggttatatagaaagtttgatttaatattttaagaaattagtaaattgttttttaaagtgattgttttattttatatttttattagtagtgtataacggttttaattttttttttttttttttttttttgagataaggttttgttttgttatttaggttggagtgtagtggtatgattttggtttattgtagttttaattttttgggtttaattggtttttttattttagttttttgagtagttgggattataggtgagtattattatatttagttaatttttgtatttttggtagagatggggttttgttatgttgtttaggttgtttttaaatttttgggtttaagtgatttgtttatttcggtttttttaagttttgggattataggtgtgagtcgttgcgtttggttgagggttttattgtttgtacgtttgtagtaatatatattatttttgtgggtaaaaggtggtattttattatagttttgatttgtatttttttaaggttaaatgatggtaagtggttttttttgtgttttttagttatttgtatatgtttttggtgaaatgtttattgaaatgttttgtttttttaaaaattgagttgttttttttgtttagttttgagagttttttatatatatagtattatatatatatatatatatatatatatatatatatatatatatatatattagatatatgatttgtaaatatttttaattattaatagtttaatatttttttattggtattttgaagtagaaaagttttatattttgatttattttaatttattaatttttttttttattgtgtatttggtattatatttaagaaattttaatttagtgttataaagatttaattttatatttttttttaatcgttttttagtttatgtgtaagaatttgtttattttatttaagttgtataatttgttggtaaatagttgtatatagtatttttttgaaatttttttaatttttgtaagattggaattgttgtttttttttttagttttgattttagttatttgtgttttttttttttttggttaatgtagttaaagttttgttaatttttttgatttttttagagaattgttatttgatatttttttattttatttttttttttttgttttttagtttattggtttttattttttttattttgggtttaattcgttttgtttttttttattgtagttatttataatggaagtttatatatttgatttaagatttttttttttaatgtagatatttatagttataaattttttttgaaatatagttttagttatattttataaattttggtatgttgtgtttatatttttatttagtttagtgtattttttgatttttttttttgatttattgtttatttagaattatgttgtttaatttttatgtatttataggttttttaaattttttttgttaatttttgattttatttttttgtggttagagaagaaattttgtggatattagttttttcgaattttttagaattgttttatggtttagtatatgattgattttggatattgttttatgtgtatttgaggagaacgtgatttcggtttttgttaggtggagtgttttagagatgttagttggtgtttagtgatgttaagttatttgtatttattgattttttttttaattattttatttattattgagagtggggtaggattttggtgtttaattattgtttttttgtttttttttttttgtttgtttttttttttttttgaggtggagttttattttgttatttaggttggagtgtagtggtatgattatagtttattgtagtttttattttttaaggtttaggttattttagttttttgagtagttgtaattataggtaagtattattatgtttagttgatttttgtattttttatagatagggttttgttatgttatttaggttggttacgaatttttgggtttaagtgatttatttatttcggttttttaaagtgttgggattataagcgtgagttattatgtttggtttaattattattggtgaattgattgttttattttttaattttgtgagtttttgttttatgtattgttgcgggataattaaggaattagagagatcgatggggttgaggaggaattatttaattatttaggtgtatcgatttaattagattaatatttaaaggattgggttttaaataaagagttaagttattttttaagtattttgtggggtggggggagatttgtgtagggggaagagtattatagaagtaagaaataaagatagttatttagttaagatatgtattatattattttttattttttaaggaataatacgttttatgatttaagattatttgtttagtgattttgtagttgtatagttagagaaatagagttttcgtaatgtttgggaaagggagagataaggtttattagttatagaaaaatagttagttaatttttaaaggattttagtttttttttttttttaaggggaattggttttttatatataattgagtttttgtttatatagtttttaattttttttaatttttgttttagtattttggggttaggttgttaggtatgtatatatttttgtttgttatattttcgtgatgtatttattttatattatggtagaatgtttttttttagtaagatttttgattttaaaaaagttggttagatggggtggtttatgtttgtgattttagtattttgggaggttaaggtaggtggattatttgaggttaggagtttaagattagtttggcgaatatggtgaaatttcgtttttattgaaaatataaaaaaattagttagttgtgatggtgtgcgtttgtaatttttgttatttgggaggttgaggtacgagaattgtttgaattcgggaggttgaggttatagttagttaagatcgtgttattgtattttaatttgggtgatagagtgagattttgttttaaaaaaataaaaaaattatttagtttgacgttagtatttttttttaagtttttttacggttgtttgtatagtaaatttattatttttttgttttgatttatttgtatttttgtttttaaagtatgtatgttttttataggtagtatatagttaaagtttaaaaaaaaaatttagtttaacgatttttgttttttgattggtatgtttattttatttttatttaatgttattattgttgtggttggatttttatttattagtttataatttgttttttatgttttatgtttttttgtttttttgtttattttttattatttttttttgtattaagtattttttagtgtagtatttaaattttttttttttttttaagtgtatattttaaagttattttgttagtgtttgttttagggattataatatgtattttaatttattaggatttattttagattaatattaattttagtaaaatataggaatttgattttagtataattttattttttttttttttgtttgtggtttgtagtattattgtcgtatatgtttatttatatatgttataaatttaataatatggtgttataattattgttttatataattttatttttttttaatttagtaagataagtaaggagaaaaatattttttaagttttttatattatattgtatatttattattgattttatttttgatttttttttgtatatttaagttattgtttggtgatttttttttgttttagtatatataataattttattgtttttttgtttttttatgttattattgttatatatattatatatgtttatgttgtgagtttattagttaagttagtttagtaaggttttaagatataaagttaatgaataaattaggttgggtgtggtggtttatatttgtaattttagtattttgggaggttaagataggtagattatttgaggttaggagtttgagagtagtttggtttatatggtaagattttatttttataaaaatataaaaaaaaaaaaaaagttgagtgtggtggtgcgtttgtaattttatttatttgggaggttgaggtatgagaattgtttgaatttaggagggagaggttgtagtgattggagattatattattgtattttagattgggtaatagggtaagatatagtttaaaaaaaaaaaaaaaagaaaaaagaaaaataagaataaattaattatttttttataatatttgttataattaattgaattatgaaaaattttaaatattatttatagtagtattataaaatatgaaatatttagagaataatttattaaattaggagaaatgtttatataattaaaattgtaatataaattaggtattatggtttatgtttgtaattttagtattttgggaggttaaggtggttagattatttgagtttagaagtttgagattagtttgggtgatatagtgagattttgtttttataaaaaaaaaaaaaaattagttgggtatggtggtatgtatttgtagtttttgttatttaggaggttgaggtgagaggatgatttgagtttagtaggtagagattgtagtgtattttagtttgggttatatagtaagattttgataaaaaaaaaaaaaaaaagaaaaagaaggttataaaaaaatagaaaattgtaaaatattgatgataaaaattaaagaagatataaataaatggagaaatatattatgtttatggattggaagatttatattgttaaattgttatttttttttagatggatttatagagtttatataattttatttaaaattttagaagaaatttttgtaaagttgatagttgattttaaaattttatatagtaattagaataggttgatattaggatagatagatagtttaatggaatagaatgtagagtttagaaatagatttatatagaaatagtttattgattttttaagagttgttttttgataagggtgttaaggtaatgtgatagagaaaggaaagtatttttaatttaaatggttgaaatgattggatatttattgagggaagaaagggattttagttttttatataatatataaaaattatggaattttgaagaaaataagagaaaatgtttatgaatttggggtaggtaaaaatttaatagatgaggtaaaaaaaaaaaaaggtttaaattataaaaatggttttatttttataaggataaattagagtttataaaaattaatatttttttttaaaagaaaaattaaggaaaaatgaataaataagttatcgattgaaagaaaatatttgttttttaagaagtattttgttttttattttatgggtttatagtaggtgtatatatttatggggtttttgagatattgtggtttagttatataatggaaaatttatattatggagaattggtatttatttttttgagtaattattttttgtgttataaataatttaattatatttttttagttatttttattttttttttttttttttttgagatggagtttcgttttgttatttaggttggagtgtggtggcgttattttaatttattgtaattttcgttttttaggtttaagtgatttttttgttttagttttttgagtagttgggattataggtatttattattacgttcggttagtttttgtatttttaaattttttttttttttttttttttttttttttttttttttttgagatggagtttcgttttgtcgttcgggttggagtgtagtggtgtaatttcggtttattgtaattttcgttttttaggtttaggagatttttttgttttagttttttaagtagttgggattataggtatgcgttattatatttagttaattttttgtatttttagtagaggtaggattttatcgtgttggttaggttagattcgaatgtttgatttcgtgatttatttatttcggttttttaaagtgttggggttacgggcgtgagttattacgtttggttttagtttttgtatttttagtagagatgaggttttattatgttggttaggttggttttgaatttttgattttaggtgatttatttgtttcggttttttaaagtgttgagattataggtatgagttattgtgttcgattttttttttagttatttttaaatgtgtaattaaattattattgattatagtttttttgttatgttattaaatattgggttttatttattttttttatttatttgtatatattaattatttttatatatttttttatttttgttattatttttttaagtttttgcgaattatttttttattttttatttttatgagtttaattgtttcgatgttttgatattatagataagtgagaatatgtagtgtttgtttttttgtgtttggcgagaaaatatttgtaatatttgtatttggtaaaggatttgtatttaaaatatagaaataaattttgtttaataataaaaagagaaataatttaatgagatttagtgtttataaaaagtagaataattagtcgggtatgttggtgtatgtttgtagttttatttaattaggaggttgagggggaaagattatttaagtttaggagttcgaggttgtagcgagttgtgatcgtgttattgtattttagtttgggtgatagagtaagattttgtttaaaaaaaataaaaatagagggttaggtgaggtggtttatgtttgtaattttagtatattgggaggttgaggtaggtggattgtttaagtttaggagtttaagattagtttgggtaatatggtgaaattttatttttattaaaattataaaaaattagttagatgtggtgtatgtttatagttttagttatttaaaaggttgaggtgggaggattatttgagtttaggaagtcgaggttgtagtgagttatgattatgttattatattttagtttgggtaattggagtgggattgtgttttttaaaaatatatataagtaaataaataaataaataaataataaaatgagttaaagatttggataggttttataagaagtaagtaaatggttaataaatatatgaaaagatgatttatttttttagttattggatatatttagatattattttttatttattagtatggttaaaggataaaagagtgattattaagtgttggtaaggattgtggttttcgtatatttttggcgggaatggaaaatttagttattattttggaatatagttttttataaagttaaatatatatttattatatgatttattttttttattttttggtatttatttaagggaaatgaaaatataggtttataaatatttgtatatgagtgtttatagaagttttgttgttagtggtttcgaatagtgaaaaaattatagtgtttgttaataggagatagaataaatgaattgtggcggattaataatggcgtgttttttagaaatgaaaaagaacgaacgattgatatacgtgataatataggtgaatttttaaaatagtatgcggtgtgatgcggttagatataaaagagtatgtattagaggatttcgtgtatgggaaacgttagggaattagatttatggttgttagggttaggagggattttattggggtgattatatgtgtatatatattgtgtgaaatttattaaaatcgtatatttaaagtgggtatattttattggatgtaagttattttttaaattaaattaatttttaaagttttaaaaaatggaattatttttgttatattgaaggaaaattatttttattaagatttttttatagttaaacgatttattaattataaaaatggaaaaaataatttaggatatgtaaagtttaaatgttttgttttttacgtttttgttttaagaagttattcgagataaatcgtttcgtggttataggatttagaaaggtggaggtaaatatatataagtattataagataagaagtaatagatgaattagttgaaagggattgatttcgggggaaggaataggaattgggttaggagatagacgttttttaggtttgtttttgtgaaaacgatagtttttttttatttgcgggggataggtttcgagatttttagtggatgtttgaaattatagatagtattaaattttatagagagtatgtttttttttgtatatatatatttatgatagggtttaatttataaattaggtatcgggtgggattaataattataattaatagtaaaatagaataattataataatatattgttcgaggcgggtggattatttgaagttaggagatcgagattagtttggttaatatggtgaaatttgtttttattaaaaatataaaaaattagttaggcgtttgtaaatttagttattcgggaggttgaggtaggagaattgtttgaattcgggaggcggaggttgtagtgagtcgaaggtgtttttttgtattttagtttgggtaacgagtaaaattttattttaaaaataataataaaataataataataataaaaataatatattgtaataaaggttacgtgaatgtggtttttttaaaaaaaaatgtgtatatattttagtttgtgggttttttgttgttgtagttttgtttattattaagagatagggttttgttttgttatttaggttggagtgtagtggtgtgattatggtttattgtagtttttattttttaggtttaagtgatttttttattttagttttttgggattagaggtatgtattattatgtttagttaattgtttttttttttttttttttgatagaaatgagtttttattatgttgtttaggttggtttagaatttttggtttttagtaattttgttggtttagttttttaaagttttgggattataggtacgagttacgatgtttgtttttaaaatattttattgtattgtatttatttattattggtttttggttgattatgggtaattgaaattttagtaagcgaaggtgtggataagggaattattgtacgtgattttaatatatataaaattattttaaagataatgattgtttttagaatatgagtttttgagatagtagggagatattaggggaagttggtggtttttttttttggtaggaattggtttgggtttttggtttagtttggttatgaggttgttttggtttttttcggtgggttcgatagtgatttcgacgtgtttattttagtgtggtttatttcggttttttaggggaagggggtgttgagtggaaggaggttaatgggaagtcggggtggtttttagagtttgtaggagtagtcgggttgatgagttgggaggagtagatcgttttttttttttttgagtgggaggagggttagatttggattgggtttggagatgtttaggtggggtttagagtattatttgtggggtagagggattattttggtagatgaaggttcgtcgtagggtgtgatgtttgaattataaggcgggataggtaaagtggggtaggtgagagaaggagggtgagtgatgtgatttttttatttttgttttttagg

SEQ ID NO: 8 - DNA, 18011 bp, Artificial Sequence
  chemically treated genomic DNA (Homo sapiens)
tttggaaaataggagtagaaaaattatattatttatttttttttttttatttgttttattttatttgtttcgttttgtaatttaggtattatattttgcgacgggtttttatttgttaagatggtttttttgttttataggtgatgttttgagttttatttgagtatttttaaatttagtttagatttggttttttttttatttagagaagagggaggcggtttgttttttttagtttattagttcgattgtttttgtagattttgagagttatttcggttttttattgatttttttttatttagtattttttttttttgggagatcggaatgaattatattgaaatgagtacgtcgaggttattgtcgaatttatcgagggaggttaggatagttttatggttaggttgagttaggagtttagattagtttttgttagggagaggagttattaattttttttagtatttttttgttgttttagaggtttatgttttggaaataattattgtttttaaggtgattttatgtatattaaagttacgtatagtagtttttttatttatattttcgtttgttggagttttagttatttatggttaattaaaggttaataataggtgagtatagtatagtaaaatattttgaggataggtatcgtggttcgtgtttataattttaggattttgggaggttgagttagtagaattgttggaagttaggagttttagattagtttgggtaatatagtgagaatttatttttattaagaaaaaaaaaaaaaaaataattagttgggtatagtggtgtatgtttttggttttaggaggttgaggtggaaggattatttgagtttaggaggtgaaggttgtagtaagttatgattatattattgtattttagtttgggtaatagagtaagattttgttttttaataataaataaaattataataataaaaaatttataaattaagatatatatatatttttttttagagagattatatttacgtaatttttattatagtatattgtttttgttgttgttgttgttttgttgttgtttttgagatggagttttgttcgttgtttaggttggagtgtaaaggggtattttcggtttattatagttttcgtttttcgggtttaagtaatttttttgttttagtttttcgagtagttgggtttataggcgtttggttaattttttgtatttttagtagagataggttttattatgttggttaggttggtttcgattttttgattttaagtgatttattcgtttcggatagtatattgttataattgttttattttattattaattatggttgttaattttattcggtgtttaatttataaattaaattttattataggtatgtgtgtataggagaaaatatattttttgtagggtttggtattatttgtggttttagatatttattggggatttcggaatttatttttcgtaggtaagaggggattatcgtttttataagggtaagtttgaaaggcgtttattttttggtttagtttttattttttttttcgaaattagttttttttaattaatttatttgttattttttattttataatgtttgtgtgtgtttatttttatttttttaagttttgtgattacggagcgatttatttcgaatagttttttgaaatagaaacgtgggaggtaaaatatttgaattttatatgttttaaattattttttttatttttgtagttggtagatcgtttggttgtagggaaattttggtggaaataatttttttttaatgtggtaaaaatggttttattttttaaaattttgaaaattaatttaatttgagggataatttatatttaataaaatgtgtttattttaggtatacggttttgatgagttttatataatgtatgtatatatgtaattattttagtaaggttttttttgattttgataattatggatttgattttttggcgttttttatatacggaattttttgatatatgtttttttatgtttggtcgtattatatcgtatgttgttttgaagatttatttatattgttacgtgtattaatcgttcgtttttttttatttttgagaagtacgttattgttaattcgttataatttatttattttgttttttattgatagatattgtggtttttttattgttcggggttattagtaataaagtttttgtaaatatttatgtgtaggtatttgtggatttgtgtttttattttttttgagtaaatattaaggaatggaaaagatgggttatatggtaagtgtatgtttaattttgtaagaaattgtgttttaaagtggtgattgaattttttattttcgttaggaatgtacgagaattatagtttttgttaatatttgatggttatttttttattttttagttatgttagtggatgaggagtggtatttaagtgtgtttaatgattaaggaggtaaattatttttttatgtatttattggttatttgtttgttttttatgaagtttgtttagatttttagtttattttattatttatttatttatttatttatttatatatatttttggggggtatagttttattttagttgtttaggttggagtgtggtggtatgattatggtttattatagtttcgattttttgggtttaggtgatttttttattttagttttttgagtagttgagattataggtatgtattatatttagttgattttttgtggttttggtagagatggggttttattatgttgtttaggttggttttgaatttttgggtttaagtaatttatttgttttagttttttaatgtgttgggattataggtataagttattttatttggttttttatttttattttttttagataggattttattttgttatttaggttggagtgtagtggtacgattatagttcgttgtaatttcgaatttttgagtttaagtgattttttttttttagttttttgattaggtgggattatagatatgtattaatatgttcggttaattattttattttttgtagatattgggttttattaagttgtttttttttttattattgagtagaatttatttttatattttggatataagttttttgttaaatataaatattataaatattttttcgttaggtatagagagatagatattgtatgtttttatttatttgtagtattaaaatatcgaaataattaaatttatggagatagagaatagaaggatggttcgtagagatttggaagggtagtggtaggggtgagagggtatgtagggatggttaatgtgtataaataaatagaaagaatgaataagatttagtatttgatagtataatagggagattatagttaataataatttaattgtatatttaaaaataattaaaagagaggtcgggtatagtggtttatgtttgtaattttagtattttgggaggtcgaggtaggtggattatttgagattaggagtttaagattagtttggttaatatggtgaaattttatttttattaaaaatataaaaattaaggttaggcgtggtggtttacgttcgtaattttagtattttgggaggtcgaggtgggtggattacgaggttaggtattcgagtttagtttgattaatacggtgaaattttgtttttattaaaaatataaaaaattagttgggtgtggtggcgtatgtttgtaattttagttatttgggaggttgaggtaggagaattttttgaatttgggagacggaggttgtagtgagtcgagattgtattattgtattttagttcgggcgatagagcgagattttattttaaaaaaaaaaaaagaagaaaaagaaaaaagaaaaaaaaagtttaaaaatataaaaattagtcgggcgtggtggtgggtgtttgtagttttagttatttaggaaattgaggtaggagaattatttaaatttgggaggcggaggttgtagtgagttgagatggcgttattatattttagtttgggtgatagagcgagattttattttaaaaaaaaaaaaaaaaagaataaaaataattaaaagagtatagttggattgtttgtaatataaaggataattgtttaagaggatggatattagttttttatgatgtgaattttttattgtatgattgaattataatattttagggattttataaatatatatatttattatgaatttataaaatgaaaaataaaatattttttagaaaataaatatttttttttagtcggtggtttatttatttatttttttttaattttttttttgaagggaagtgttaatttttataaattttaatttatttttataaaaatgaaattatttttatggtttgggtttttttttttttttgttttatttattaaatttttgtttattttaagtttatgaatatttttttttattttttttagaattttataatttttgtgtattgtgtgaaaggttaaagtttttttttttttttaatggatatttagttattttagttatttgaattgaaaatatttttttttttttattatattattttagtatttttattaaaaagtaatttttaaaaaattaatggattatttttgtgtaggtttatttttaaattttgtattttattttattgaattatttgtttattttaatattaatttattttgattattatgtaaaattttagaattagttgttaattttataaaaattttttttggagttttaagtgagattatgtggattttgtagatttatttggggagaagtgatagtttagtaatgtaagttttttaatttatgagtatggtatatttttttatttatttatgttttttttaatttttgttattaatattttgtagttttttgtttttttgtgattttttttttttttttttttttttttttgttagggttttgttgtgtagtttaggttggaatgtattgtaatttttgtttattgggtttaagttatttttttattttagttttttgagtagtaggggttataggtgtatgttattatgtttagttaatttttttttttttttgtagagatagggttttattatgttatttaggttggttttaaatttttgggtttaagtgatttggttattttgattttttaaagtgttgggattataggtatgagttatggtgtttggtttatattgtagttttaattgtatagatattttttttaatttggtaaattattttttaaatattttatgttttatgatgttattgtaaatggtatttaaaattttttatggtttaattgattgtggtaagtattatagaaaaataattgatttatttttgtttttttttttttttttttttttttttttagattgtgttttgttttgttgtttagtttggagtgtagtggtgtgatttttagttattgtaattttttttttttgggtttaagtaatttttatgttttagttttttaagtaggtgggattataggcgtattattatatttaattttttttttttttttgtatttttgtaaagatggagttttgttatgtgggttaggttgtttttaaatttttggttttaagtgatttatttattttggttttttaaagtgttgggattgtaggtgtgagttattatatttagtttgatttatttattgattttgtattttgagattttgttaagttgatttagttgatgggtttatagtataaatatatataatatatatgataataatagtataaaggagtaaggaggtaatgaagttattatatatattggagtaaggaaaggttattagataatagtttgaatatataggaagaaattaagagtaaagttagtgataaatatatagtgtaatataaaagatttgaaaagtgtttttttttttatttgttttattgaattgaaaagaaataagattgtgtgaaataataattataatattatgttgttgagtttataatatatatagatgaatatatacgataataatattataaattataagtaaggagggaggaaatggagttatattggagttaagtttttgtattttattaaaattagtattaatttgaagtagattttgataaattaaaatgtatattgtaatttttggagtaaatattaataaaataattttaaaatatatatttaaaaagaaaaagggaatttaaatgttatattagaaaatatttaatataaaagaaggtagtaaaagatgaatagaagaataaaaaggtataaaatatagaaaataaattgtgaattgatagatggaaatttaattatagtaataataatattgaatgggaatagaatgaatatgttaattaaaaggtagagatcgttagattggattttttttttaagttttgattatatgttgtttgtgagagatatatatattttagaaataaagatataaataggttaaagtaaaaggatagtagatttgttatgtaaataatcgtaagggagtttgaggagaaatgttaacgttagattaaataatttttttgtttttttgagatagagttttattttattatttaggttggagtgtagtggtacgattttggttgattgtaattttagtttttcgggtttaagtaattttcgtgttttagttttttaagtagtagggattataggcgtatattattatagttggttaatttttttgtatttttagtagagacggggttttattatgttcgttaggttagttttgaatttttgattttaggtgatttatttgttttggttttttaaagtgttgggattataggtatgagttattttatttggttaatttttttaagattaaaaattttattaaagagaaatattttgttatgatataaagtgaatatattacgaaaatataataaatagaaatatatatatatttgataatttagttttaaaatattagaataggaattaaaagaaattaaaaattgtgtaagtaaaaatttagttgtatgtaaaaaattaattttttttgaggaagagaaagggttggagttttttaaaaattaattggttgtttttttgtggttagtgagttttattttttttttttttaggtattgcgaagattttgtttttttagttgtgtagttgtaaggttattaaatagataattttgagttataaaacgtgttgttttttgaaaagtaagaaataatgtaatgtatgttttaattgaataattgtttttgttttttgtttttgtaatatttttttttttgtataaatttttttttattttataaaatgtttaaaaggtagtttgattttttgtttggggtttagttttttggatgttaatttgattgggtcggtgtatttaaataattaaataatttttttttaattttatcggtttttttgattttttaattatttcgtagtaatatatgaagtaaaaatttatagaattgaagggtgaaatagttaatttattagtaatggttgggttaggtatggtgatttacgtttgtaattttagtattttgggaggtcgaggtgggtgggttatttgagtttaggagttcgtgattagtttaagtaatatggtaaaattttgtttataaaaaatgtaaaaattagttaggtatgatggtatttgtttgtagttgtagttatttaggaggttgaggtgatttaagttttgggaggtgggggttgtagtgagttgtgattatattattgtattttagtttgggtgataaagtgagattttattttaaaaaaaaaaaaaaataaataaaaaaaaaaaaataaaaaaataataattggatattaaaattttattttatttttagtaatggatagaataattagaaagaaaattagtagatataaatgatttgatattattggatattaattgatatttttagaatattttatttggtaagagtcgaagttacgttttttttaagtgtatatggaatagtgtttaaggttaattatatgttggattataaaataattttgagaaattcgaaaggattgatatttatagagttttttttttagttataggggaatgaaattagaaattaataaaagaaatttgggaaatttataaatatatagaaattaaataatataattttaaataagtaatgggttaaagaagaaaattaaaagatatattgagttgaatgaaaatgtaaatataatatattaaaatttatgagatataattaaagttgtgttttaagggaaatttatagttgtaaatgtttatattagaaaaaaaaattttaaattaagtgtgtaagtttttattgtaagtaattataataagaaaagatagaacgaattaaatttaaagtgagaagagtggaaattaatgaattagagaatagaaagaaaaagataaagtaaaaaaatattaaatggtagttttttgaaaagattaagagaattgataaagttttagttatattgattagagagagagagaatataaataattaaaattaggattaaaagaggagatagtaattttaattttatagagattaaaaggattttaaggaaatattatgtataattgtttgttaataaattatgtaatttaggtaaaatggatagatttttatatataaattagaaagcggttagaagaaaatataagattaaatttttgtgatattggattaagattttttagatatgatattagatatataataaaagaaaaagttaataaattggaatggattaaaatgtaaaatttttttattttaaaatattaataaaaaagtgttaaattattgatggttgaaaatatttgtaaattatatatttggtgtgtgtatatatatatatatatatatatatatatatatatatatatgatattgtgtatgtaaagaatttttaaaattgaataaaggagataatttaatttttaaaaaggtaaaatattttaataggtattttattaaaaatatatataaatggttaaaaagtataagaaaagttatttgttattatttgattttggggaaatgtaaattaaaattataatgagatattattttttatttataagaatggtatgtattgttgtagacgtatagatagtggaatttttagttaggcgtagcggtttatatttataattttaggatttggggaggtcgaggtgggtagattatttgagtttaggagtttgagaatagtttgggtaatatggtaaaattttatttttattaaaaatataaaaattagttggatgtggtggtatttatttgtagttttagttatttaggaggttgaggtgggaggattaattgagtttaagagattgaggttgtagtgagttaagattatgttattgtattttagtttgggtgatagagtaaaattttgttttaagaaaagaaaaaggaaaagaaaattagaatcgttatatattgttgatgggaatgtaaaatggggtagttattttggaaaatagtttgttagttttttaaaatgttaaattagattttttgtatgatttagtaatttttttgttgggtattaatttaagagaaatgaaaatatgtttatataaagttttgtatataaatgtttatagtagtgttgcgtgtagtttaaaatagttaaaaaagtagaaatagtcgaaatgttttttagttgatgaatggataaataaaatgtggtttatttgtataatggattatttagtaataaaaaggaattaaatattgatatatattataatatatatgaatttcggaattattattttaagtgaaggaagttagatgtaaaagattatgtaatataggattttatttataggaattgtttagaaaaggtaagattggagagatagaaagtgattgtttgaggttaggtgggaatggggaatgattgcggaggagttttagggagttttggtgggttggggatggaaaagttataaaatttattttataattttgtaaattaattgaaaataatttatttgaaataggtgaattttatggtatattaatgatacggtaataaagttgttttttttaatggtgttattaattttagttttttgattttaagttgaaggaagagagatgttaggtgtgtttagtagggtttcgttaaagttgattttttgaagttatgggtagtatttcgagtaagatgtgttgtggtaggttaggttttattaacgtaggtttttttaataattgttttagtattgattgagtggttaaattaaatattaaaagttagtgtttttataaaaaggttggaatataataaaattttattaagagttttgtttagattttttttgggtttttaagtatgataaaataacgaaggaatttttaataggatttatttaggattaaataagttttattggggatttgaagaaattttttaggattttataaataagtttattgggggtttgaaggaattttttaaatttttatgatttaggagataagataagggttttagattaagtaaatttattgaggatttagaggaaggtttttaggatttagattttagttatagattaatataagttaattatttatgttttgagatgaatgtatatttatatatagatatatagtttagaaggtatataagttttggaaaattttgtaattttgagttggtttggagataatttttaggttttttttttgtaattggttatagaaataaaaattttttttttttttagtttatttgtatttcgttattgggtcgcgagagatagtagttttatttttagtttggtttaggaatagtttgatttttttttggttaatttttggtgagatttattagaatggaggagagtcgggattgggtgtattgttagtttttaaaatttttgtacgtggttttagttttttagggattatgatgggtgtgaaggagttgagtattttttaaggagttagtatatgatatttagtttatcgtttattaattatatttttatcgttatttttaaggtttttttatgttttttttttgtttttcgggggattattttttttgattttattattttgtttttttgttcgttttaataagtttgattgatttgtggagtcgggttttttttatgtgagtttttttttttggtatgtttgttttttagatttttatatattgggtttttcgttattggtgtttttaaggatattagtttattagtttttggttgtaggtattttttagtataggtttgtttgtttttattagtgtttaattaatattggttggatgattaaattaatatgtagaatgtgggtaatttgagaatgggtatttatttgttaggttttttaaagatttaattttttagtttttaagacgtttgttttgggtgcggttatgggttagagttagtgttagaattttaggagtatagagattaattgttcgattttggttttttaaggttttttgatatgagattaattaagatagtataattcgtggggtaggatagatttttggggtggtagttgtgtttattattttgattgggttaagatgtatttagttgtattttttatgtgcggtttattgtatatattcgttgaaatatattaagataaaaaagggaaaataaagattataaaggagggatagggaagaattcggaaggcgttggtagtatagggaggaggtaggtgtttgtagttagatttgagttttaggttttatttagttttttttgtttaggattagagtattgttttagatttttttaaatttgttttttcgtgggtgaaagaatgattcgggaagtatttatcgtttttttttgagaatttagcgatattgaatatagtgttgttttatagtaaatattgataaatggtgagtattattgagggtagggtttcgatttatattatattcggttttttttatgaattttttatttttttgtttttcgtttttttagggttgtattttcggggtaggagtttttattaagttaggttttagtatgttttattcgttatttgattttaaattaaagtaaaattttttttttagatgtgtatatagtatttttttaaattaaagggttgtgtgttggttttgggtattttattcggttttttttggtttttggcgttggggtttattggtttgtagtttgtatttcgtggttttgcgttttgtatttttttttttgaagcgacgttgttgtttgggtaaatatttaatttattttttggcgttaagaaaattaaggataggtgatttattttcggttttttaaagtgttggggttataggtttgagttatcgtatttggttgttttaataatttttttttaatttttatattatttgagggttcggggtatagttttttcgttacgtttggtattgaatttgtttatttcgttttttcgaggcgttttcgcgtttggggtatggaggttgttttcggttaattcgggcgtttggtcgtcgtgttcgagggaagggttggggggcgggtagggtagtttagagttttgttttagtttagggtcgggcggtaggtgttgaaaatagtagtttatggaaggcggggagcgtggaggggcgaggagaggttggagatcgttacggcgtcgagggatttcgtttttattaggattcggggatttcggagacgagtttttcgttaggtcgcgttatcgcgtttattttttttgcgggttttaggtatttatagcgcggtcgagtttatttgttcgtcggttttttaggacgtagggtttcggaggttggggcggcggtcggtttgaagtttcgtagttttgggcgtttttatttcggttcggttgtcgggtgtatttcgtattttttgcggtagcggttttttcgcgggtattcggggtcgaggtttgtatttatcggttagcgttcgtaatatttcggttatggtttcgcgtttggtttcggttttcgtttttcgttcggcggttttggggcggggtgagttcgaggcgttttttttcggttcgcgtcgttcgtcgtttcgatttttcgaggtcgaatacgggaggggatagaggggcgcgggaggcggtcgcgggtttttagggatttttgttaggaagggacggcgttttttcgcgcgtatttttaagggattcgcgcgtttttcgtggttttggtattttggggttttgttttcgtatttcgttttggggtcgagcggtttcgggtgtttttgaagtttcgttttcgggggttttttgatattttgtttttcgggcgggggcgattttttgatattttgttttttcggggaggcgggggagacgaattcgtgaagttgcggttttagaatttacgattttcggtttttcggttcgcgcgcgtcgtagtttgtagttttttagtttcgtaggattttgtgtttcgcgttcgcgacgtttttttaggtagagtcgttttttcggtttcggttcgcggttttacggagttttgcgtttcgtagattgaggaattttcgcgttttttttgcgagcgagttttttttcggcgttcgcgtcgggttttgaggttttttcgcgcggttcgtggataaagtttcgtttcgtttcgttacgattttcgtttttgtttggcgttcgttcgaggaagtttaggagagggcggcggcggttgtagggattgggagagcgcgtttcgttgcgaagaggagttatttttcgaagggttttagaggtttttttttgttttttttgatattttttagaggagtttatattgatatttcgtttataggattttgatttcgtttcgttttttcggggtatcgtttttattttcgtgaaagttgggggtatttttaatgtttttttttttttttattttaagtttagttcgttagtttcgagacgtgtttttaaatattatatagaattatcgtacgaggtcgggcgcggtggtttatgtttataattttagtatttttagaggtcgaggcgggcggattatttgaggttagaagttcgagattagtttggttaatatggtgaattttttatttttattaaaaatataaaaattagtcggtcgtggtggttcgagtttgtaattttagttatttgggacgttgaggtaggagaatcgtttgaatttgggaggtggaggttgtagtgaattaaaatcgtattattgtattttagtttgggtaatatagtaagatttttttttaaaaaataaaaataaaaataaaaatattattatcgtatgagttggtaattttgtttttgtgtatatatttaaggaattgaaagggggtttggaagagatatgtgtatatttgtgtttttagtaacggaatttattatagttaaaagttggaagtagtcgtggtgtttattaaggcgttatggttgtacggagtgagtttgtttttagatggaatgttttttagttttagaaagggaggagacgttgatatttgttatagcgtgggtgagttttgatgttttatgttaagtaaaatttagtttaataaggaaaaatgttatgcgattttattaattttttttttttttttttggtagagtttcgtttttttttttaggttggagtgtagtggtgagattttagtttattgtaatttttgttttttaggtttaagcgattttttcgttttagttttttgagtagttggtattatagatgtgtgttattatgttcggtttatttttgtatttttagtagagattgggttttattatgttggttaggttgttttagaatttttgatttaaggtgatttgtttgttttggtttttgaaagtgttgggattatagatgtgaattatcgcgtttagttataattttatatatttgagggattggagttattaaattcgtagaaatagagaggagaatggtgggcgtttggggaaggcgggaatggggagttgtgaacggtgttgagttttagtttgggaagatgaaaagagtgttgtagatggatgttggtgatggttgtataacgatgtgagtgaatttaatattatggaattgtgcgtgtttaaatagttgagatggtaaattttatgttatgtgtattttattatagtaaggaaggaagaaaggggaggatgaaagaagaaaaggggaaagaagggagggagggaggtaggaaggaagggaggaagggagggagggagggaagttttttgtgggtagtttttaattatttagagggataagtgggataagtttgggggttgtgtttttgtttttgagggattttggtttaaggtttttttgtttgtagattttattttaataggttatttttgagattgtagagttttggtggtttttaggtttacgattagggagttttatatggggagggtgttttttattttatttatttatgagttgagggttaggttgtcgtttagtattttggtgttatttgttttgtttgtggggttgagtgttttttttggacgggtttggtatatggaagagtttagtgattagttgtggatttggttttttgaggttgtgttttgtatcgtgaaggatattagaatatgttattttaaaatgagttttagaaattattttgagttgaaggtaattaagatgtagtagaagtagggaaatttttttttgttttgtttttttgttgtttgaggtaggatggaaattataggagagagacgtattagttagaggaaagaaggtattttagggttttgtgaatgaaattttcgttttagtttttttttaatatttattttgtcggttttttaaatttggaagtttaaaatcgtttttttgggttttgttatttttttatacgttgattattttttgttgaagttgttttataatttagttttaagttattgttttgagttgttttttgttgaagtttttttagtgaggtgtattatatgtattaatgaattgttttttttttttgtaaggagttttagttggaattttaagaggagtagagggaaatttttatttttttattatggtatagtggtttgttatgtttagggttgggggttagttcgggtttttatattttttggttgattttttagtttcgatttttcgttttattagtttattgtttttataaaatatttgttatggcgatgtgtaaggagttttttgttattgttttgaattttttttttgaaagtagttagttagtgtttagaggaagggaaggaataaaaggttttgtaaaggagagttcggttagattaggaggtgtaagtatgaaatcgatgtgttatttataagattaggaggtgtaagtatgaaattgatgtgttatttataagcggttgggttagggaaggatttggtttagaagagggaatagttttgtttaaggttttgtaagtttgtggtttaaatttaggtttagggagatttttattttggtttgtatgtgttggaaataagtgttcggtgtagcgaaaagaaattcgtatttagaaaattttttagtaagttatttttatttttgtagaagggtgttgtttgtgtttgttataattttaagagtatattgaataaaggagggaaggggtttttatttttaatgtagtttttgtttttgtgttttttttttattggttggggttgggtcgtataatttaagttgatttcgataggttaatgtttaaatttttttaaataaggtaaaggtgtgatttttgaaaaggttgtaggggtaggatttgtttttaagttatggttaggaagttgaatttttgaagaggaatttagttgttttaataatttttttttttttgttttatagttttttttttttaaatttatttaataggagttggttttgttgtttttttttattatttaggagtaagagtttatttgattatggatggggagaggtgggggaggtttttgtgagagttgtttttatgagtttttgggttaatttacgaatataaggtatgatatagtagtttataaggatgagtatatttgtaattgttgtaagggaggtaaatatttaggttatgagttttttttattttttaaattatttttttatgatatttgtaaaggggttatttattttagagttttcggttaatttatttgttagggtggtaaggtttgtaaggtttttgtgattgttttgtttagggttgtgttattggggataaaagtgtaatattggattttaattatgatatagatttcgtttttttttggttaatattatgttaagggttattttgtttttttaggttatttggttggtagggtttaattgttgagttattttttttatggtatttttggtgtaattgatgaattattgttgattatagtatatataatgtatttagtttatatttttgtttatagtggattattagaataatatagatttaaatttggtggttatttggtttcgagttttgaatttattttgtattttttagcgtaatttcgatattgtttatgtaaatatgagaggttaaaggattcgtgaggggtttttttttttttttgggttatttgttttttgtttggttgttgaaatgttaaggtgaaagggatggttaattggatcggagtgtaaatgttgttttaattgtttggtagagtatttaatattggttttttataatattattgtatatttgtttggggatggattagggttgattgattggttagtttttggaaaggtttaggtttagtatattttattaggttttcgaggaacgttagattttttttttgttatgagagatatgaggtaaaattggtattaagagttggaagtcgaatggtttttgggggttgtttcgtagggtttttgatttttgggaaaattggtggttttggtaatttgagggtgtgatttttttggtaaggtggatgtaaggtttt

SEQ ID NO: 9 - DNA, 10006 bp, Artificial Sequence
  chemically treated genomic DNA (Homo sapiens)
ttattattgggattgtggattatagatttttatttgagaggtatttttgttttggaatgggatattaatagaagttatttttatgattggaggatataaaatgattttgatatttaaaatatatatgttgtttggagtgatgttagagaaatattttaacggggatagtagtgtttagaagagtatataataaaatgggaatggattttgttatttgaggagtgtaaagaggatatatttatgagttgcgagttttttttttttttaggattcgattttggaattggtgaggagttgttggatattatagtatttgataaatagttttaatttaagagttgtttggtttgtggatggtagttttaaggttattaggtaatattttgtttggaaggtattattttgattgaagaagagttaagaaaatttttttgttttgagttttttataatttataatgattaagtgtatttttgtaagtaaaatttgtttttttttttatatgagtttttttaaatttgaaaattatttgtgttattttatggtaatatagttatgtatatatgtttaatatgaatgtttttttttgtaataggatataattggagatatattattttattaaggttttgattggaatggtttatttttagatatgattaatttgtttggggatttgaagttgattgtagagagttaataaaaagtttatggaaagattggttttttaagaagttttttgattcgtggtaagtaatgaatgttattttttaataggattagaaattttaagatattttgagattttaagaagagagaaatttgtataggtattataaatgtagtttaatggtgaatttttggttttgtttttggcgttgaggttttaaaatattggaataaaaaattttgatagttttagtaaagttaatttaaaaggagtttatatggttgattattatttttgttataatttatttaaataattaggttaatataatgagataaatttattttgtaaataaattggttttagtataatttatttttggtagaaataagaaaattggagaaaaaaaaattttagattttagttttgattattgtttttgagtttttataatttgtttataatttggattaaattttgaattattttttggttataagaagtttttaaaaaggaatttggttttaattttttttatgatgtttttagttggttgtttattcgaataggttttttttatttttgttttggtatataaatttttttttgattgtaatttttgtgtggattgtatttttattatttaaattattgatgttatgtattttttgttgttttattttcgagaaaattaaagttatagtattttgaagattagagaaatttaacgaagtttgttaattttttttgtttgaaattttaaggagtatgttggtaatgagaaattaatatggtttagtgggattttaaaggttttgggattattgtaaaaaagaagggtgcgtgagagtttatatatgaattagtggaatgtggaggataaagtaacgttatttaggatgttaatttattatgtggattttttttgttttgggaaggtttttaagattttttttttttttattgttttttgtgtaaaagtatgtatttattgtaaattttgtttttagattaagataattttgatgttattgtattttaattgttttatatgttttttttgagttattttttttttgtggtatataatttttgggtttgaggggtaatggtattgggatttattattttgttttattgtcgtttgagatgtagatagggtttttgtttttaagtttttattaaatgtttttttttgagaaacgttaatgtgttagtttttttttttagttttttagtttttttagattttggagcgtaggtttgtatagttttgtttattttgaaatagatgggttagggagaaggaatattagggagacgttcgaattattttatttaaaaatgtagagaagttttgtgaaatagtgtttaattaataaaaaggtattttttgagagatggttttatttttattattggtaaaaatgtagatgaaagattgtttggtatgatgttaaatattattttataaattattttttaattgtaaagggaaaattataattttattatagaaagaattgtttgttaataattaaatgattaaatagtattgttaataaagagttaaattttgtaaaatatttgaagagatttatttcgagttaaatatgagtgattatggtttacgatatagtttttgggagattttgagaatatgtgtttagggtggttggggtgtaggttggttttatatattttagggaaatatgagattttaattaaatatatttaagaaatatattggtttagtttagaaaaataggataatttgaagtaggggtggagttgggggggtaggcggggggaggttttaggttataggtagatttaaatattttttggttgatatttggttaagtttatttaaagatttggaattaatagaaaggaaatgtttgggttaagattaaaggattgtggagattaaagtttttattgtgtaaaggaagtttttaggtgagaatagaaaagtattttgttattttttttttttagagagaagagattgtaaatgttttttattagatttaaggtttgtgttgatgttaatattattgaggtataaagaggtatgtttaatttttattttttattatggtttgaagtagttttttaggttaaatttaaattttagagtgttttagtttacgagaaagtttatttagatagttggggggaatttagaattttgtttttggtttatagtaagtttgtttaatttgttgtttatagattatatgtaatttataggttatatgtagtttaggatagttttgtatgtagtttaatataaatttgtaagtttttttaaaacgttatgaaatttttttgcgtttttgttttggtttgtagtttattagttaatattagtgttagtgtattttatgtatagtttaagataatttttttttttttagtgtggtttagggaagttaaaagattggatattgttggtttatattattattaatagtgggataaatttgatattaaatgttttttaatgtaatataatattaattatatagtatgatttttgaagtatttttatttaatgtttaatttgaattttttaagtttttggtaatttgtaattgataggaaatataaaatttagaggtataaaataaataaaatcggataatttagtattagggtattttttatgataattgtttggtattttaaatttgtttaaaaagatagttattattgggaaaaatgaattagattaaaagttttagattaaaagaagttaaagaaagttaaagtttaattttaatgggtaattatttataggattttggtttaaaaataaattatttataaaaggtattttggagataattggataattggagaaatgtaaatattttttggattttaaataatagtagcgaataattgttaatttttattgatgtgataaaggttttataggaaatggttatataggaaaatgtttttgtaggagatatatagttaaagtattttgaattgaagtgttttatttataatttatagatttgagaaaaataaaatttattatttatatatatatatataggtatatatataaatatataaataaatatggaaaaatatttgaatttaggtgataatgatattgagaagaaattatttaggtcgatagtacgagtatgggagtttttagtgtaaaaagtgaagtagaggtttttttttaaatggattttttttttcgtttaattaggaataaatagtaattttttttaaaagtaaaatttatttaaagaattgtgttaatatattggaggtcgaaataatgaggttcgtgattaatttagtatattattggaggttatatgagtaagtagtaaattgttttttataaatgtagaacgttggcgaattgataaattgcgtatgttatttaggaggattgttgagggtagttacgatttaggtataaatgttttttatgattaggtataattgaagtttgttagtaataatatgaatttgtgattaattaagtagttgattaatcgttattattttttttttgtttttgttatttaaaaaataggaagggttgtggaagttttgtggttgtttttgtttacgagaagtagggagttttttttttttttttttggttttttttttaaaatagttttttttgttttaagttattatttttacgttcgtttttttatttgattttataatgatggttttaagtagtaatagtagtaattgttgtaacgatggttttaagtagtaatcgtggtagttggttatattaatattttttgatatttgttggtcgtaataaagaaattaatgtattttgtgtttttagttgttatattttagtttagatatttgttttggtatgtttatattggtttaaggaagtattaggttatagtttgtttttttttttatttggaggtgtttttattttttttagtattttataagttgtttttttttttttttgtttttttttgtttttgttttttttggaaagttttaagttgttagttaattaggataagtatagaggtttttttttagttaatggaaatcggatacggtagtagggtgtacgtgttaggttataaatgattttgttttttttatgcgtgtgtgttttcgtggtaagattattagcgagcggtaatttttttgtagaaagtaaattagttttgttaagagtttttttgttttagtgttgatttttgtaatattgagcgttcgtttttaatattagtaaggtttttttttttaatgaaaagtagttttaaatttttttttaagagtagtttgtgaagtcgagttgtaggtatagataaataagggggtagtttgtttgggtgaatggtggtaggaattatcgattagatatgtttaagatgagggttttattttcgtttttttgttagttacgtgtatagtaagaaggggttataataggtatatgggtgattttgtgtttttcgtttattttttttgtgtttaaaatgtttagaataagaaattggaataaaggagatatgaatagataatttttaattatttttaagagttcgttttgtgttttatttattattattattttgaaggtttttttgtttatattaggataaatttagttttttatttttttttcgaatttttttggtatttttattttgaatatagcgtttaattaatattttgttttgtatttaggattaatatagtataaatttttagaagataaagtaggggaatataataataggatatagaattttaatagttaaattagatgaatttatgggtgatttttattgggtaaaagaaaatgttaagttagtataagatttagtataagttattattttaaaatttagggttttattggaagagaaagtgattttaggtagaattttttagggagatatttatttttattattcgttgaattaggagttttggatagtttcggattgtatcggtatatttaaggatattatattagcggataagttataaatagttttgggaatacgcggaaaggttaaatttatttaaataattaaatttttttttaaattttaaggaaatataagtatgttttcgttttaggtagggtatttgagagtaaaatgtattaatattttgaattcgttaagtagatacgatttgggtttgatcgtttttttcgggtaaaggtgaaggttgattacgggggtcgttttttttttaggttttagttacgttttttaatttaggttttcgttttgtatcgcgtcgtaagtttttttatcgtttagcgtaatcgggtttttttagtttcgtcgtcgtttttttttttcgtttcggtttttttttcgcgttgcggttagtttcggcgttttatagagagggttagaggtggaaacgtaagaaaattaaattaggattattagagattgttcggagaggggatgcgatttttttttaggtcgtagcgacggcgtacgtaagggttacggagtatgcgttgtttattcggcgtcggggatcgttgttatttcgtttagcgtagcgtttcgttttttcgtagtttaatcgttttttttcgtttcgttttatttcgtttacgggttttagtgggcgggattagaggagtttcgcgttcggggagtatgttaaggtcgtgattcgtgtattattgttcgagtggtcggaacgggagttaatatggtagcggggttcgggcgatgttgtagggtgagagggagtttagcggtgcggtggggttggaatatgggtattgtggtgtcggagtagggggtcgtgggttaaaaataggtgcggtcgggaggagtgggaagtcgggttgaggaaggagttagtttaggggtttttaatttgtttttacgttttttattatcggacggaacgtagtttagcgtttaatttttcgtattttttcgttaggcgatttcgttatagtcggtattttttttttagaatatcgtttttttttttttggtaaattttttaaatatttatcgcgggaattttatttttttttaaagtgatttcgtttttgtgttagaattacgggaaaaagaaaaatggagtagttattttttgaaatatttaatgtttaataagtttttcgttgtaacgtttttacgttgtttacgggaaaaaaaaagtaaaaaaaaaaattttttgtagaattttatgtgaatttgtgtgtgtattttagtattggattttaatagattttaaataagtttgttattagatgaatttggtattttaaatatttttgatatgtttatattattgttatttagatgttatttaaaattaagttaaagttatgttttggattaaaaaagttgcggttttagaataattttaaagaattgttgtttatgttttgttggtgttatgtaagttaatgtgtagtgaaggtagaaattgggagattttagttatttttaatttttatattagaaaagtagattttttaatttttaaggaaggatttaaaaaaaatttgatatagaaaatttatatttttttttttttttttaatttataaaattgatatttttatatttttaagaaatgtataaaagtgtttaattttagtggtgttgtttcgatatttggaattttattgttttagatagagagttcgaagtaataaaattaatagttatatagtattaggtttttaaaatattatcgtattttaatcgttcgaaaatacgtagtgagattagttttattttttggttttgaacggaagttataagtagtttgtaaatttgtttacggttataaatatggttgtggaatttagatttatatttagtaattataattttagatttcgtgttgtttttgttttttatttgtaaattatttttttaattaattggttaattttgttatgtaattaataggttgatgggtattgtattttggtaatagtaatttttgtattttgttttatgtaatatatttttttgaatagttatatgtgaagtgattttttttttatttaaattttttcggttggttaggtgcggcggtttacggttgtgattttagtattttgggaggtttcggcgggttgattatttaaggttaggagttcgagattagtttggttaaagtagggaaattttgtttttattaaaaataggaaaaattagttgggtatggtagtatatgtttgtaattttaggaggttgagtttgtagtgagcggagatttttttatcgtattttagtttgggtgatagagggagattttgttaaaaaaaaaaaaaaaaagttttttagtagattatttaatttggtttgagttttgatttttgtgtatggtatttaaaaacgtatttataatagagttaggttttttgttttgatttttgtggaatgtttttttttgttatggaatttagtgattaattaggatattaatagaaagattagtatagtaaggtggttaatagtatgcgtttttgatagtaaatgttagaattttggttgtattaatagtagagtgattttgtttaatttagttgattttttgagttttcgtttttttatatgcgaaagtggaataaaagtaatggtttaattttagatttgatttgggatttagtgaattaatttgtgtaacgcgattgtaaattagagtagatttggtttgtgattgttggataataagtattagagaaattgttttatttttttttttttttttttttttgagacggagttttgttttgttatttaggttggaatgtaatggtgtagtttaggtttattgtaattttcgtttttcgggtttaagcgatttttttgttttagcgtttcgagtagttgggattataggtgcgtgttattatatttggttaatttttgtatttttagtagaaatggggttttattatgttggttaggttggttttaaatttttgatttcgtgattcgtttattttagttttttaaagtgttgggattatacgtatgagttattttatttggtattgttttatttttaaaataaaattaatgaagatgtaaagaaaatgcgagtttttatattttgtatgtttttattattgtagtatgaggtatgttatttggaaagtattgttttaattataaatatttgatatttttaattatattgttattttatatgtaggaattcgttttttataagttgaaattgttatttataaagatagtttttttttacggattttgaaaaatataagaatttaaataaagaaattttagtatattttttagttgttttttttttttagtatttaagtttgttaaaattgttggatagtttaattaaaattttttatagtgaaaattgtgtaattttgattgttttgaaatttttatttaagaatattattgtggtttttagtttggtagttttaataaatgtaaatttttatttttgtatttattaagttgttatgaatataaaaatgggttgtaaaataataatatatgtatatttgattgtttttttatatgtttttttgaagaaatatgattatattttagattttaagataagtagtgtattagtagtttagaagagggatggtaaacgtgtttgtaaaggaacggatagtatatgtttttggttttgtgaattagatggtttttgtggtaattatttagatttgttgtgaaagcggtaatagatagtatgatgtggttgttttggtttggtgattttttgtttagaatattgtaagaatttttgtagatagtagaaaatatagaatatggttttatgttaatttgttttgttagagtggggtattttaaaaaatgagattttttgaggggaaggtttttagaggtatgtatgggaggtttatagtgatagggtattaaagttgatggattaggtaatttttgaatatagtatgtttatttttagtttatcgttttttttattttaattttttaattattaatgttttaggagtttgtaagatatttagaatagtggttttatatttattattatttttgattgttgtttgttttaaattttttattttagtagtataaatattattgattttatttttattattttttaaaaatattttttttgtaataggaatttatataattgataattggtttatttaaattatgattgaaggtatttaaatagtgatgattttaaaaattatgagtatggttaaattagttgttgtatttatttatgattattagtagttttttatttgattaatgtttaatttattaaatttattttaataaaagtgttttttatagg

SEQ ID NO: 10 - DNA, 10006 bp, Artificial Sequence
  chemically treated genomic DNA (Homo sapiens)
tttgtaaagaatatttttattaaaataaatttgataagttaaatattaattagataagagattattgataattataagtgagtatagtaattggtttgattatatttatagtttttaaagttattattatttaaatgtttttaattataatttaaataagttaattattagttatataaatttttattatagaggagatgtttttaaaaagtaatgaaaataaagttagtggtatttatattattgaagtggagggtttaggataaataatagttaagggtagtagtagatgtaggattattattttgggtattttataagtttttaggatattaatggttggagagttggggtggggagaacgataggttggaagtgaatatattgtgtttaagagttgtttagtttattaattttgatattttgttattgtgagttttttatgtatgtttttggaaattttttttttagaggattttattttttaggatattttattttaataaaataaattagtataaaattatgttttgtattttttgttgtttatagggatttttataatgttttgagtaaggagttattaaattagggtagttatattatgttgtttattgtcgtttttatagtagatttaagtagttattatagagattatttggtttataaagttaaaaatatgtattattcgtttttttataaatacgtttgttattttttttttaaattattaatatattatttgttttaggatttgaaatatagttatatttttttaaaggaatatataaagaaataattaaatatatatatattattgttttgtaatttatttttatatttatgatagtttaatggatataaaagtaaaaatttgtatttattaaagttgttaaattgggaattataatggtgtttttgagtaaaggttttaggatagttaaaattatataatttttattgtaaaagattttaattgaattatttagtaattttaataagtttagatattaagagaaaagagtagttgaagaatatattaaagtttttttatttaaatttttatgttttttaaaattcgtaaaaagaaattgtttttgtagatgataattttaatttataaaagacgaatttttatatgtaaggtgataatataattaagagtgttaaatatttgtaattgaaatagtgttttttaaataatatattttatattatagtaataaaaatatatagagtatgaaaattcgtattttttttgtatttttattaattttattttgaaagtgaaatagtgttaggtggggtggtttatgcgtgtaattttagtattttgggaggttgaggtgggcggattacgaggttaggggtttgagattagtttgattaatatggtgaaattttatttttattaaaaatataaaaattagttaggtgtggtggtacgtatttgtagttttagttattcgggacgttgaggtaggagaatcgtttgaattcggaaggcggaggttgtagtgagtttagattgtattattgtattttagtttgggtgatagagtaagatttcgttttaaaaaaaaaaaaaaaaaaaaaagtgaaatagtttttttggtgtttattgtttagtagttatagattaaatttattttgatttatagtcgcgttatataggttaatttattgaattttaggttaagtttaggattaagttattatttttattttattttcgtatgtgaagaaacgaaggtttagaaagttaattaaattaggtaaagttattttattattagtgtaattaggattttaatatttattattaagagcgtatgttattaattattttgttatattgatttttttgttagtattttaattggttattaggttttataataaaggaaaatattttataaaaattagaataaaaaatttgattttattataaatgcgtttttaaatattatgtataaaagttagaatttaaattaggttaaatggtttattgagagattttttttttttttttttgatagagtttttttttgttatttaggttagagtgcggtggagagattttcgtttattgtagatttagttttttgggattataggtatatgttattatgtttagttaattttttttatttttagtaaagatagggtttttttgttttggttaggttggtttcgaatttttggttttaagtgattaattcgtcgaggttttttaaggtgttaggattataatcgtgagtcgtcgtatttggttaatcgagggaatttaaatagggaaaaagttattttatatgtgattgtttaggaaaatatgttatatagaataaagtgtaaaggttgttattattagaatataatgtttattaatttgttaattatataataaagttagttagttaattagagaggtggtttgtaaatagaaaatagaaatagtacgggatttggagttataattgttgaatgtgaatttaggttttataattatatttgtggtcgtagataggtttataaattgtttatagttttcgtttaaaattaaaaaatgggattaattttattgcgtattttcggacgattaaagtacgataatgttttgaaagtttaatgttatataattattggttttattatttcgggttttttgtttagaataatgaaattttaaatatcgaaatagtattattagaattgaatatttttgtgtattttttgggaatataagagtgttagttttatgggttaaagaagagaaaaagggtgtaagttttttatattaggttttttttagatttttttttggaggttgagaaatttgtttttttggtgtaggagttaaaaatagttgaaattttttaatttttgtttttattgtatattaatttgtataatattagtaaaatatgggtagtaattttttaggattattttaaaatcgtagtttttttggtttaagatataattttaatttaattttaagtgatatttaaatggtagtggtgtgaatatattaagaatatttaagatattaaatttatttagtgataaatttatttagaatttattaagatttaatattagaatatatatataagtttatataaaattttgtaggaggtttttttttttattttttttttttcgtaagtaacgtggaaacgttataacgaaaagtttattaaatattaagtattttaaggagtagttgttttatttttttttttttcgtggttttgatatagagacggggttattttggaaaaaggtgggattttcgcggtaaatatttggagggtttattagagaaagaaaaacgatattttaaagagaggatgtcggttataacggggtcgtttgacgggaggatacggaaaattaaacgttaggttacgtttcgttcggtggtaggaggcgtgaaagtaggttgggggtttttaggttggttttttttttagttcgattttttatttttttcggtcgtatttatttttggtttacggttttttgtttcgatattataatatttatgttttagttttatcgtatcgttgggtttttttttattttgtagtatcgttcgaatttcgttgttatgttggttttcgtttcggttattcggataataatatacgggttacggttttgatatatttttcgaacgcgggatttttttggtttcgtttattggagttcgtgggcgggatggggcggggcgggaagaggcggttgggttgcggaaggacggggcgttgcgttaggcggggtggtagcggttttcggcgtcgggtagataacgtatgtttcgtgatttttgcgtgcgtcgtcgttgcgatttggggaggggtcgtatttttttttcgggtaatttttgatagttttggtttggtttttttgcgtttttatttttggttttttttgtgggacgtcgaggttgatcgtagcgcggaaagagagtcggggcgggggagggggacggcggcggggttgggagggttcggttgcgttgaacggtggggggatttgcggcgcggtgtaggacgggaatttgggttagagggcgtggttggggtttggagggagagcggttttcgtggttagtttttatttttattcggagagaacggttaaatttagatcgtgtttgtttggcggatttaaagtattagtatattttgtttttaaatgttttatttaaagcgaaagtatatttgtgtttttttaaaatttaaaagagaatttaattgtttaggtaaatttgattttttcgcgtatttttaaggttgtttatgatttgttcgttgatgtggtgtttttggatatgtcggtgtaattcgaggttgtttaaagtttttggtttagcgaatgatggaagtgaatgtttttttgaggaattttatttggagttatttttttttttagtgagattttgagttttgagatggtagtttatattaaattttatattaatttaatatttttttttgtttaataaaggttatttataaatttatttaatttagttgttaaaattttatattttgttattgtatttttttattttgttttttgggaatttatattgtgttagttttaggtataaggtagaatgttaattaagcgttgtatttaaagtgaaagtattaggaaaattcggaaaagggataaagagttgagtttgttttggtataggtaagaaagtttttaaagtggtggtggtaagtaaaatataaagcggatttttaaagatgattaggaattgtttatttatgttttttttgttttaattttttattttgaatattttaaatatagaaaagatgaacgaaaagtataaaattatttatatgtttattgtaatttttttttattgtatacgtggttggtagagaagcgaagatggagtttttattttaaatatgtttagtcggtagtttttgttattatttatttaagtaagttatttttttgtttgtttgtgtttgtagttcgattttataggttgtttttagaaaaggatttggggttgttttttattaaaaagaaaagttttattgatgttgggaacgggcgtttagtgttgtaaaaattaatattgagataaaggagtttttagtaaggttagtttattttttgtagaaaggttgtcgttcgttagtagttttgttacgagagtatatacgtataaaggagatagggttatttataatttgatacgtgtattttattatcgtgttcggtttttattggttggaaggggatttttgtatttgttttgattggttagtaatttagaattttttaaaagaggtaaagatagaggagaataaaggaaggaggaagtaatttgtggaatgttgagaaaggtaaaaatatttttagataaggaagaaaataggttatggtttaatgtttttttggattagtataagtatgttagggtaaatatttaggttaaaatgtggtagttaagagtataaagtatattgatttttttattacggttaatagatattaaagaatgttagtgtggttaattgttacggttattatttgagattatcgttatagtagttattattgttattgtttgagattattattgtgagattaaatgaagggacgaacgtagaaatgataatttaagataaaaggaattgttttaaggaaagggttaggggaagaagaagagagttttttgtttttcgtgagtaaaggtagttatagagtttttatagttttttttattttttgggtaataggagtagggaggaggtggtaacgattggttagttgtttaattgattataggtttatattgttattgataggttttaattatgtttaattataagaaatatttgtgtttagatcgtaattatttttagtagtttttttgggtggtatacgtagtttgttagttcgttaacgttttgtatttatgagaaatagtttgttgtttatttatatagtttttagtgatatattgagttgattacgaattttattgtttcggtttttaatatgttagtatagttttttgaataaattttgtttttaagagaagttattgtttatttttaattagacggaaaggaaagtttatttgaagaggaatttttattttattttttatattgaggatttttatattcgtattatcggtttgagtaatttttttttaatattattattatttagatttaaatatttttttatatttatttatatatttatatgtgtatttatgtgtgtgtgtataggtggtaggttttattttttttagatttgtaggttgtagataagatattttagtttagaatattttagttatatgttttttataaggatatttttttatataattattttttataaaatttttattatattaatgaaaattaataattattcgttattattatttaaggtttagagaatatttatatttttttagttgtttagttgtttttagaatattttttgtaaatagtttgtttttgaattaggattttatgaatgattgtttattgaagttgggttttaattttttttggttttttttaatttaaagtttttaatttaatttattttttttaataataattgtttttttaaataaatttaagatattaagtagttgttatgaagaatgttttaatgttggattgttcgattttatttattttgtatttttagattttgtattttttattagttgtaagttattagaggtttgaggagtttagattaaatattggataaggatattttaaaggttatattgtgtagttaatattgtattatattaggaggtatttaatattagatttgttttattattggtgatggtgtaagttagtagtgtttaattttttggtttttttgggttatattggaagaaaaagaattgttttgggttatatataaaatatattaatattaatgttaattgataagttataaattaaaataaaaacgtaagaaaattttataacgttttaagaaagtttataaatttatgttgggttgtatgtaaagttgttttgagttgtatgtggtttgtgggttgtatgtggtttgtgggtagtaggttggataagtttgttgtaaattaaaaataaaattttaaattttttttaattatttgaatggattttttcgtaggttagggtattttaaaatttaaatttaatttgaaagattattttaggttatgatgggaagtgggggttggatatgtttttttatattttagtgatgttaatattaatatagattttaagtttgataagaaatatttataattttttttttttgaaggagagagataatagaatgtttttttgtttttatttgaaggttttttttgtataataagaattttggtttttataattttttaattttaatttagatattttttttttgttggttttaggtttttagataaatttaattaagtgttagttagaaaatgtttaaatttgtttataatttggaattttttttcgtttatttttttagttttatttttgttttaagttgttttgtttttttgaattgaattaatgtattttttaaatgtatttgattgaagttttatatttttttaaaatatataaaattaatttgtattttaattattttgagtatatgtttttaggattttttaaggattgtgtcgtgggttatgattatttatatttggttcggaataaatttttttaaatattttataaagtttgattttttgttgataatgttatttgattatttgattattgatagatagttttttttatggtaaagttatagttttttttttgtaattaggaagtaatttatagggtaatatttggtattatgttaaataattttttatttatatttttgttagtagtaggaatagaattattttttaagaaatatttttttattaattaagtattgttttataaaatttttttatatttttaggtgaaataattcgaacgtttttttggtgttttttttttttaatttatttattttaaggtaagtaggattatatagatttacgttttaaagtttaaggaagttgagaggttaaagaaagaggttgatatattaacgttttttaaaaagaaatatttaatggagatttaaaaatagaagttttgtttgtattttaggcggtagtgagataagatggtggattttagtgttattattttttagatttaggggttgtatattatagggaaagggtgatttagaagggatatgtaggataattgaaatataataatattaaagttgttttgatttaagggtaggatttatagtaagtatatgtttttatataagaaataatagagagaggggaaattttagaagtttttttagaataggggaagtttatatggtggattaatattttaggtggcgttgttttgttttttatattttattaatttatgtgtagatttttacgtattttttttttttgtaatggttttagagtttttgaaattttattgggttatattggttttttattgttaatatattttttgggattttaaataagggagattgataggtttcgttgaatttttttagtttttagaatattatgattttagttttttcggaagtaaaataataaaagatatatagtattaataatttgaatagtagaaatataatttatataaggattataattagaagagaatttgtatgttagaataaaaatgaaaggagtttattcgagtaagtagttaattaaaagtattatgaagaaaattaaaattaagtttttttttagagattttttgtagttaggaaataatttaggatttagtttaaattataggtaaattataaaaatttaaaagtagtggttagggttagaatttaagatttttttttttttagtttttttatttttattaaggataaattatattaggattaatttatttgtaaaataaatttgttttattatattggtttggttatttgaataaattgtagtaggaatagtgattagttatataggttttttttaagttggttttgttagaattattagaattttttattttagtgttttaaagttttaacgttagaagtaaagttaaggatttattattagattgtatttataatatttgtataaatttttttttttttgaggttttaaaatattttgagatttttgattttgttagaaagtgatatttattatttattacgggttaggaaattttttagggaattagtttttttatgggttttttattggttttttgtagttaattttaaatttttaagtagattgattatgtttgaaaatagattattttagttaaagttttggtaaaataatgtgtttttaattgtgttttattataaaagaaaatatttatattgaatatatgtatataattatattgttataaaataatataaatagtttttaaatttgggagaatttatatagagagaaggataaattttgtttataaaaatatatttaattattataagttataaagagtttaaaataaaaaagtttttttgatttttttttaattagagtaatgttttttaaataggatgttgtttgatgattttggaattgttatttataagttaagtaatttttaggttagagttgtttgttaggtattatggtatttagtaattttttattagttttaggatcgagttttaggagagaaagaggttcgtagtttatgagtatattttttttgtattttttaggtagtaagatttatttttattttattatgtatttttttgggtattgttattttcgttagagtgtttttttgatattattttagatagtatgtgtattttaggtgttaagattattttatgttttttagttatagggatagtttttgttaatgttttattttaaggtagaaatgttttttaagtagaaatttgtagtttatagttttagtagtgg

SEQ ID NO: 11 - DNA, 6164 bp, Artificial Sequence
  chemically treated genomic DNA (Homo sapiens)
  unsure 1909: n is a or g or c or t
atttttagatttttttcggggaggttttataaaatgatagtggtgtttttagtatatgtgatatgtggttagatttttgatagtattagtttttaggggttaatttggtttatgttgggaggatatgtttacgaattagtagtagttttttaaaggagagatttgatttttttttgtattgtatagtttggaggattggtttttgatggggatttgttttcgaagttttttgtatattttttgtttaggagggtttttttatttatttttttattgaagtagtttttggaatttttttggtggattagagttacgtaatgtagtttgagtttttagattgttagttagaattgttttaggtgtttagaaagggtaaaataggttgatgtggtttgttagagtgatgtgtttttaaaaaagtttatttgtatatttgtgggttgtttttgtttttagatttttagtggatagattttataaattttttgatgagacgattgatgtggttagggtttagttagtattagtagaaggatgttattaggaaaggtttaggtatttggtaagtgattgtgaggtgttatagtatttgtgataggagagtgttttgatgtgtttgggagaaaggtcgtatgggggttagggatggaagagatagtgtgtggttatagaaatttttgtttatttattattagtgttgttttttgtgtgggttttagggcgagtggtttcgaattttggtttagtgttttgttttaggttagagttttggtaatgttatatgttggtagtttttttattgagaaggttttagtttatttttgtgtgttggttttggatttagtttcgagagaggggagagattattttttttgtggagtgggttttttattattagatcggttatttttagaattggcgtttattgtaaatttaggtgttttacgtgtggttttgttttttatgttgtaggggaaagttgtattgttattgtttttatttttttattggtagaaagatgttagggttgttagtattgtttttttattttttgttttttattgtggttttttaaatgggatttgtatgtttttgttaagcgtaataataattttttttttttttgatagaggtttaggtgggatagtttttattatttgatatttgagtattatttgggatgtggttttggagttgtttagagttgtgtttagtagagtgtgttttggaaatatgtttttgggtatattgtatttgttatattagtgggttattttttatttgtagtgttcgtttttgttagaaagaggatgtggaggaaggaggaggtgggtaatttggtttgagttgtgttgtatttttttttttgttagtttgttttagttttattggagattatttgcggatagtgtttggtttatgtttagtaggatagggttttgttgtttttgaaagtttggtgttttgtatttggggttgtgggtttttgtgtttagttgtttaggaaattttgagaagtattttattttggggtgtaaattagtatgagtttgaaatttaagcgtttgtatttgagttggggagagaattgtaaggtatattttttttgaaagtaatagaattatttaggttgttatgttattaaggaatttgaattgttgatagtagttattttgtgggtgatataatgggaggcggtaaaaaaattatttgtataggagattttgttttttgttaagagttgggagtatattttattagagtagtaggtttatttggtgttagagggtttgttttttttgtttttgtttttttgttttgtagttttttggagagagtttttttttttttgtatagtttttgggttaaaatgtttttttagtttttttaaagaagattcgagtttatnttattttatgttttaagaggtaaaaggatataataagtgaaagaagttttgggttaaagtaggttatgtttttttatgtattatttaatattgttttgtagagaaaatattttttaagtatgtgttttttgaagatattttagtttttgggttatttgatttttaatatatagggtggaagaatgtgattttggggttgattataaattggaaatttgtgaaatggtagtgattgggtaatttttagtttatttttttagttgaagtggaatttatttttggaatggatttaataggttgtgtttaatgtataaattgggtgagttttgttttagtgtgttttgttttatcggtacgtttttaggatattttttttttttttgtaaagttatttttttttgatggttagtgttattatgatgttagtgaggtttggggatgaggatagtgtgttttgaaatttataggattgattttttattttagtgtacgaggatttttgtggtattaggtgttgttgtatttggtgtaggagtttaattattgaattattgtgttatttatattttatgttatagaatatattagttttaagaaggatttggtggaggtggatttattattggttttataaaggatcgtgtaaagttattgaagttgtgaaagtttatttttttttttgtaaatttattttttatagaatataagaaatattaatgatttgatttgtttttttttttttttttcgttttttttaaaattatattttagtttttattgtttttgtgtttaaagtaaattaggtgatttatttgtataaaatgttattttgttatatgagatagtaataaaagaaagatttttatagtacgtttttttcgttttgttttttgattgttgggttcgttgtgttgttgaggggagtaggggcgaatgggggttttaggttttttttattttggttattatgtggtttttttgtaagtagttgaattagagtatagttggtttttagggtgattgaggaattgtattggattttaggtttaatatttttgttttatatttttttagggtgagtggttttgtaaattgaaagtttatatgtatgttttaaaggtagggtttttttttttgagatggagtttcgttttttttttttaggttgggatgtgatggtatgatggtggtttattgtatttttcgtttttcgggtttaagtgattgttttgttttagttttttaagtagttgggattataagtgtatgttattacgttcggttaattttgtatttttggtagagataggtttttttatgttggttaggttggttttgaatttttgattttaggtgattaattcgttttggttttttaaagttttgggattataggtgtgagttattgtggttggttataaaggtaggtttattaagaaatattttaattatagtaaaatttattttaattaagagtattgatgtattttgataaatgaatatttttattatttattataattatgatataggatatttttatcgtatttatttagaaagtttttgagttttttgtgtttgtagttaggtgattttttttatttcgttttttgtaattattatttgattttgtttttattggaaaatttggatatttttaaaatgaaatttgaacgtttatatttatagttataaatttttaagagtttggtttagatgttttgtggtatttgaagtaattattggtttttgtttataaatataatttatttatttttttttttttttttgtttttttatcgttttttttatttagggttggtttttaggtgggatgattgaaaggtgaggaagtttttagagtatttgttaatgggagttatttatttgattttaaagtattgagaatttagaggcgtttttttaaatgtattatttaaaaagaaaggtaatatattaaggattttgttgtattttttgattggtttttttttaggaagtagtgatcgaggtttttatttttttttaagaggaagagatagaagttttggtaaataggttaatgttgggaatagatgtttgtttggttgagtgttgggaaagaaaggtagttggagggatgtgtgggtgtttgggagggcgtgggtggtgtttaggaggttatgggaattagaattatatttgtataagagaagatttttatgggataagtaaaattagtatagttttttgggcggggtaaaggtgttttgatgaggatgttaggggttaaatatgtgtttgggttttgttttaatcgggaatgagatatagtattgaagtggaacgggggtagtatttttatttatttttatagtttttggggaaaagaaagttttttttgtagtttaattttaggggtttaaatattgagtattaatataagataggtttttgagtttttcggagcgagtcggggaagtagataattttagatgtaaagtgttttgaataaatagaacgaaagatagagagttagagggggagaaacggtttggtgtggttagggtaggtatttatgagatttaaacgaagagggggtattttagataaaaggaatagtgattatagaggtttcgagttaggaattagttaagggttttagagaagagttgtttcgtaaagttaagtaataataattagggaacggtgggtatgggttttgatagataaggtaggttttggttttttaagttatagaattggattttaggagggatgggtttttcgataaagttaataaagttttaattcgaagatcgttattttatttatgttttaaaaagatttttttggtttttttgcgaagttttatttttagtttttttttgttagtattttgattaacgaatgtgggtacgaatagttagttgatcgatcgcgcgcgtagtcgagcgtcggtttttcgttttgggagggattattggaggtttcgttttttggtcgcgagcgtatttcggtttcgttttcgaggttttacgggcgtggtttttgtttcgggtttcgttttttagtatttcggaatagcgcgttcgtagcgggaggtcgcgaagtttgggattgtgtttgtcgtttatggtcgtcgcgttgttcgttcgggtttcgggttttgttcgtagaggtgagtgcgttggggattcgtacggcggggttttagttcgcgtttggtttagcgggcggaggttttggcggtcggttttgttagagtcgttggtaggcggagttttatttcgggagcgtttacggtttttgttttagttttgttgttttttgcgtcgatttagttcggttttttaggcgtttttggtttttgtatagatttttatttttcgattgattttagttattagtttagtttttagtttttatatttttttttttttattttatttttattagaggtttagggtgcgtttttttttcggagttaggtttgggattgaattagattcgtatttgtgattttgggtaagatagtttttttttagtttcggttggtttatgtgtaaaatgtttatagagaaaattagagttgttgggaggattaaattatagggtatgtaaagtatttcgtgtttggcgtgtaataggtgttttataaatgttcgtttttgttggttaatatagtattttttttattttacgtgtttttagttgtagtagtcgtgatatatatagttacggttttttttgtttggtttgaattataaggggaacgttattgagaattgtgttaagcgttagttagtttttttttcgtatttcgaggagcggaatattattcgtttttatttgttatagaaacggaggtttattgacgtttaaaatttttgtttaaggttatagagttgaggttttattattgttggtattatattgaggattgaaggatgtagtgtatggaaatgtttagtgagtgtattaagtatttagttagtatggggtttttagtggtcgttatggatattttgggttgatagttttttgttgtgggggttgttttttgttttgttggatgtttagtagggatttcggatttttatttattgggtattaatagtatttttttgttttagttgtgataattagaattggttttagatattgttagatgttttttggagggtaaaattttttttggtgagttagtgggttattaggatttttggagattttttgttttttttttttatttatttttgtttttgtcggtagt

SEQ ID NO: 12 - DNA, 6164 bp, Artificial Sequence
  chemically treated genomic DNA (Homo sapiens)
  unsure 4256: n is a or g or c or t
gttgtcggtaagggtagaagtgagtggaaggaggaggtaggaggtttttaagaattttagtgatttattaatttattagggaggattttgttttttaagggatatttggtaatgtttggagttagttttagttgttataattagagtaggggaatattattggtatttagtggataggggttcgggatttttgttgaatatttaataaggtagaggatagtttttataataaagaattgttagtttaaaatgtttatggcggttattgaaaattttatattaattgaatgtttagtatatttattagatatttttatatattatattttttagtttttagtataatattaatagtaataagattttagttttgtgattttaggtaagggttttaaacgttagtgagttttcgtttttataataagtggaggcgaatagtatttcgtttttcggagtgcgaaagaaagattaattagcgtttaatatagtttttagtagcgttttttttgtaatttaggttaggtaaaggaagtcgtggttatatgtgttacggttgttataattggagatacgtaagatgggaaaggtattgtattaattagtaagaacgagtatttgtggaatatttgttatacgttaggtacgaagtgttttatatattttatgatttaatttttttaataattttgattttttttgtggatattttatatatgggttaatcgaggttgaggaggggttgttttgtttaaggttatagatgcgggtttggtttaattttaggtttggtttcggaagaaggacgtattttgaatttttagtgggggtgaaatgaagggagggagatatgggaattgggaattgggttggtggttggggttaatcggggggtaggggtttgtgtaggaattagggacgtttgaagggtcgggttgggtcggcgtaaggagtagtagaattggggtaaaggtcgtgagcgttttcggagtggggtttcgtttgttagcggttttgatagagtcggtcgttaggattttcgttcgttgggttagacgcgggttgaagtttcgtcgtacggatttttagcgtatttatttttgcgggtagggttcgaggttcgggcgagtagcgcggcggttatgggcgatagatatagttttaggtttcgcgatttttcgttgcgagcgcgttgtttcggagtgttggggggcgggattcgggatagaggttacgttcgtagggtttcgggagcggggtcgaggtgcgttcgcggttagggggcggggtttttagtggttttttttaaggcgaggaatcgacgttcgattgcgcgcgcggtcggttagttggttgttcgtgtttatattcgttaattaaaatgttaataagagaaagttaaggatagagtttcgtagaaaggttagagaggtttttttaaagtataaataagatagcgattttcgggttaaaattttgttggttttgtcggagggtttattttttttaaaatttaattttatggtttaaaaagttaagatttgttttgtttattagggtttatgtttatcgttttttggttattgttgtttagttttacgaggtagtttttttttaagatttttagttggtttttgattcggggtttttgtgattattgttttttttgtttggaatgtttttttttcgtttaggttttatggatgtttgttttgattatattaagtcgtttttttttttttggttttttatttttcgttttgtttatttaaggtattttgtatttgaaattatttgttttttcgattcgtttcgagaagtttaaggatttgttttgtgttggtgtttaatatttaggtttttggagttgggttgtaaggaaagtttttttttttttagaggttgtgaaggtgggtggagatgttattttcgttttattttagtattgtgttttattttcgattggggtagaatttagatatatatttgatttttagtatttttattaggatatttttgtttcgtttaagaaattatgttgattttatttgttttataagggtttttttttgtgtaagtgtgattttgatttttatagttttttgggtattatttacgtttttttaggtatttatatatttttttaattgttttttttttttagtatttagttaggtaggtatttgtttttagtattgatttatttgttaaaatttttgttttttttttttggaggaaagtggaaatttcggttattattttttagaagaaagttaattaaaagatgtagtaaagtttttaatgtgttatttttttttttaaataatgtatttaaaagaacgtttttaaatttttagtattttaaagttaaatgaatggtttttattggtaaatgttttaagggtttttttattttttagttattttatttgggaattagttttgggtggaagaaacgatgaagaagtaggagaaaagggagaaataagtgagttgtgtttgtgagtaaaggttaataattgttttaggtgttatagagtatttaaattagatttttgagaatttgtgattgtaaatatgaacgtttaaattttattttaaaagtatttaagttttttaatagagatagaattagatagtggttgtaagaggcgaagtgggggaagttatttggttgtaaatataaggaatttaggaattttttgagtgggtacgatggaaatgttttatattatgattgtgatgggtaataaaagtatttatttgttaaaatgtattaatatttttaattgaggtaaattttattgtagttaaagtattttttaataagtttatttttatggttagttatagtggtttatatttgtaattttagaattttgggaggttaaggcgggttgattatttgaggttaggagtttaagattagtttggttaatatggggaaatttgtttttattaaaaatatagaattagtcgggcgtggtggtatgtatttgtaattttagttatttgggaggttgaggtaggataattatttgaattcgggaggcgaagggtgtagtgagttattattatgttattatattttagtttgggaaaaaagagcgaaattttattttaaaaaaaaaaattttatttttaaaatatgtatgtaaatttttaatttataaagttatttattttgggaaaatataaagtaaaaatattaagtttaaagtttagtataattttttaattattttagaagttagttatattttagtttaattatttatagaagggttatataatagttaaagtaagagaaatttggagtttttattcgtttttgttttttttagtaatataacgggtttaataattaggagataggacgagggagacgtattgtgaaaattttttttttattattgttttatgtggtaaaataatattttatataaataagttatttagtttattttggatataaagataataaaaattggaatgtgattttgggggaagcgggaaggaggaggaaggatagattaggttattgatgttttttatattttgtaaaaaatagatttataggaaaaaaaatagatttttataattttaatgattttatacggttttttgtaaaattagtggtaaatttatttttattaaattttttttgaggttgatatgttttgtgatatggaatgtgagtaatataatggtttaatgattaggtttttatattaggtatagtagtatttgatgttataggaattttcgtgtattggggtgaggagttagttttgtgaattttaggatatattgtttttatttttagattttattgatattatagtgatattggttattagaagaaagtgattttatagaggggaaaagagtattttggaagcgtatcggtggggtaggatatattaaggtaggatttatttagtttgtatattagatatagtttattaaatttattttagaaatgagttttattttaattgaaaaaataaattgaagattgtttaattattgttattttataaatttttagtttatggttagttttaaaattatatttttttattttatgtattggaaattaaatggtttaaagattgaggtgtttttaggaagtatatgtttgaaaaatgttttttttgtaaaatagtattgagtaatatataaggagatatagtttattttagtttaaaattttttttatttgttatgtttttttattttttaaaatatagaatganataaattcggattttttttggagaagttagaagggtattttggtttaaaggttgtataggaaaagagaggttttttttaggagattgtaaggtaaaggaatagaagtaggaggggtaggttttttggtattaggtgggtttgttattttgatgaaatgtgtttttagtttttgataaagggtagggttttttatgtaggtagtttttttgtcgttttttattgtattatttataaggtaattgttattaatagtttagattttttaataatatggtagtttgaatggttttgttatttttagagaaagtatgttttgtaattttttttttaatttaggtataaacgtttgaattttaaatttatattggtttatattttagagtggaatgttttttaagattttttgagtagttagatataggaatttatagttttagatatagaatattagatttttagaagtagtaaagttttgttttgttgggtatggattaagtattattcgtaaatggtttttagtgagattaaggtaagttaataaggaagaggatatagtataatttaagttagattgtttatttttttttttttttatattttttttttagtaaaagcgaatattgtagataagagatagtttattaatgtagtagatatagtgtgtttaggggtatgtttttaagatatattttattaagtatagttttgggtagttttagaattatattttagataatatttaaatattaaatagtagaaattgttttatttgggtttttgttaaagagagaagggattgttgttacgtttgataggaatatgtaaattttatttgaggagttataatgagaaatagaaggtgaggagatagtgttaatagttttggtatttttttgttagtgaggaggtgggaataatggtaatgtagtttttttttgtagtataagggatagagttatacgtaaggtatttggatttatagtggacgttagttttgagagtggtcggtttggtgataaggaatttattttataggaggaatggttttttttttttttcggggttgaatttaaggttagtatataggggtaagttaggatttttttagtgagaaagttgttagtatgtggtattgttaagattttggtttgggataaagtattgggttaaggttcggggttattcgttttaaagtttatatagggagtagtattggtggtggatggataggaatttttgtggttatatattgttttttttatttttggtttttatacggttttttttttaagtatattaggatatttttttgttataggtattgtgatattttatagttatttattagatatttgggttttttttagtgatatttttttattgatgttaattggattttggttatattaatcgttttattagagggtttgtggagtttgtttattaagggtttgaggataaaagtagtttatagatgtgtaagtgaatttttttgagaatatattattttgataggttatattagtttattttgttttttttgaatatttaaaataattttaattagtagtttgaaggtttagattgtattacgtaattttgatttattaggaaagttttagaaattattttagtagaaaggtagataggaaaatttttttaaataagaaatgtataaagagtttcggaggtaaatttttattaaaagttaattttttaggttgtgtagtgtagagaaaagttaaattttttttttagaaagttgttgttgattcgtaagtatatttttttaatataagttagattagtttttggaagttgatattattagaagtttaattatatattatatatgttgggaatattattgttattttataaaattttttcgaaagaagtttggaaat

SEQ ID NO: 13 - DNA, 5770 bp, Artificial Sequence
  chemically treated genomic DNA (Homo sapiens)
ttttattttaaattgatacgcgttaggcgttaagttttgcgataagtttttaggatatagaagtgaataagagttttatttttattttgagaaatttgaagttgtggagaaaatagatttagaagtagattaaattagtaagtattagaaagagggaggagtagagggagtgatcgatttggtttgggattttaaaaaaaggtatcgttatatcgaattatagagaataaggggatttttttagatagaaggtataagagaaatatttgaggaattaggaattgagaattataatttatataaatcggattatttttttgtgggaagaaatttttaggtaggaagtgaagggaataaaataaatatatattattatgattggtattcgtacgggcggttattttattgtttttttatatgttcgaaaattgattgcgataatttgataatttaagtaagttagaataaaggatttagaaaaaaaagaatttgaagtacgagtttttgttttaggaaatgttttttagatgggtaagagaaaggagaattatattagtgtatttaaattggtatatgataataattgatttttggtagattgaggttgtttgtgtagtattgcgtatgtaagttaaatattttatttaaatgtatcgtataaggtaaatggaaagagtgtttttttatggtttttatttgtacgggttatgttacgggttatgttagtatttaatgtaggttttaagtcggttttagtttaggttgttggaggttagagttaaggttagttttttagacggcgggatttgtgtagatgtatagggattatatatagaagatttttattttgtttaatgttttattggtattatttgtaaatttttaataattttatttttgaatttgtgttttggatttgaagtttaatacgatatagaatatgtgaatgagtagaggagataggtataatgtttatgtttgtagtttttagatgttatatgtataatattggcgatgtttaggagtatagaatttttgtagtttatgatgagtggtattcggtgatatttaaattaagtatacggtaagtatatgttatatttgtgttagagtaatagggtatcgatagttttaggagttatattttgtattttaattagaatttttttttaaagtaatgaaaggaatataaaagattaaggaattttattatgttcgttatgattcgtgttattttgttttaattagttagttatatagaaaatagtgaggtagaaggaaaagtaaagagagggttttatattattttttgttttttttatttttttttatttattagtaagttaaaggtagagagtgttatagaatgtgtatatattaggaggaaataaaaataggtgagttagtgttgtacggtgtttttatttttttggtaggaataaaatatttttgtacgatttgtaaattatgtattgtgttattattagtgagtttttatatgagttaaatgtttttatatttgtattgaaaattagtattacggtaaggcgttgtggtttatatttgtaattttagtatttgggaaggttgaggtgggcggattatttgaggttaggggttcgagataagtttggtttatatggtgaaattttatttttattaaaaatataaaagttagttgggtgtggtggtatacgttcgtagttttagttatttgggaggttgaggtaggagaatcgtttgaatttgggaggtagaggttgtagtgagtcgagatcgtgttattgtattttagtttttttagtttgggcgatagagtaagattttattttaaaaaaaaaaaaaaaaaaagaaaagaaaagaaaagaaaattattattgtataatataaagatgaatgttaaaattaatgttagtaatttaaattttaaattattttttttttagaatggtattaaatagtaaataaaaatattgtgaaaagttaagagaggttgtgaaaatatagtaaaggtttatattttagtatttttaatggttttttttttttgttttttgaataagggatattatatttttattttgtattgtgttttgtaaattatgtatatagtttttgtgtgaatttatggtttttaatatatataaatatagaaataaatgtagttgtatttgtttgatatatgtatatatgtatatatatgtatatttatatatatatttatgtatgtatatatatgtatatttatatatgtatgtatgtatatatatgtatatttatatatgtatgtatgtatatatatgtatatttatatatgtatgtatgtatatatatgtatatttatatatgtatgtatgtatatatatgtatatttatatatgtatgtatgtatatatttgtatatttatatatgtatgtatatatatgtatatttatatatgtatgtatatatatgtatatttatatatgtatgtatattattgtattttagtttgggtgatagagcgagatttcgttttaaaaaaaaaaaaaaaatttttttttttttttttatttattatttttagtttttgtttgttttatatgagtagataattatatgagtagttataatgaggattttttaggggatagattttgtttggttatttagtagaagtatgtaattatttttttaagattggtttttaaatttattttagatagagtttttaggtaggaaattttatattttttggttttagaagaatatatttatatttatttaaatgtgttaggtattggttataaagaatattggtgtttatttataattgtttataatgtgttaggagttgtgtataaagtagtgtaataggattattttggaaagtttatgtagttagtagaggagatagataaattaggaattatatggtaagttgaaagaggaagttaggggtaagatgttgtattaaatgtaggagattggaaggtttttttggaagaagtgatgtttagggggagttttagaggtaaatttttggtttggttaatagaagatagttttattgtttattgagattatagaagaaataggttggaagagtttggttttaatatgttaaatttgatgtgtttataggaaattttatttatttgagatagtttttttttgtcgtttaggttggagtgtagtggtgtgatttcggtttattgaaatttttgttttttaggtttaagcgatttttttatgttagtttttttagtagttgggattataggcgtacggtattacgttcggttaatttttttattttatggtagaaacgggatattattatgttggttaggttggtgttaaattgttgattttaaatgattcgtttttttcggttttttaaagtgttgggattataggtgtgagttaaggtgttcgatttgatgtgtttgtaagaatttaaatgaagagggttagttagtttaggagacgaggttagatgtaaggattttagatttgttagtatataggtggtgattgatgtcgtaggaatgattggtattatttagggagttggtgtaaagtaggagttttggggaatatgttaaggggatgtgagagtaagtttataaagatttagaagtggttagggagtaaggggaaaatgggatagaatagagtaaaagttacgggaggtattttttgaattttttggatttagatatgttaggggataggaaatatattgaagataattgaagagattttagtgtgttgttgagtttttagtagagtagatagttgattttattattattttagattttaaagattttttttgaaattgtattgttatgtaatttttttttttttttattgttttatttttggggtttatattttttattttttttgatttatttgatttattcgtatatttttgtaaagttttaatgtaggtttttaggatttaatgatttttttaattaattttaaagttttttaggaagattttttaggttcgttaatagtttttttttttatgattttgtgataaagtttttttgttttattatttaggtgtttttaataagttgttgtaacggtggttttttataagtttgtttggaaattttagaaagtttagaaaaattatgaattttgtttagtaagaggttgggaagttagaaagggttttaaataaaattgattttatttgttatatgttttttttattgtttaaacgttaattaaaggaatttttgtgacgttaagacgttttcggcgtttttattcgtttatagttagagttgattttagaaggtagggggttcgtatcgagacgtttttagtaagttttttacgcgagcgaatgattggcgttaggagaaacgtataggatttttcgaagtcgtcgagagtaaaaggatttattagagttgtgttgagattcgtcgcgggtcgggttcgtattcgagattttcgttcgtgggattttagttttgagttgaacgagagataagtttttgttattttttagtttttattgtttcgagaaattttaagattttttaaaaaaaagtttaagacgttaagtcggggaattttaatattggggtgtttagaaatattggggttttaggcgttttgtaaatgcgttcgaggttcgcggttttgttcgtaagtttagatttcggttttattttcgtttcgcgtttcgcgtttcggttttattttcgtttcgcgtttcgcgtttcgcgtttcgcgcgttttcgttcgtttttgtttcggttttgcgtttgcgtatagtgggatgcgcggggaggtggtgcgcggggaggtggagggcgaggggcggggttattttaggtttcgttcgcggtaggtttgtgggttgcgaggaggagttttgtttagtttgtaggtagcgtagggtagacggcggtaggagaagtaagatgaatgtaggtttagattttgtggttatcgtttcggcggcgcggattattataggtgagtggtcggcgggagtcgcgtagagttcgaggcgtttgttgtttcggtaggagcgtcgagggtcggatttgtgtaggagaggggcgtatgtggaggaagtcggttaggttaagtcgcgaggagtcgcgggatttttggaattttgcggttttcgcgttttttgatttggtgttatagttttatttttttttttttcgatgtgcgtatttcgtttttcgtgtttggattggttttcggggtagagttatcgcgtggtttgttttttttattggttggcgtagggaggtgttttttttcggggtttttgattggtcggtttcgggaggcgttatcggtaatgtttgcggtaggggcggaattgttaggtggtttgagttcggttttgggttggggtcgggttgttatataatggttagaagtcgtgatttcgtttttttcgtgtcgtatggtttttaacgtttttgattcgtcggttttttttgtttgggaagtatggggtcgtatttagtttttcggatttggggaaatagaagggttatagcggcgtttttaggtcgttttggaggtcgtttgtttagttttcggttgttgcgagttgtggtatttattttgatttttgtttagattagtaggtgtaggaacgtgtgggaggagagggtattgttttttcgcgtggttttgttaaatagggttatgaggtttttttgttcgtaggtggttttcgtattattcgtaggtttgtgatgtttacgtttttcgtttttttattgtagg

SEQ ID NO: 14 - DNA, 5770 bp, Artificial Sequence
  chemically treated genomic DNA (Homo sapiens)
tttataatagaaaggcggagagcgtggatattataagtttgcgggtaatacgggaattatttacgagtaggggagttttatgattttgtttggtaaggttacgcgaggaggtagtgttttttttttttatacgtttttatatttgttggtttgagtaaaggttaaggtgggtgttataattcgtagtagtcgagggttggataggcgatttttagaacggtttagggacgtcgttgtagtttttttatttttttaaattcgaaggattggatgcgattttatgttttttaaataaaaggaatcggcgggttaagggcgttgaaaattatgcggtacgaaggagacgaagttacgatttttagttattgtgtgatagttcgattttagtttaaagtcgggtttagattatttagtagtttcgtttttgtcgtaggtattatcgatggcgtttttcggagtcggttaattaggggtttcggaggagaatatttttttacgttaattaatgggagaggtaggttacgcgatggttttatttcgggagttaatttaagtacgagggacggagtgcgtatatcgggagaggagagggtggggttgtagtattaggttagggaacgcgggagtcgtagggttttagggatttcgcggtttttcgcggtttggtttgatcggttttttttatatacgttttttttttatataagttcggttttcggcgtttttgtcgaagtagtaggcgtttcggattttgcgcggttttcgtcggttatttatttatgatggttcgcgtcgtcgagacgatgattataggatttgagtttgtatttattttgttttttttgtcgtcgtttgttttgcgttgtttgtaagttaggtaaagttttttttcgtagtttataggtttgtcgcgggcgggatttgaggtagtttcgtttttcgttttttattttttcgcgtattattttttcgcgtattttattgtgcgtaggcgtaaggtcggagtaggggcgggcggaggcgcgcggggcgcggggcgcggggcgcggggcggaagtgaggtcggggcgcggggcgcggggcggaagtgaggtcggggtttgggtttgcgggtagaatcgcggatttcggacgtatttatagagcgtttgaaattttagtgtttttggatattttaatgttggagtttttcgatttgacgttttgggtttttttttaaaaaattttagggtttttcgaaatagtaaagattggggggtgataaagatttatttttcgtttagtttaggattggaattttacgggcgagaatttcgagtgcgagttcggttcgcggcgggttttagtatagttttgatgggtttttttgttttcggcggtttcgggaggttttatgcgttttttttggcgttagttattcgttcgcgtgaggggtttgttaggagcgtttcggtgcgagttttttgttttttaagattaattttggttgtgaacgggtgaggacgtcgggagcgttttagcgttataaaagtttttttggttgacgtttggatagtgaaaggagtatgtaataagtggggttagttttgtttaaaattttttttgattttttagttttttattgggtaaagtttataatttttttgagttttttagggtttttaggtaagtttatgaggggttatcgttatagtaatttgttgggaatatttggatagtggaataagaaagttttgttataaagttatgaaggggaaaattgttgacggatttggagaatttttttgaagaattttaaagttgattgaaagaattattaaattttggaaatttatattaagattttgtagagatatgcggatgggttagataaattagagaaggtaaagagtgtaggttttagaggtggggtaatagagaaggaaaaaaattgtataatagtgtaattttaggagaaatttttagggtttggaatagtggtgaaattagttgtttattttgttaagaatttagtagtatattgaagtttttttagttgtttttaatgtgttttttgttttttaatatatttgagtttaaggaatttaaggaatgtttttcgtggtttttgttttattttattttattttttttttattttttggttatttttgagtttttgtgggtttatttttatatttttttaatatgttttttaaggtttttattttgtattagttttttgggtaatattagttatttttacggtattaattattatttgtatattgataagtttgaaatttttatatttaatttcgttttttaagttgattgattttttttatttaaatttttataagtatattaggtcgggtattttggtttatatttgtaattttagtattttgggaggtcgaggagggcggattatttgaggttagtagtttgatattagtttggttaatatggtgatatttcgtttttattataaaatagaaaaattagtcgggcgtggtgtcgtgcgtttgtaattttagttattggggaggttgatatgggaaaatcgtttgaatttaggaggtagaggttttagtgagtcgagattatattattgtattttagtttgagcgatagagagaaattgttttaaataaataaaattttttataagtatattaaatttgatatattgaaattaaatttttttagtttgttttttttgtaattttagtgagtagtgaaattattttttgttaattaaattagaaatttatttttgaaattttttttaaatattattttttttagaaaaattttttaattttttgtatttggtgtagtattttatttttaatttttttttttaatttattatgtaatttttagtttatttgttttttttattgattatataagttttttaagatgattttgttatattgttttatgtatagtttttagtatattataggtagttatgaatgaatattaatattttttatggttagtgtttagtatatttgaatgagtatgaatatatttttttggagttaagggatatagagttttttgtttgaaggttttatttagagtaagtttaggagttaattttgagaaggtaattgtatgtttttgttgagtggttaaatagaatttgttttttgaggagtttttattatagttatttatatgattatttatttatatgagatagatagagattaagaataatgaatgaaggaaagaagaggaattttttttttttttttgagacggagtttcgttttgttatttaggttggagtgtagtggtatatatatatgtatagatatatatatgtatatatatatgtatagatatatatatgtatatatatatgtatagatatataggtgtatatatatatatatgtatagatatatatatgtatatatatatatatgtatagatatatatatgtatatatatatatatgtatagatatatatatgtatatatatatatatgtatagatatatatatgtatatatatatatatgtatagatatatatatgtatatatatatagatatatgtatagatatatatatgtatatatatatatatatattagataaatatagttatatttatttttatatttatatatattgaaaattatgaatttatataagagttgtgtatataatttgtaaggtatagtgtaaaatgaaaatgtggtgttttttgtttaaaaagtagaaaaaaagggttattaaaggtattgaaatatagatttttgttgtatttttatagttttttttagttttttatagtatttttgtttgttatttagtgttattttaaggaaagaataatttaaaatttaaattattagtattaattttaatatttatttttatgttgtgtagtgatagtttttttttttttttttttttttttttttttttttttttgagatggagttttgttttgtcgtttaggttggagaggttggagtgtagtggtacgatttcggtttattgtaatttttgttttttaggtttaaacgatttttttgttttaattttttaagtagttgggattacgggcgtgtgttattatatttagttaatttttgtatttttagtagagatggggttttattatgtaggttaggtttatttcgaatttttgattttaggtgattcgtttattttagtttttttaagtgttgggattataggtgtgagttatagcgttttgtcgtaatgttagtttttaatgtaaatataagagtatttaatttatatggggatttattgataatgatataatgtataatttgtagatcgtataggagtattttgtttttattagaaaggtggaaatatcgtatagtattaatttatttgtttttatttttttttgatgtatgtatattttatgatattttttgtttttggtttattgatgagtaagggaggatggaaaggataaggaatgatgtggagttttttttttgtttttttttttattttattattttttgtgtagttggttggttaaaataaaataatacgagttataacgaatatgatagggttttttggttttttgtgttttttttattattttggaaaaaggttttagttgaaatgtagagtgtggtttttggagttgtcggtgttttgttattttgatataaatgtggtatgtatttgtcgtgtatttggtttgggtgttatcgaatgttatttattatgggttataggaattttgtgtttttgggtatcgttaatgttatgtatgtgatatttgggaattgtagatatgggtattgtgtttgttttttttgtttatttatatgttttgtgtcgtgttggattttaagtttaaaatataagtttaaagataaaattattaaggatttgtagatggtgttagtagagtattaaataaagtaaggattttttgtgtatggtttttgtgtatttgtataggtttcgtcgtttaagaagttggttttggttttggtttttaataatttggattaaaatcggtttgaaatttgtattagatgttgatatgattcgtgatatgattcgtgtaagtgggaattatggaaaaatattttttttatttgttttgtacgatatatttgagtagagtatttagtttatatacgtagtattgtataggtagttttaatttgttagggattagttgttattatatgttaatttgaatgtattggtatagttttttttttttttatttatttagaaaatattttttaaggtaagaattcgtgttttaagtttttttttttttgaattttttgttttgatttatttaggttattaggttgtcgtagttagttttcggatatgtgaaggggtagtagggtaatcgttcgtgcgaatgttaattatgatggtgtgtatttattttattttttttattttttgtttgggagtttttttttataagaaggtaattcgatttgtgtaagttataatttttaatttttgattttttaaatgttttttttgtgttttttgtttgggaaaatttttttattttttgtgattcggtgtaacggtgtttttttttgaggttttaggttaaatcgattattttttttgtttttttttttttttggtatttgttggtttaatttgtttttaggtttgttttttttataattttaagttttttagggtgggaatggggtttttatttatttttgtgttttgaaagtttatcgtagggtttggcgtttagcgcgtgttaatttaaaatgggg

SEQ ID NO: 15 - DNA, 6624 bp, Artificial Sequence
  chemically treated genomic DNA (Homo sapiens)
ttagggattatgttagatggatgttaggttatattagggaagatgagtggtaatatggcgtttaatgtattattggtgaattaaattgtatattttattttttttagaagtatttaagtttatgggtaaaaaggaatgttaagaaaagtattgattagttttgatggtcgggcgtagtggtttatatttataattttagtattttgggaggtagaggtgggaggatcgtttgagtttaggagtttaagattagtttgggtaatatagtaagatttcgtttttataaattaataaaatatttaaaaattagttgggtatggtggtgttatttgtggttttagttatttagaaggttgaaggagggttattgtttgagtttaggattttaaggttgtaatgagatatgattatattattttattttaatttcgggtgatagaatgagattaaaaaaaaaaaaattttgagtataagggtatgttattcgtattttattttattttcggttagaaaagaggttaaattaagtaaaaggttatttggcgaattgtatgggaaatattgtatattcgttaaataaataataaaattgtgaaaataaagtaagattttgtagagataagttataaaaaatgtgtgaaatgtttataattagtaagagagaaaagggtaaaaaggatggataagtcgtaaagagaaattattttattttgtgtaggatgacgtaatttggatttagtaggaaggttggtttaatattaagtaggggatataggaaggggtgggtagagggaggaaagttttttgtgtggttttaggtttttaattttgttaggttataatttcgattaatggggggttgggtaaaggtttattattaaaggaagagttcggtcggatatggttgtttaggtttgtaattttagtattttgggaggttgaggtaggtggattatttaaggttaggagtttgagattagtttggttaatatggtgtaattttatttttattaaaaatataaaaaattaattaggtatggtggtgcgtatttgtaattttagttatttaggaggttgaggtgggagaattatttgaatttgggaagtggaggttgtagtgagtcgagtgttattgtattttagtttggggcgatagagtgagattttgttaaataaataaataaataggagatattgttttttagtttttttttttttttgttggttggaatgtagatgtgatggttgatgttttagtagttattttatgttatgcggtagaagttatatgttgaagatggtgtagtaataagatattgtgtaaggagtaatagggtttcgtgtaaagaagtttggattttgatattgagggtattatgttaattttgtaagatttatttttaggtttttttttttttttttttaagatagagtttttttttgttatttaagttggagtgtagtggcgagattttggtttattgtaattttcgttttttaggtttaagtaatttttgtgttttagttttttaagtagttaggagtatacgtacgtattattatattaagttaatttttgtatttttagtatagataaggttttattatgttgtttaggttggttttaaatttttggttttaagtgatttttttgttttagttttttaagtagttagaattataagtatgtattattatatttagttaattatttttattttttgtagagatagggttttattatattggttatgttggttttatatttttggttttaagtgattttttttttttgtttttttaaagttttgggacgatagttattgtatttggtttaagaaatatatttttattatttttttttttttttgagatagagtttcgtttttgttgtttaggttggagtataatggtatgattttcgtttattgtattttttattttttgggtttaagcgatttttttgttttagttttttgagtagttgggattataagtatgggttattatgtttagttaatttttttgtatttttagtagagatagggtttttttatgttggttaggttggttttgaatttttaattttaggtgatttgtttgttttagttttttaaaatattgggattataataggtatgagttattatgttcggtttttattatattttgttaaagttattatttggtttttggttttatatagttgaattgaatattaattaataaatagaggaaataagaattttttgtgttagaagatgtggattaaggtttgtaatagaagtggggttttttgttaggtatggtagtttatgtttgtaattttaatattttgggaggttgaggtaggaggattatttgaggttaggagttcgagattagtttggttaatatggtgaaattttatttttgttaaatatataaaaattagttaggtgtggtggtaggcgtttttagttttagttatttaggaggttgggaaaggagaatttttgagtttaggaggtagaggttgtagcgagttgagatggtattatttttatattttagtttgggcgatagagcgagattttgtttaaaaaaaaaaaatggcgtttttttttaaggtgggagatagagataaaagaggggtagggaaattttttgaattggtagaattggtagtagaagtaaggtttatttttggataaatagaaatggtgagagaagaaatgggaaaaattaaggatatttttgtagtgatagttgtggagggtggggagtttattatgttagattatgtagggaaacgttttttggtttgataggttaggtgtttgtgttgataacggttgttgagagtttaaggtgaaaagagggatagttttaggaaatgataattttggtgataaattatttttgttttttttatttttattgtataggtttagaaattcgtgacgatagaggttaggtgatatttgcgtggtatagttcgtttggagggtgataggggtaagtttttattattagtagggttaaaaatttttaaagttttaggattggggtaggttttagagtattcgtttatagtttgtttttattattttatttttttgcggagaagggagtttcgttatgttgtttaggttagtttttaatttttggattgaagcgatttttttgtttcggttttttagagtgttgggattataggtatcgtattaggggttatacgcggttttattattttaataatttataattattacgtttagaaatttgttttagatttatttttttcgtagtaatatttattatttatttttttgtttttttttttatgtatagtttttatatttgttttttagggattttaattagggtatatggtttggttagtgaggagtttttaattagtgcggttagaacgttgaaggtcggatataaggagtttcggtgtttaggtaggggatttggggttgtttgagattggggcggggaaagtcggagatagtgggtatagatggcgaggggtttatttttttaatatttttaatttagtttagttttcgaggttcgagtggttgttttttgcgttatttggcggtcgtttttagcgagcggagcgcgggtgatcgtgtttgcgggattcggttttcgtggggcgagcgggcgtggggttcgtttagtttggagagtcgggaatcgcgcggtttagggattggtaagatttcggatttaatttttgcgaggtttcgtaattcggtgttcgcggtttttggcggcggcgttcgcgtgttcgaggcgttgcggggcgttgcggggcgcgcggcggttagagcgagcgtgtgcgtacgcgtttattttacgtcgcgtttcgtatcgtcgcgcgcgcgtacgtacgttcgacgttggtttgcgtcggtcgtttttttacgcggggtttcgggggtttttgagtcggtcgtttttaggaagtaggcgtcgcgcggtattgtcgtatgtatttcggtcgtggggatttcgttgtagtagttttgtttatacgggtgaatttttggagggcggggcggggggtaatttgcgcgggttaggtttttcggagtaggttgggggcgttcgagttaggtcgtttttatttgttagtcgcgtggttaatgaatgttaggtttggtgatgttatgtttcgatcggattttggtgacgaaagttcgaagttattcgttagggaattagtatagatttattcgcgggggttttagaagtttttattgtcgtcgcggagtgcgtttcgtttagtagttttgcgcgtgttattacgttgttttgtttttttaggtgttttaagttattttttttttttttaggggttttttgtttttatgtttttttattttatttttattagcgattttattttatatttttatttttataggtgtttttttatttttaggagtgttttacgttattttttttgtattcgtgttatttggatttttaaggggacggtattttgttatatttttatatgtttttttttttatgttattcgtttgtgtcgtggtcggggatgtatgattttttggttttgcgttaattttattagtttcgagcgagatcgatagggtgtttaagtgtgttcgttcgtttgtgaaagtcgtttttgcgtttgtttgtgtttgttattgtatgaggtcgttcgtttgcgcgtgtttgtttttacgggtttttgttcgtttgtttgttacgtgggtgtttatttcgtcgttgtaggtttttgggtcgcgtttgttattgcgttttgtcgtcggtcggcgtttggtattggagtgcgtttgggtttcggggttttcgggtttcggttttaagggagggagagagaggggaggtggttattcgggagagcggggaggggcgggggcggagatagtgggcgggggcgggcgggggcgttgtgaggttcggagggggtgtgtgcggggggtcggaggcggcggttgttagagtcggtttagtttgcgtcggggaatatcggtcgtttttagttttcggcgcggttcggttcggttcggttcggtcgttttaggtgagttttttttttcgttcgggattttttttaaggttcgggttcggggtatcgtgcgtttttcgaggggtttaggtttttttaacgggacggttttcgttttttcgggtttgtttcgcgtcgtttttcgttgtttcgtattcgttcggaattttttttcggtcgttttatatttatcgacgtttacgtaggagttcgagttcgcgggaacggtcgtcgtttttgcgtttcgattttcgcggggattttcgagtatttttttttcgatcgttttttagttcggggttattggaagatattttttaattggggcggtattcgagttgcgtaggttttcggcgtcgggttgggtatttttatttttagggttataagttagcgtttttgcgtagcgtttcgtagaggtttttttcgaggtttaggacgttttttttcgcggagattttatttttattttttgggaaggggaggttcggcggaagtttcgagttataattagcgttattcgggttttttagttaatttttagtagtattattatttttcgtttagggcggcgggggttgggttaggagtgatcggcgggagaggggggagtttttattcggggaattttgattttttggttggagatgtcggaatcgtagtagttgttgtttttaaaatagcgttttcgtttttgtagtcggggattttcggagtttcgggaacgtaggcgtttcggttcgttttttaggcggttttgtaaggttttcgagtttttaggttttttttttaagttttcggtttttggttcggggcggggagcgtcgattttttttcggtttttattgtttttcgtcggcggcggcgtgtacggtagttttagacggatggggggttttcgagttttgggggacgcgggttggcgagtttgtttgttggggttgggttgggagcgtgcgtagttgatgggaattcgcgggtattagcgttcggtgttagatattggatgagaaggggtagggttgggtggggagtggattaggtaggatttgggggatttcgggatttgaggtttttatattttgaatgtttagtttatcgttttttagggtttcgggtttggtcgatttaggagagcggggttgcgttttaggtcgtcgtaagtttttttagcggcgttgttcgttcgtgaggtcgcgttttgtcgggtggtttgttcgtggattgaggtttttggtgtttttattgtacgagttgggttcggtttagtttcgggaagaggtgagggtagtggatttttgcggagtagagagggtgtttttttttgttttttgtatttgtttggatatgggtgtttgtttgatttttttttttttttgttcgttggtttgtgtttttgtttttgtttgtttttttttttttttttttttttttttttatttttgttaatttgttttattttttttgtagttgagcgataatttttgggtcgatagtgttttaatttttttttttttggtttttcgatcgattttttatttttttttttttttttttttagtaga

SEQ ID NO: 16 - DNA, 6624 bp, Artificial Sequence
  chemically treated genomic DNA (Homo sapiens)
tttgttgggagaaagaaagggaaagggtgaagggtcggtcgagaagttaggagggaggagattagggtattgtcggtttaagggttatcgtttagttgtagaggaggtggggtaggttggtaaagatgaggggagagagggagggagggaaggagataggtagagataaggatataggttagcgggtaggaggggaaagagattaggtagatatttatatttagataaatgtagggaatagagaggagtattttttttgtttcgtaggggtttattgtttttattttttttcggaattgggtcgggtttagttcgtgtagtgagggtattagaagttttagtttacgaataggttattcgatagggcgcggttttacggacgggtagcgtcgttgggggagtttgcggcggtttgaagcgtagtttcgtttttttgggtcggttagattcggggttttggggggcggtgggttgggtatttagggtgtggaagttttaggtttcggggttttttaaattttgtttagtttattttttatttaattttgtttttttttatttaatgtttggtatcgagcgttgatgttcgcgggtttttattagttgcgtacgtttttagtttagttttagtaaataggttcgttagttcgcgttttttaggattcgagagttttttattcgtttgaagttgtcgtgtacgtcgtcgtcggcggagggtagtagagatcgagaaaaggtcggcgtttttcgtttcgagttaggagtcgggaatttggggagggggtttgggggttcgagggttttgtagagtcgtttgaagggcgagtcgggacgtttgcgttttcgggatttcggagattttcggttgtaggggcgggggcgttattttgggggtagtagttgttacggtttcggtatttttagttaaaggattaaaatttttcgggtgggaatttttttttttttcgtcggttatttttagtttagttttcgtcgttttgagcggggggtggtggtgttgttggagattaattaggaaattcgagtggcgttaattataattcggggttttcgtcgagttttttttttttaaaaaatagagatggagttttcgcgggagggggcgttttgggtttcggagggggtttttgcggggcgttgcgtaggggcgttggtttgtggttttggggatgggggtgtttagttcggcgtcgggaatttgcgtagttcgggtatcgttttaattagggggtgttttttagtggtttcggattagggagcgatcggggaaggggtgttcgggggttttcgcgggaatcggagcgtagaggcggcggtcgttttcgcgggttcgggtttttgcgtgggcgtcggtgagtgtgaggcggtcggggaagagtttcggacgagtgcggggtagcggagggcggcgcggggtaggttcggggaagcgggagtcgtttcgttaggggggtttggatttttcggggagcgtacggtgtttcggattcgggttttaaggagagtttcgggcggggagggagatttatttgaggcggtcgagtcgggtcgggtcgggtcgcgtcgggagttggaggcggtcgatgtttttcggcgtaggttgagtcgattttgatagtcgtcgttttcggtttttcgtatatatttttttcgggttttatagcgttttcgttcgttttcgtttattgttttcgttttcgttttttttcgttttttcgggtggttatttttttttttttttttttttttggagtcgagattcggagatttcggggtttagacgtattttagtgttagacgtcgatcgacgatagagcgtagtgatagacgcgatttaaagatttgtagcggcggagtagatatttacgtgatagatagacggatagaagttcgtggagatagatacgcgtagacggacgattttatgtagtgataggtatagataaacgtagggacgatttttatagacggacggatatatttggatattttgtcggtttcgttcgaggttggtgaagttagcgtaaggttaaggggttatgtattttcggttacgatatagacgggtggtatgggaggagaggtatgtgggagtgtggtagagtatcgtttttttaggggtttaggtggtacgggtgtagaaaaggtgacgtgggatatttttggggatgaaaggatatttgtgggaatggagatgtaaaatgggatcgttagtggaaatgaggtgggagggtatggagataggagatttttgggggaggaaggggtgatttgggatatttgagaaggtaggatagcgtggtagtacgcgtaaggttgttgggcgaggcgtatttcgcggcggtagtggaaatttttggaattttcgcgggtgggtttgtgttggttttttgacgggtgatttcggattttcgttattagggttcggtcggggtatgatattattaggtttagtatttattggttacgcggttggtaggtgggagcggtttggttcgggcgtttttagtttgtttcgaggggtttgattcgcgtagattgtttttcgtttcgttttttaggagtttattcgtgtggatagggttgttgtagcggggtttttacgatcgaggtgtatgcggtaatatcgcgcggcgtttgttttttggaggcggtcggtttaggagttttcgagatttcgcgtgggagagcggtcggcgtaggttagcgtcgggcgtgcgtgcgcgcgcgcggcggtgcggggcgcggcgtggggtgggcgcgtgcgtatacgttcgttttaatcgtcgcgcgtttcgtagcgtttcgtagcgtttcgggtacgcgggcgtcgtcgttagggatcgcgggtatcgggttgcggggtttcgtaggggttgaattcggagttttgttagtttttgggtcgcgcggttttcggttttttaagttgggcgggttttacgttcgttcgttttacgggaatcgggtttcgtaggtacggttattcgcgtttcgttcgttggagacggtcgttaggtggcgtaaaaagtagttattcgggtttcggagattgggttgggttgggggtgttggggaggtgaatttttcgttatttgtgtttattgttttcggtttttttcgttttaattttaggtaattttaaattttttgtttggatatcgaggttttttgtattcggtttttagcgttttggtcgtattagttgaaggttttttattggttagattatgtgttttagttgagatttttgaagagtagatgtaagggttgtgtatgggggaggggataggagggtggatggtgggtgttgttgcggggggaatgaatttgaggtaggtttttaagcgtggtaattatgaattattaaaatgatggggtcgcgtgtggtttttagtgcggtgtttgtaattttagtattttgggaggtcgagataggaggatcgttttagtttaggagttggagattagtttgggtaatatagcgagattttttttttcgtaaaaaaataaaatgatggaaataaattgtgaacgagtgttttgaggtttgttttagttttgaggttttagggatttttggttttgttagtgatgaaggtttgtttttgttattttttagacgaattgtgttacgtaggtgttatttaatttttgtcgttacgagtttttaggtttgtataatgaagatagggagggtagggatagtttattattagggttattattttttggaattatttttttttttattttgagtttttagtaatcgttgttaatataggtatttaatttgttaagttaggaggcgtttttttatatagtttagtatagtaaattttttattttttatagttgttattgtagggatgtttttgattttttttatttttttttttattatttttgtttatttaggaatgagttttgtttttattattagttttgttaatttagagaatttttttattttttttttatttttgttttttattttggaaggaagcgttattttttttttttagatagagtttcgttttgtcgtttaggttagagtgtagagatgatgttattttagttcgttgtaatttttgttttttgggtttaaggattttttttttttagttttttgagtagttgggattagaggcgtttgttattatatttggttaatttttgtatatttagtagaggtggggttttattatgttggttaggttggtttcgaatttttgattttaggtgatttttttgttttagttttttaaagtgttgggattataggtatgagttgttatgtttggtagggaattttatttttattatagattttgatttatattttttaatataaaagatttttattttttttatttattggttaatatttaatttagttgtatgagattaaaaattaaataatggttttaataagatataatagaggtcgggtatggtggtttatgtttgttgtaattttagtattttgggaggttgaggtaggtagattatttgaggttgggagtttaagattagtttgattaatatggagaaattttgtttttattaaaaatataaaaaaattagttgggtatggtggtttatgtttgtaattttagttatttaggaggttgaggtaggagaatcgtttgaatttaggaggtggagggtgtagtgagcggaaattatgttattgtattttagtttgggtaataagagcgaaattttgttttaaaaaaaaaaaaaaataatagaaatgtattttttgggttaggtgtagtgattgtcgttttagaattttgggaggataaggagagaggattatttgaggttaggagtatgaggttagtatggttaatgtggtgagattttgtttttataaaaaataaaaataattagttgggtgtggtggtgtatatttatagttttagttatttgggaggttgaggtaggaggattatttgaggttaggagtttgagattagtttgggtaatatggtaaaattttgtttgtattaaaaatataaaaattagtttggtatggtggtgcgtgcgtgtatttttagttatttgggaggttgaggtataagaattgtttgaatttgggaggcggagattgtagtgggttaagatttcgttattgtattttagtttgggtgatagagggagattttgttttaaaaaaaaaaaaaaagagatttagaaatgagttttgtagggttggtatggtgtttttaatgttagggtttaggtttttttatacggaattttgttgttttttgtatagtattttgttattgtattatttttagtatgtgatttttatcgtatggtatagaatggttgttggaatattagttattatatttatattttagttagtaggaaggaggaggggttgaagaatagtattttttatttatttatttatttgatagagttttattttgtcgttttaggttggagtgtagtggtattcggtttattgtaatttttattttttaggtttaagtgatttttttattttagttttttgagtagttgggattataggtgcgtattattatgtttggttaattttttgtatttttagtagagatgagattgtattatgttggttaggttggttttaaatttttggttttaagtgatttatttgttttagttttttaaagtgttgggattataggtttgagtaattatattcggtcgaattttttttttaatgatgagtttttgtttaattttttattaatcgagattgtaatttggtagaattgggagtttgaggttatataaaggatttttttttttttatttatttttttttatgttttttatttaatgttgggttagtttttttgttggatttaagttacgttattttatataggataggatgatttttttttgcggtttatttattttttttattttttttttttttgttagttatgagtattttatatattttttatagtttgtttttataaagttttattttatttttataattttgttatttatttaacgagtatatagtattttttatgtaattcgttaaataattttttgtttagtttagttttttttttggtcgggggtagagtggagtgcgggtggtatatttttgtgtttagaatttttttttttttggttttattttgttattcggggttggagtgaaatggtgtgattatattttattgtagttttgaagttttgggtttaagtagtaatttttttttagttttttgaatagttgggattataggtggtattattatgtttagttaatttttaaatattttattaatttgtagagacggggttttgttatgttgtttaggttggttttgaatttttgggtttaagcgatttttttatttttgttttttaaagtgttgggattataggtgtgagttattgcgttcggttattagaattgattagtattttttttggtatttttttttgtttatgaatttgagtgtttttgaaaggagtgaaatatgtaatttaatttattagtagtatattgaacgttatgttgttatttattttttttggtatgatttgatatttatttgatatggtttttgg

SEQ ID NO: 17 - DNA, 6041 bp, Artificial Sequence
  chemically treated genomic DNA (Homo sapiens)
gtaaataaaaggaataaaggaattaagattaaggggattatatgatgtggtattataagaatttataaattagttttttggtagtaatgtttatagatattatttttgttttttggttatttttgtggttttgaaaaattataaatgagaatatttagtttagtttatttgtttaatttttttattaattatgaaagttgtaggaagataataataataaggggtattttggttgtaggaaggtttttgtataggaaagagtttcggttatttaatttatatgatgatttgtaaggttgagagtttggattatgttattggatttttttgtgttttttggaaattagtgttgaaaatgtgagttagattttattttaaatgtttttagaatattcgtgtataatgtgaagtaggggaagtgatatttagaataagttttagggatagaatgaggtatgaggatttaaaggtattagtttatatattatatttagaggagttagatagtaattaatatttattaagtattttttggttgtaagtttacgttatataagaattttagttagatttatgtaaaaatttaagaaaatgttgttttaaatggtttaaatagatattttgtatttagtttaggaattgtttgttatttttttttattgttgttattttattatgtttttattgtttatagattagaagtaattaataaatatttattatgtgttagatattttataggggatatttttggatgatttatagggatagtattaaaatataagtattatgtttgtatcgtatgttaggtattgtattatgatttaaagaaaaggagaggtaaatagataaattaaagttttgtttttaatgaagtgtaatttagttagtagattagatttggattttcggatagtagaatgtgatttgatagttgaaggtaaatgtaaattagagttgaggataagagaaaggtttaaattattatgtttttggtattttaggattttttttatttttttaaataatagaagatttaatggtgtatttattttttttttttgagaaggaatttcgtttttgttgtttagattggagtgtaatggtgtgatttcggtttagttgattgtaatttttgttttttgggtttaagcgatttttttgttttagttttttaagtagttgggattatagatgtgtgttattacgtatttttagtagagacggggttttattatgttggttaggttgtttttaaatttttgattttaggtgatttatttgttttaattttttaaagtgttgggattgtaggtatgagttattgtgtttggtttaatggtgtggttttatttggtttaattttttttatttattgggggtaggtaggatttaagtgcgtgaaatgaggtattggcgttattgtttttattatgggtatattttagaaatatttgtaaaaggataatataaggttaggcgtgatggtttacgtttgtaattttagtatttcgggaggtttagatgggtggatcgtaaggttaggagtttgagtttaatttggttagtatagtgaaattttatttttattaaaaatataaaaattagttgggtatagtggtatgtatttgtagttttagttattcgggaggttgaggtaggagaatcgtttgaatttaggaggcggaggttgtggtgagtcgagatggcgttattgtattttagtttggataataagagtgaaattttattttaaaaaataaataaataaataaataaataaaaggataatatagtgaaataaggatattataaggtttagttgaatagtttgggtttgttagaggaattataaaatgggtattataataataatttttattttataaatttattgtgaggaataaggtgtgataatatttataaaagatttatttttcgtttatgggaatatgaagaattacgtattttttgttttattttgaattagaattaaattagataattaggtattattattaatttagtgagattgtattatatttttttttgttttttgaagaaaataagttgatttatagtttttttttataaagaattttgttgttaatattaatcgaaaaaaatggggtaaattttgtttgtagtattagtttataagtttttttttttggtatttggtttagagttgaatagaaagtagttattgttattatatagtgttaagggataaaaaaaattacgatgtaggtttataattatttttgtaatattaaattaaaggtatttgttatttgtttaaagttgaagttaatttgaattgttttaaatttaattttgttacgatatatatttaaatagtgtttaatgatagatttaagtggttatgatataatatgggttgtataggatttataaatagatagggtttttgttatttaggttggagtgtagtggcgtgaaaatggtttattgtagttttgattttttggttttaagtgatttattcgttttagttttttaagtagttgcgattataggtatatattagtatatttgattaatgaaaaatatgtttttttggttaggcgtgatggtttatgtttgtaattttagtatttggtgaggttaaggtaggaggattatttgagtttaggagttcgagattaatttaggtaataaaataagattttgtttttataaaaaaaatttagttaggtatggtggcgtatgtttgtagttttagttatttgggaggatgagatgggaggatcgtttgagtttagggggttaaggttgtagtgagttttgtatatgattatgttattgtattttagtttgggttatagagtaagagattttattttaaaaaaataaaaaataagaagtaaaaaataaaaaataaaatattttttttttttttgagatgggattttgttttgtggtttaggttggtttttaatttttggattaaagtgatttttttaatttggatttttaaagtgttgagattataggtgtgggttattacgtttagtcggatgttatttttgaataagaataattatagagatatgaatgagagggttttttaaattgttggttttgataaagatttgttttttttgtatttttttttttgatgtaaaataattgttttttattggattatatttagtttgatttatagaatttgaagaaattataatttagatgattagatgaatatagtaatttttatagattataggagattgtagtggatggtaaagtgttattaaataaaaggaggaaaggttagatggaaagttgtatatttacgttttttttttggatggtgtattttttataataataggtattagagattttaggttttttatagattatatagcgtttttggtaagatttatagttatatttattatatatgcgtattagagtgtagggacgtatataggagttataaattatatatttgttattatttgtaaggaagagaatggagttatgtttataagttttttagttttttgttattttttgttatggggaaatatattagttttttgggaaatatattagtttttttttgatagtgattttagggttttttttttggtattataaaatttggtttttttagtgtttattttaagttttttaatatatataaaagtttattaattaatatatgtgaagagtttagaaaagtatttcggagatgataagtttgtataattgttggtaaagtgttgtgtgttggggaggggttatgttattttggcgatttttttcgttgaaaattagagagatatagcgttaaatgtgtaagcggtagtggggagttagaggggtttttggttaaagtgtagtatttagtgtttatatatttttaggtatatttatttaaagttttttttgtggtatttttgttggttttatagaaaattgggagtgggaagggtgggttgttgggacggtgtgttttatttatattttttatatagtttttcgatggttgtaagatgaaagatggtaaaaagtataattagaataaaggttttgagaaagaggagaagtatattttcgagttgggggtagggatatgagtaaggattgtagtgagtgagatttgcggatagttattttattattataaatttttatatgaattaaatttatatttaagtatttttttgaattttttttaacgttttgggtaagtttagagtttttttggatttggtttagattttatttttcgatatttgtttggggtttttagtacgcgtattttcgttttttttttattagaggttataaatttgcgcgtttttataatatttcgcgtttgagaggcgggaaacgtggcgtttgcgaggtaagtttttaaggaagagacgggaattttcgattttttagtttttaatattatttttgtttagatagttaggggtagggcgtagttttattaatattagtttgtttgcggtaaaagattaaattaggatgatgtttagttatagtttttaattaagtcggttatcggaagtttcgggaattttcgttcgatttttaatttttattgtttttgtttttacgtcgttgtgattggttttttaagttttcgttagtttataatttttgtattaggttcgttttgttttcgcgcgagtttttgtcgttgttgggcggttaggttttggtaggtgtatgaaatttttaaaaatttttttagatttggatggcggagataattaaaatttgtttttgggtaaaatatttttgtgtttggtatttatttttgtaagtgtttttgggtagttcgatttttttttgcgtgtttgttcgttgtacgtgagtttcgtttattgcgtttatagggttttggcgtttttagggaggtttcgtttttatcgtgacgttttattttttcgggtacgtttttgtttaaaggttttaaaggcgtcgtgtgggacgttattttaatgcgattttatttttgttagtgtataaaatggcgttttatagtttattggtgattcggttgtaggtgagcgagtttagggatttttgggtttacgggggcggggtgttttttattgtgtcggcggttgtgggcgaggtagggcgaggcgggtttaatttggggttaatttttcgtgtatttgtttcggttgtgggttcggtattcgtgttcgtttttttggtgttttaggttaaggcgttttcggtatagttagtttttttggttttgtttttgtttcgtaagaagcgtgggtttaagtagcggcggtcgggtgaagagcggaggtattttttttttttttttgaggatagtattgtttgttttcgtggggtgtgtttttattttttaaggtgaggataaggtgattagggggcgcggtcgttgttgagttttttaggtttagtttttgaggttttattttttattttttagtaatagaggtatgatagtatttacggttgttaggtttggagtttggagaagaaattaggattttgtattattttttgaggattttgcggaacgtggaatgtcggggaggggggcggttttttgggtttatacgtagtaaataatataataatagttttttatttttgtataagatttgaggtttgttttaattttttataatattatttgatttttgtaatcgtaggaatgaggtggttttttttatttgatagatgataaagttggtagaaagtaggtgaaagttttgatttttaagagtgttatcgaagtgttgtggtagaagtatgggttttattattatttagtttttgtttatgttagtttgtttttatagaattttatgaattacggtgtaattatttttgtttgttagaatgtagtacgaatattttgagttttataataagttgtttgttaaatatgggaggataaggagattttagtttgattttgatttttttgttaggagttatttagaaagttgattgattgttagatgatttttttatttttaatttgatagttttgggaaggt

SEQ ID NO: 18 - DNA, 6041 bp, Artificial Sequence
  chemically treated genomic DNA (Homo sapiens)
atttttttagggttgttaagttagaagtgaaaaaattatttggtagttagttagttttttagatagtttttaataggggagttaaggttaaattggagtttttttatttttttatatttgataagtaatttattgtgaggtttaaaatattcgtattgtattttgataaatagaaataattgtatcgtggtttataaagttttgtgagggtaggttgatataaataagaattgagtggtggtagggtttatgtttttgttatagtatttcggtgatatttttgagaattagaatttttatttattttttattagttttattatttattaaatgagaaaaattattttatttttacgattataggaattaaataatattatgaagaattaaaataggttttaaattttgtgtaaaggtgagagattattattatattatttattacgtatgggtttagaagatcgttttttttttcgatattttacgtttcgtagggtttttaaaaggtggtatagggttttagttttttttttagattttaggtttggtaatcgtagatgttgttatgtttttgttgttaagagatgggaagtgaggttttaggaattgggtttagaagatttaataacgatcgcgttttttagttattttgtttttattttgaggaatggaaatatattttacgggagtaggtaatgttgtttttaaaaagaagaaagaggtgttttcgttttttattcggtcgtcgttgtttgggtttacgttttttgcgaggtagggatagggttaggaaagttgattgtgtcggggacgttttgatttagggtattagagaagcgggtacgggtgtcgggtttataatcgggataggtatacgagaagttggttttaggttgggttcgtttcgttttgtttcgtttatagtcgtcggtatagtaggaggtatttcgttttcgtgaatttagaggtttttgagttcgtttatttgtagtcgagttattagtaggttgtagggcgttattttgtgtattgataaagatgaggtcgtattaaagtgacgttttatacggcgtttttaaagtttttgggtaggggcgtgttcggaagagtggggcgttacggtgaaggcgaggtttttttagaggcgttagaattttgtgaacgtaatgggcggagtttacgtgtaacgaatagatacgtaagaggaaatcggattgtttaaagatatttgtagaaatagatattaagtataaagatgttttatttaagaataaattttagttattttcgttatttaaatttgggagagtttttaagagttttatgtatttgttaggatttggtcgtttagtagcgataaaaattcgcgcgagagtaagacgggtttggtgtaaggattgtaaattgacggaagtttagagaattaattatagcgacgtggaggtaggaataatgggggttaaaggtcggacggaagttttcgaagttttcggtggtcggtttagttaggagttatggttaaatattattttgatttgattttttgtcgtaagtaggttggtgttggtgagattgcgttttatttttggttgtttgggtaggggtggtattaggagttggggggtcgggggttttcgttttttttttaggggtttgtttcgtaggcgttacgtttttcgttttttaggcgcggggtgttgtaggagcgcgtaggtttgtggtttttgatgagaagagggcgggggtgcgcgtgttgggagttttaggtaggtatcggggggtggggtttgaattaggtttagagaaattttgagtttgtttagggcgttggaggagatttaggagggtgtttggatgtaggtttggtttatatggaaatttgtaatgataaaatggttattcgtaggttttatttattgtagtttttatttatgtttttatttttagttcgaggatgtatttttttttttttttaaaatttttattttaattgtattttttattattttttattttgtagttatcggaagattgtgtgaaaaatgtgagtggaatatatcgttttaataatttattttttttatttttagttttttgtggaattagtaaaagtgttataaagagggttttgagtagatgtgtttggaagtatgtgaatattgaatgttgtattttagttaaaggtttttttaattttttattgtcgtttgtatatttaacgttgtatttttttagtttttaacgggaagaatcgttagagtagtatgatttttttttaatatatagtattttgttagtaattatataggtttattattttcgaggtgtttttttaagttttttatatatgttaattggtaaatttttgtatgtgttgaggggtttgagatggatattggggaaattaagttttgtgatgttaagaggagggttttaaagttattgttaaaaggagattagtgtattttttaggagattagtatatttttttatggtaggagatagtagaggattgaagaatttgtgagtatgattttatttttttttttataggtgatggtaagtgtgtgatttgtgatttttatgtgcgtttttgtattttggtgcgtatatgtgatgagtgtaattatggattttattaggggcgttgtgtgatttgtggaggatttggggtttttgatgtttattattgtaaggagtgtattatttaggagaaggacgtaagtgtatagttttttatttgattttttttttttttgtttagtaatattttgttatttattgtaattttttatggtttatggagattattgtgtttatttagttatttaggttataatttttttaagttttgtgagttaaattgggtgtagtttaataaaaggtagttattttgtattaaggggaagaatgtaagggaagtaaatttttgttaagattagtaatttggagagtttttttatttatgtttttgtggttatttttatttagaaatgatattcggttgggcgtggtggtttatatttgtaattttagtattttgggagtttaagttaggaggattattttagtttaggagttaaagattagtttgggttatagagtaagattttattttaaaaaaaaaaaaagtgttttgttttttgttttttgttttttgttttttgtttttttgagatggggttttttgttttgtggtttaggttggggtgtagtggtatgattatgtgtaaggtttattgtagttttgattttttgggtttaaacgatttttttattttatttttttaagtagttgggattataggtatgcgttattatatttggttaaattttttttgtagagatagggttttgttttgttatttaggttggtttcgaatttttgggtttaagtgatttttttgttttagttttattaagtgttgggattataggtatgaattattacgtttggttaaaaaaatatattttttattagttaggtgtgttggtgtgtatttgtggtcgtagttatttgggaaattgaggcggatggattatttgggattaagaggttaaggttgtagtgagttatttttacgttattgtattttagtttgggtgatagagattttgtttgtttataagttttgtatagtttatgttgtgttatagttatttaaatttattattaagtattatttgggtgtatatcgtgataaagttgaatttgggataatttaagttgattttagttttaagtaggtaatagatgtttttggtttaatattgtagaaatgattgtggatttgtatcgtgattttttttgttttttgatattgtgtagtggtagtggttattttttatttaattttgagttaaatgttaggagagagagtttatagattagtgttataggtaagatttattttatttttttcggttagtattggtagtagggttttttgtgggagaaaattatgaattagtttgttttttttaaaaaataaaaggaagtatgatatagttttattaggttaatgatggtatttagttatttaatttaattttaatttagaataaggtaaaagatgcgtaattttttatatttttatgagcgaagaataggttttttatagatgttattatattttgttttttataataagtttgtgaaatagggattattattatgatgtttattttgtagtttttttgataagtttaggttgtttaattaaattttgtagtgtttttattttattatgttgtttttttatttatttatttatttatttattttttgagatggagttttatttttgttgtttaggttggagtgtagtggcgttatttcggtttattatagttttcgttttttgggtttaagcgatttttttgttttagtttttcgagtagttgggattataggtgtatgttattatgtttagttagtttttgtatttttagtagagatggggttttattatgttggttaggttggatttaaatttttgattttgcgatttatttatttgggtttttcgaagtgttgggattataggcgtgagttattacgtttggttttatgttgtttttttataagtgtttttgggatgtgtttatggtgaaggtagtaacgttagtattttattttacgtatttggattttgtttatttttagtaagtgggagagattgggttagataagattatattattgggttaggtatagtggtttatgtttgtaattttagtattttgggaggttgaggtaggtggattatttgaggttaggagtttgagagtagtttggttaatatggtgaaatttcgtttttattaaaaatacgtggtggtatatatttgtaattttagttatttgggaggttgaggtaggagaatcgtttgaatttaggaggtagaggttgtagttagttgagtcgagattatattattgtattttaatttgggtaataagagcgaaatttttttttaaaaaaaaaaagtgagtatattattgaattttttgttgtttagggagatgagaaaggttttgaagtattaaaaatataatgatttggattttttttttgtttttaattttgatttgtatttatttttaattattaagttatattttgttgttcgaaaatttaaatttagtttattagttagattatattttattagaggtaggattttggtttgtttatttgtttttttttttttttaggttatgatatagtgtttgatatgcggtgtaagtatggtatttgtattttggtgttgtttttgtaagttatttagaggtattttttgtagggtgtttagtatatagtaggtgtttgttaattatttttggtttataagtagtgaaagtatgataaggtaatagtagtgaagaaaagtaataaatagtttttaaattagatataggatatttgtttaagttatttaagatagtatttttttgaatttttgtatgggtttagttagagtttttatgtagcgtaagtttgtaattagagaatgtttaataaatgttaattgttgtttgatttttttgaatgtggtgtgtgaattgatatttttggatttttatgttttattttgtttttgagatttattttagatgttattttttttattttatattatatacgaatgttttgaggatatttgagatggaatttagtttatatttttagtattagtttttaaggaatataaagaagtttagtgatatgatttaggtttttagttttatagattattatgtagattaagtggtcgaggtttttttttatgtagaaatttttttataattaaggtattttttgttattattgtttttttgtaatttttataattgataagggaattagataggtaagttaagttaggtatttttatttataattttttaaagttataagaataattaggagatagggatgatgtttatggatattgttattagaggattgatttgtaggtttttatggtgttatattatgtaatttttttaattttgatttttttattttttttgtttat

SEQ ID NO: 19 - DNA, 5365 bp, Artificial Sequence
  chemically treated genomic DNA (Homo sapiens)
tttgttttattatttaggttagagtgtaatggtgcgattttagtttattgtaatttttgtttttcgggtttaagcgatttttttgttttagttttttgagtagttgggattataggtacgtgttattatatttaggtaattttttgtatttatagtagagatggggttttattatgttagttaggatggtttcgattttttgattttttgatttattcgtttcggttttttaaagtgttgggattataggtatgagttattgtatttggtttattttttaatttttttaaatgtttttattaagtaaatattttgagaagtttttattagttattaaaaatttataatgtaaatatataaataaaaggagaatagtaagtttttttaaatattttgatattatttttaaatttagttaataaattgagaatgaatgttaattttttaaataaataggttaggggtagtggtttatatttgtaattttagtattttgaggggttgagttgggaggattgtttgaatttaggagtttaagagtagtttggataaggtgataaatttttttttttataaaaaatataaaaattagttgggtgtggtggtgtgtgtttgtagttttaatttttaggaggttaaggggtgtgggaggattttttgagtttagaaggtcgagtttgtagtgagtcgtgatcgtattattggtttttagtttgggtgattttgttttagaaaaagaaaaaagaaagaaaaaaaaagtttttattaattgaagatagattgaaagtaagagaaattgaaagtaagataaatgagtgggtggtttttttaagtattggtaagtgttgtagagaaaattatagtaataggagagttaatgatgggggtagggtggtgtattttagataattttagataaattatttttttttttttttttttttttttttgagatagagttttattttgttatttaggttagagtatagtggtacgattttggtttattgtaattttcgttttttaggtttaagtaatttttttgtttcgattttttgagtagttgggattataggtttgtgttattacgtttagttaatttttgtatttttagtagagatggggttttattatgttggttaggttggtttcgaatttttggttttaagtgatttattcggtttggttttttaaagtgttgggattataggcgtgagttattacgtttagatttattttagataaattaaaggaatttgaatataatgggtgattttagtatttgattaaggaagatttttttaggtagggagaatagaaagtgttaagattttgaggttagagtgtatttgagatagttaagtaatgcggaggaggttagaggagtaagaaatagggaaagtaggattggtaggaggaaggaagggaagggattgggtagagatagtagcggagaataggatttggatgtattggtaataggaggaatttattcgtggggttgttgatatttgagattgatattggtgttgggaaaataggaaagggtggaggtggagggagattttgagttatagtttgatttagttttatagaaaattagtagaagagagtttttttgggtgaatggagagagaagagtttatttagtattttggaggagattagagagagatagttaagaacgtataggttttattatatgttttgtgtaagattaggtttattttttttattgtgttttttttttttttttttttttttttttgagataagagtttagttgtgttgtttaggttgaaggttagtggtgtattcgtagtttattgtagttttaaatttttaggtttaagcgattttttattttagttttttgagtagatggaattataggtgtgtattattatgtttggttaattttttttttttttttttttttttttgtagtaatgtggtttcgttacgatgtttaggttgtttttgaattttcgggtttaagcgatttttttatattggttgggtttataggtttgagttattatgtttggttagtttttttaatttaaaaaatatagaaagtgttaatataaattaaaaagttataaaatagtgttaatagtattttattttttcgaagataaatataggtagagaaaaattaatggatattgtttttttgggtaggggtattattggttattataattttttttttcgtgtattttagaatttattaatttttttataaagattatgtagtataataagataataaatataattttgtgtgattttaaaatataggaagtatagaagtttttaaaatacgtttgtatttattacgtgaagaaatagatgttaatatttggttataattgttttagatttttttttttttttttttttttgttttttttttgggggggatagagttttgttttgtcgtttaggttggaatgtagtggtatgatattggtttagtgtaattttttttttttgggttggagtgtagtggtatgattttagtttattgtaatttttgttttttgggtttaagagagtatttttagttaatttttgtttttttagtagagataaggttttgttatgttgtttaggttggtttggaatatttgattttaagtgattcgtttatttcggttttttaaagtgttaggattataggtgtgagatattatatcggttaaataataagtttttaaaaaaataggagattggttaggtatggtgatttacgtttgtaatcgtagaattttgggaggttgaggtgggtagattatttgagatcgggtattggagattagtttggttaatatggagaaatttcgtttttattaaaaatataaaattagtcgggcgtggtggtgcgtgtttgtaattatagttattagggaggttgaggtaggagaatcgtttgtattcgggaggcggaggttgcgtgagttaagattgcgttattgtattttagtttgggtaattagaataaaattgttttaaaaaaaaaaaaaataaaaataggtcgggcgcggtggtttacgtttgtaattttagtattttggaaggttaaggtgggtggattacgaggttaggagatcgaaattattttggttaatacggtgaaatttcgtttttattaaaaaatataaaaaattagtcgggcgcggtggcggcgttcgtagttttagttattcgggggtgttgaggtaggagaatggcgagaattcgggaggtagagtttgtagtgagtcgagatcgcgttattgtagttcggtttgggtgaaagagcgagattttgttttaaaaaaaaaaaaattaaataaataaataaataaaaaaataaaataataggagaagatgatgatagattttataagagtttggttttagggttgaaattttatttagtgttgtggttttgcggttgtgggtttatgggtgtttttaaagggttttaggtagatggaggtttttggttggcgtggaggaaggaaaaggatgaaatcggtttttttggttattttttttagtttagttgtagttgtagttcgtgggtttgagtcgatttttggggtttatcggtttattttatagatgcggagtttatagtcgggaggcgtggcggttttgggcggtgtagggtttcggggcggggaggtcgaggcgttcgtttttttcgtcggggtttatttgggttagttttgagttttcgagtagggcggatcggtcgttgtttgtttaaagttggggtcgttaggagtgcgatcgtttgcggatttgtagttgggtatcggtcgtaacgttcgtttcgcgacggtaggtgagatgcgggcggtttcgtgggaggggtttttgtttgttttcgttatttatttttttttcgtttgttgttgttgtagggttgggaatgggggggattaagtatttcgtagggtgattcggggagatttgtgagttagtggttttagcgttgaatgagagttttttttcgggttcgcgttcgtagggattgaagggatttttgaatgttcgcgggacgtgtcgcggcggcgtttagtacggaggaggtaggtagggaggtgaggagtaggttagatcggtcgtaggtgtagggttttttgtttttttaggttgcggtttcgtggagggtttgtagatagttgttgagattatgagggttagaggtttgtggttacgcgcgttattattagttagttgttttttgtttggttttttttgtaggaatgggagtttggggggaggggagggtgtgggtaggattttttggaaaagggaagttcgttggtgtttatgtgtgggatggagagagggtagggggaggacggggatatacgcggagttttttatttagatgttgttaaatatagtttttatattagatacgtaatttattttagagatgtaatttaggtatatatatatggatatatataaaattttatttatagggatttttatttagtgttacgtgagaatataggcgtgtatcgtagataagttatataggtttcgtaggtttagtatatatgtttgtagtaatattattaggtatagagtcgaggtttaggtaggtatgtttagttgtacgtaggaagtaagatatatttagatatatataggtaagtttttatttagagaaagaaggtgtaggagatgtgttttgggtaattatagttatagttttttaagtgtgtatatatatatatatttatattgagatatatagatatatagagatatttggacgtgttaagtttatagtataaataggtttttgtaggtttattcggaggttgtgtgggtcgaggttgttgtatacgtgtgtttagatttttttatttttattttaatttcgtgttttgttttagggaagtttagggtttatatgatttaaggggagggttttcgggatagttttcggagaaattgtattatttttattaatgatttattttttttttagggaataaaggtttagggatcggtagttttattttagagtttattagttttttagagttttcggtgattggtttgtgtttttttttgggtgagtgttgggtaggttaggtggaaggagggtgaaatgggtttgtagggttattttggtatagttcgtttttttatagatcgcgttttttttttttaagttagtttgtgtagttttgtgtagtttgtgtgttttgagaattagggtattaaggggttttcgtaggggtagtttgtagtaagtagtttttttttattttagggtaggcgggggttttaaggtttttttgtttttgttatagttcgggttatttatgtttgtttttttttttttaga

SEQ ID NO: 20 - DNA, 5365 bp, Artificial Sequence
  chemically treated genomic DNA (Homo sapiens)
tttgggagaagagagataagtataggtggttcgggttgtgataagggtagggaggttttgagattttcgtttgttttgagatagagggagattgtttgttgtaggttgtttttgcgggaattttttggtgttttaatttttaggatatataagttgtataaggttgtataagttggtttagggaaggggggcgcggtttgtgagagggcgagttgtattaagatggttttgtaggtttattttattttttttttatttagtttgtttagtatttatttagggggagatataggttagttatcggaggttttgagaggttggtgggttttagagtagaattgtcggtttttgagtttttattttttgaggaggaagtggattattagtgaggatgatgtagttttttcgagggttgtttcgggagttttttttttgggttatgtgagttttggatttttttggagtaggatacgggattggggtgggggtgggaggatttgggtatacgtgtgtagtagtttcggtttatatagttttcgggtggatttgtaggggtttgtttgtgttgtaggtttgatacgtttaggtatttttgtgtgtttgtgtattttagtgtgagtgtgtgtgtgtgtgtatatttgagaggttgtggttgtgattatttaagatatattttttgtattttttttttttgagtaagggtttatttgtgtgtgtttgggtgtgttttgttttttgcgtgtagttgagtatgtttatttgggtttcggttttgtatttgatggtgttgttgtagatatgtatgttgagtttgcgaggtttgtgtggtttgtttgcgatgtacgtttgtgtttttacgtggtattgggtgggaatttttatggatggagttttgtgtgtgtttatgtgtgtgtgtttgggttgtatttttaggatgggttgcgtgtttggtgtgggagttgtgtttgataatatttgggtgggggatttcgcgtgtgttttcgttttttttttgttttttttttattttatatataaatattaacgggttttttttttttaggaagttttgtttatatttttttttttttttagatttttatttttgtaggaggaattaggtaggaggtagttagttggtgatagcgcgcgtgattatagatttttgatttttatagttttagtagttgtttgtaggttttttacgggatcgtagtttgggagggtaggaggttttgtatttgcggtcggtttgatttgttttttatttttttgtttgtttttttcgtgttgggcgtcgtcgcgatacgtttcgcggatatttaggagtttttttagtttttgcgagcgcggattcgggagagagtttttatttaacgttgaggttattggtttatagattttttcgggttattttgcgaagtgtttggttttttttatttttagttttgtagtagtaataaacgggaaggaagtgggtgacgaggataggtagagattttttttacggggtcgttcgtattttatttgtcgtcgcggggcgggcgttgcggtcggtgtttagttgtagattcgtaggcgatcgtatttttggcggttttagttttaagtaggtagcggtcgattcgttttgttcgagggtttagggttgatttaggtgagtttcggcggggagggcgggcgtttcggttttttcgtttcggaattttgtatcgtttagagtcgttacgtttttcggttgtaggtttcgtatttgtaaaatgggtcgatgaattttaagggtcggtttagatttacggattgtagttgtagttgggttagaaggggtggttaggggagtcgattttattttttttttttttttacgttaattaggagtttttatttgtttgggattttttgggggtatttatgggtttatagtcgtagaattatagtattgggtggggttttagttttggggttaagtttttgtgaggtttgttattatttttttttgttgttttgtttttttgtttgtttgtttgtttggtttttttttttttgagatagagtttcgtttttttatttaggtcggattgtagtggcgcgatttcggtttattgtaagttttgtttttcgggttttcgttatttttttgttttagtattttcgagtagttgggattacgggcgtcgttatcgcgttcggttaattttttgtattttttagtagagacggggttttatcgtgttagttaggatggtttcgattttttgatttcgtgatttatttattttggttttttaaagtgttgggattataggcgtgagttatcgcgttcggtttgtttttgttttttttttttttgagatagttttattttggttgtttaggttggagtgtagtggcgtaattttggtttacgtaattttcgtttttcgggtataagcgatttttttgttttagtttttttagtagttgtgattataggtacgtattattacgttcggttaattttgtatttttagtagagacggggtttttttatgttggttaggttggtttttaatgttcgattttaggtgatttgtttattttagttttttaaagttttgcgattataggcgtgagttattatgtttggttagttttttgtttttttaaaaatttattatttagtcggtgtggtgttttatatttgtaattttggtattttgggaggtcgaggtgagcggattatttgaggttaggtgttttagattagtttgggtaatatggtaaaattttgtttttattaaaaagataaaaattagttggaggtgtttttttgaatttaggaggtagaggttgtagtgaattgagattatgttattgtattttaatttaggaggaggaggttgtattgagttaatattatgttattatattttagtttgggcgatagagtaagattttgttttttttaaaaaaaaaatagaaaaaaaaaaaaagaaagaaatttgaagtaattatgattaaatgttaatatttgtttttttacgtggtgggtataggcgtgttttggaagtttttatgttttttgtattttgagattatataaaattatgtttattattttattgtgttatatgatttttgtagaaaagttggtaaattttggaatgtacgaagaaaaagattataatagttagtaatatttttgtttagagagatagtatttattaatttttttttgtttatgtttgttttcggaaaaatgggatattattggtattattttataattttttaatttgtattaatattttttatattttttaaattgaaaaagttggttaagtatggtggtttaggtttgtaaatttagttaatgtgggaggatcgtttgagttcgggagtttaggaatagtttgggtatcgtggcgagattatattgttataaaaaaaaaaaaaaaaaaaaaaaaaattagttaggtatggtggtgtatatttgtggttttatttatttaggaagttgaggtggaggatcgtttgagtttgggagtttgaggttgtaataagttacgaatgtattattgatttttagtttgggtaatatagttagatttttgttttagagagagagagagagagagagagagagtataatgaaaaaaataaatttgattttgtatagagtatgtaataaaatttgtgcgtttttggttatttttttttggttttttttagggtgttgaataagtttttttttttttatttatttaggagaatttttttttgttgattttttgtggagttagattaggttgtgatttagaatttttttttatttttatttttttttatttttttaatattagtgttaattttagatgttaataattttacgagtgagttttttttgttgttaatatatttaggttttgtttttcgttgttgtttttatttaatttttttttttttttttttttgttaattttgttttttttgttttttgtttttttgatttttttcgtattgtttgattgttttagatatattttggttttagggttttggtattttttgttttttttgtttggaagggttttttttagttagatattgaggttatttattgtgtttaagtttttttaatttatttgaaatgagtttgggcgtggtggtttacgtttgtaattttagtattttgggaagttaagtcgggtggattatttgaggttaggagttcgagattagtttggttaatatggtgaaattttatttttattaaaaatatagaaattagttgggcgtggtggtataaatttgtggttttagttatttaggaggtcgaggtaggagaattgtttgaatttgggaggcggaggttgtagtgagttaagatcgtgttattgtattttagtttgggtgatagagtgagattttgttttaaaaaaaaaaaaaaaaaaagaaaaagataatttatttgaaattatttgaaatgtattattttgtttttattattgatttttttgttgttgtagttttttttgtagtatttattagtgtttgagaaaattatttatttatttattttgtttttagttttttttgtttttagtttgtttttagttaatgaaagtttttttttttttttttttttttttttttaaaatagagttatttaggttggagattagtgatgcgattacggtttattgtagattcgattttttgggtttaggggatttttttatattttttggttttttggggattgagattataggtatatattattatatttagttaatttttgtattttttgtagagagagggatttgttattttgtttaggttgtttttgaatttttgagtttaagtaatttttttaatttagttttttaaagtgttgggattataggtgtgaattattgtttttggtttgtttatttaaaaaattaatatttatttttagtttattggttaagtttagaagtagtattagaatgtttaagagaatttattgttttttttttatttgtatgtttgtattgtagatttttaataattgataaggattttttaaggtgtttgtttggtggagatatttaaaaagattaaagaataggttaggtgtagtggtttatgtttgtaattttagtattttgggaggtcgaggcgggtggattaagaggttaggagatcgagattattttggttaatatggtgaaattttatttttattataaatataaaaaattatttgggtgtggtggtacgtgtttgtagttttagttatttaggaggttgaggtaggagaatcgtttgaattcgggaggtagaggttgtagtgagttgagatcgtattattgtattttagtttgggtggtagagtaag

SEQ ID NO: 21 - DNA, 6240 bp, Artificial Sequence
  chemically treated genomic DNA (Homo sapiens)
ggaaggttagatttttttttttggtttgatttaaatcgaggttttttttttttcggtatatagaatgtaggagggataggaggtgatggggagggtttatggggaggaattaagtgtggttttgtttgtttttggtttttttgtaaatattgtgatattttcgaatagaggaatagttgagataagtgattgttaattttttagtgtcggggaggaggttgggtcgtttttttttagattttagtagatggtggatgaaatagatttttttcgaggtaagggtagtgggaattgttttattttttgtttttttagtttgttttgaacgttttttttatggttagtttacgtcgaaaagggttttattggtttttaagagttttggggattcgttttagttttgttattttattgggatttataaggttagttaatttggattttagttagtattggtagtttgggtagtatttagtaaagttttgtgggttttagagagaatagttaagtagtgcggttaagttttttattttgtagagaaatatatttaggggagaatagtgagggtttatttaaaatgtagatttaattttttagggtggaatttaggaatttgaatttttattaggtagtttaggtaatttggttggaggcggttttagtattatattttgagaaatagtagattaagtatatgtgaaggtatttttggtggtggttgggaatagggtttaaaattaggtgtttgagtttgaattgttattttattatttgtttatttgtgtgattttagataaaaaaggtttagtggttttttattttataggatataaattggttttttttaaattgtaggaagtataatttagttagaattagtaataaaaaaaataatattcggagattgtataataatgtgaatgtattgaatatttttgaattttgtatttttaaatggttaagatagtaaatttgatatatgtatattttattataattaaaaaaaaatttagaatgtattaaagaggagatgttattttttttttttttgttttgtaattttttttgagatgttatttttatatgtttaaaaagttaattttaatttttaaattaagtggatttgtaaaaagtagtttaaataaaatttagttatgaaattttatttttttgttggtttatattttaaaatatataaaatagggtttaaagtttttaaaatgtggaaattaaggttaggtttggtggtttatgtatgtaattttagtattttgggaagttgaggttggtagattagttgagtttaggagtttgagattagtttaggtaatatagtgaaatttcgtttttttaaaaaatataaaaattagcggggtgtgttggtatgtgtttgtagttttagttgtttgggaggttgagatgggaggattagttaaggtgggagaatcggttaaggtgggaggattatttgagtttgggaggttgaggttgtagtgagttttgattatatcgtcgtatttgattatatttgggtaatagagggagattttgtttgaagtaaataaataaatatataaaaataaaataaataaaatgtggaaattgagtggtaatataaatagtaaatattaaataattataaatttttaagaaataagtattcgtttttgttatatatataatatatatgaaaatatattgttttgagtgttaggtaatgaaattgagcggaataggaaatatattttttaaatattttaagggtgaatattgttttataaaattgttgttgtgttttgtattgttttattggttttttattagagttaatggttttgagatgagggggttggaagtggttttttagattttcgaagtttgtgcgaaggataaaggttaataattatggttttttatttttgagagtttttgtatttatagtagttatagtgggagttttttattagttatttttatgtagaaatttttttttttatataaatgtttataaattttagttttgttttatttttaaaaacgaataatattttttggggaaggttttttcggtaatttttttagatttttattttttttttgtgattattttgttgatattttttttttttttttagtttgtgttatagttgtttgatttttttgtaattgttacggaggatgagttttgttttgttttatttattattgaatttttaattagtatagtttttgttttgtaaagatttgttgaattaatgaagaatgaaattaatttgattttttaaaaggtagagttattattgtttttaaaagtattattattatatatataatttgttttgtattttttatattatttatagtatttgtttttaattattataatatataataatttttgtaataagtgttatggtattatttttgagagggaaaatttggggtttgggaaggttaagtgttttgtttaagattaaatagatagttagtaagtgataaaggtagtatttgagtttagttttgtttggttttgatattagttttatttttttttttttttggtttttttatatttttatgagataaggtagttttatttttggtattttgttaataaatatttttattgtaaaatgtttgttgtgttgtatagagtaattttagttaggttttttattcgattttattatatagttgtttatcgcgttttttttttagattaatttaaatatggttggggagtttagaggggagggtttagtattttttagtcgggataagtatttaattagtaggtttttttagtatattagtttaagattattttagagagagatgttagtgtttagttttttatttttaattggtgtgaattgaaggaaaaatataagtattaaaaattaaagttttagttaagaattgagaatgtagggtattttagggtaaattagtgatttgtgttttttttatattttttttttttttttttttttttttattttatgttattttttttttttttttttaaaagtttaagattttgtaaaatttgttttttatagaggagatgatatttgttatttatgttaatgttttttatattttaatgtatatattaagtaaatgaggattttgttgaaaagcggattgggatggtttttgagattgtatttttagtttatttttaggttatgataatattgtttgtttatgggttgtattttgagtagtaaggattggtgtagttttatagtttaagttgttgttatgttttttattaaagtatttgtttttgtagttttgtttttatttggagtgagggtttttgtttttagtttaaagatgtttatttttttattattaagtgggtaagttatttttggtatttgtttttttatttattttggtagtaggggatttttttttggtttgaagattagagtttgaatttgagtaaaattttgtagtatggatgagggttatttaataattgggttggggtaaatttggttttttttttagtaagatttggttaagtttttatagaaatttttttttgatttttttttggttagattttgatttatgtatgggttggaattcgggtggttttggttaattttagttttttgatttagatgagtttagtattagttttttgagtaaagttatttaggttggcggggattagattagaagggtgttttgttttgggtgttttttttgtagttatttagatgtgttgttgcggtgttttttgtgttggtggtagttttggaagatgagaagtcgttgttgtttttttgtcgttttggtttagttgttaggattttttagtagagggtagggcgttaagtttttttattgtatgtggtttattgtttttaaggttggtagggttgcggaggatcgaatttatagattatttagggagtatttatattttagaaagggggaggggtgggttggcgttatttagtttttttttgttttttattttttagcgtttgtttttttttagttttttatttggttatttttttgattgttttttttttttttttatatggtttgggggttttttggttgatttttttttttgtttttggttttatgaatggtttcggtagttttagcgggtgcgaaggggattaaataaggtaaggtggtagatcgggttttttatttttgttttcggttgttttaattgattttgtttattagcgttttataaagcggtttttttggagttagttatttagagttcgttgtcgtcggagtcgagtcgattcgtttcgtcgacggtgagttagcgttcggtttttcgcgtttatttttcgtttggttcgcgggtcgcgtcggacgttagtttcgcgtcgttatttggttagttcggttcgtatttagttaaggttttagtttttgtcgttttgcgattgttttttttttttttttttaaagtttatattttttgatttggttttaatttgttttgttttgggcgttggttttcgtaggatttcgtaggggttttaagaaggggaattttgtggttttttaaggggtttttgggtttttattttcgtgcgtttttttttttatttggggtataggtatggcgatatggatagggttggagatcgagtttttagttcgtgaaaaggaagaaagttaaagggttggggaggattaaggggttgggttttttgggtttttttttgtatttggtattttagttggaatttttggttagggagtttgggtggatttttttgtttttttttgtttttagtttttttcgcggtttttttttttttttttatgattcgaggggaagggaggtggtaggagtgtttttcgtttaattttttgtttagtttttataatttttttttgttttgttttgttttttgggtgcggagaaggttagttgtataggtagttaagcgtggttcgtttttttttttttaatttgtagaattttttgaagttgtgttaagatgtgtgacgacgaggagattatcgttttggtgtgcgataacggttttgggttggtgaaggtcggttttgcgggcgatgacgcgtttcgcgttgttttttcgtttatcgtgggtcgttcgcggtattaggtaaatttttcgtcgagtttttcgttttattcgggatttttttagtttagcgatttaggaaatggtttttatttgatttttttgttcgatgaattttttaggttaaattaagagaaggttgattgattttaaatttaagttaaggtaagtaatattttataaaattttaatatattgaggaatgtatatttgagtggtacgtttttaaaagggttttattttttggtgtgaaagttatttgtttttttttattaatggttttttggatttttagtttttagtgttttttttgttttatatattttatttttttttttgttttttttttttagttttgtttaaaatttttaataatattattttttttaattaattaggattaaatttatattttttttttatgtttatagttagtttatagggttttttaaaggtgtaattaatttattttttttttggttgttgtatttttagaagttaggcgtgatagaggtagtaagtgttatggtgatagtgatatattatttcgtttgttaaaagatatgttatgttttttgggtttgttatatgtttggttagataggttgttaagtaggagagtttagtttttagagttggtgaatgattttagaatagttttggataggttgaattttattgttggagtgaggatggtatattagtttattattatgtgtttatttgaatgttaaaattttttttttaggagaaatataatgtgttattaatttagttattttaaaatgtagttatttatattttagttgatatgggtgatgagtttaataatttaatgaaggtatatgatatttttaaggtgaggtgaggttttgtttttttagtggaatagttttatttttttttgagttatatttttaataatagaattatatatttttgggggagtggggagaaggtagaagattgatttttaaataatttttttaaattggggtaaaatcgtattgtttgttatttttggtatttaaatatgttttttgatttgggtagttagatataaatggataagatattgattatatttttgatatggtgagagtatgatttttttattttttttttttatagg

SEQ ID NO: 22 - DNA, 6240 bp, Artificial Sequence
  chemically treated genomic DNA (Homo sapiens)
tttatgagaagaaaaaatgagaaaattatgtttttattatgttaggaatataattagtgttttgtttatttatatttaattgtttaagttaaggaatatatttaaatattagaaataataagtaatacgattttattttaatttagaagaattatttaaaaattaattttttattttttttttatttttttaaagatgtataattttattgttgagaatataatttaggagagaatgaagttattttattgaagaagtagagttttattttattttaaaaatattatatgtttttattaagttattaagtttattatttatgttaattggaatatagatgattgtattttggaatgattgaattaatgatatattgtattttttttaagaaaaagattttgatatttaagtgaatatataatgatgggttgatatgttatttttattttaatagtgaaatttagtttgtttagagttgttttggagttatttattagttttgaggattaagtttttttgtttggtagtttgtttggttaggtatgtgataaatttagagagtatggtatgttttttaataaacgaggtggtatgttattattattatggtatttgttgtttttgttacgtttggtttttaaaaatgtaatagttaggaaggagatagattgattatatttttggggaattttgtaaattggttgtgaatatgagagaggaatgtggatttggttttggttggttgggagaggtgatattgttagaagttttaaataggattgaaaagagaggataaggaagaaaatgaagtgtataaggtagagaagatattaaagattaaaagtttaaaaggttattagtggagagaagtaggtggtttttatattagggagtgggatttttttagaggcgtgttatttaggtgtatattttttagtatgttggggttttgtggagtattgtttgttttggtttggatttgaagttaattagtttttttttaatttggtttaaagagtttatcgaataagagggttaggtgagagttattttttagatcgttggattgaaggggtttcgagtgggacggggggttcggcgggaagtttatttggtgtcgcgggcggtttacgatggacgggaagatagcgcggggcgcgttatcgttcgtaaagtcggtttttattagtttagagtcgttgtcgtatattagggcggtggttttttcgtcgttatatattttggtatagttttagggggttttgtaggttgaggaggggagggcggattacgtttagttgtttgtgtagttggtttttttcgtatttagaggataggatagagtagaagggggttgtggggattggatagggggttgggcggggaatatttttgttatttttttttttttcgaattataaaagggagggaagaagtcgcggaggagattggggatagagaagggtagaggaatttatttaggttttttggttaggagttttagttagggtgttaggtgtaaggagggatttaagaaatttagttttttagttttttttagttttttaattttttttttttttacgaattgggaattcgatttttagttttgtttatatcgttatgtttgtgttttagatggaggggaaagcgtacgagagtagggatttaaaagttttttggggagttataaaatttttttttttagagtttttgcgaggttttgcgaggattaacgtttaggataaaataagttagaattaaattaaaaagtgtgggttttaaaaaaaaaaaaaaaaggtagtcgtagagcggtaggagttggggttttggttgaatgcgggtcgggttggttaggtggcggcgcggggttggcgttcggcgcggttcgcggattaggcgaggagtgaacgcggagggtcgggcgttgatttatcgtcggcggggcgggtcggttcggtttcggcggtagcgggttttgggtggttggttttaggagggtcgttttatagaacgttgatggatagggttagttggagtagtcgggggtaggggtggggggttcggtttgttattttgttttatttggtttttttcgtattcgttaggattgtcgaggttatttatggagttaagggtaggggagaggattagttagggagtttttagattatgtaaggaaggggagggggtagttagggggatggttaaatagggagttggggaggggtaggcgttgaagggtagggggtaggggaagattaagtgacgttagtttatttttttttttttttggggtgtgggtgttttttggatggtttgtggattcggtttttcgtagttttgttagttttggggataataagttatatgtagtgggaaggtttggcgttttgttttttgttgaggggttttgatagttgggttagggcggtaggggagtaatagcggttttttattttttagggttgttattagtataaaggatatcgtagtagtatatttgagtggttgtaaaaggggtatttaggatagggtatttttttggtttagttttcgttagtttgaatggttttatttagagagttggtgttgggtttatttaggttagaaagttgagattaattaaggttattcgagttttaatttatgtatggattagggtttggttagggaagagttagaaaagggtttttgtgagagtttggttaagttttgttggagaagggattaggtttattttagtttagttattgggtagtttttatttatgttgtagggttttgtttaaatttagattttggtttttaggttagaaaaggattttttgttgttaaagtgaataaaggaataaatgttaaaagtagtttgtttatttgatggtggggagatgagtatttttaaattgggggtagaggtttttattttaggtggagataagattgtaaaggtaaatattttgatggagaatatagtaataatttaaattataggattatattaatttttgttatttaaagtgtagtttatggataagtagtattgttataatttggaaatgagttagaaatgtaattttaagagttattttaattcgttttttagtaagatttttatttgtttggtatgtatattaaagtgtgagaagtattggtataaatgatagatattattttttttgtggaaaatagattttgtaggattttgaatttttgagaaggaaaaagaaaaatgatatgaaatgaggagagggagaaggaagagggagatgtaagaaggatatagattattagtttgttttggggtgttttgtatttttagtttttgattggagttttgatttttaatgtttgtgttttttttttagtttatattagttaaaaatagaaaattgggtattggtatttttttttagagtggttttgggttgatatgttgaggaggtttgttgattagatatttgtttcgattggggaatgttgggtttttttttttgaattttttaattatgtttgggttggtttggagaagaaacgcgatgggtagttgtgtggtggggtcgggtaagagatttggttgagattattttgtgtagtatagtaggtattttatagtgaaaatgtttattgataggatgttaagagtagaattgttttgttttatgaaaatatagaaaaattaaggaaaaggagaaatgggattggtgttagagttagatagaattgggtttaaatgttgtttttattatttattaattatttgtttggttttgagtaagatatttaatttttttaagttttaagtttttttttttaaaagtgatattataatatttgttgtagaagttattgtgtattgtaatagttagaaataaatgttgtaagtaatatggaagatataaagtaaattgtatgtgtaataatgatatttttggaggtagtagtagttttgttttttaaagaattaggttgattttattttttattgatttagtaaatttttgtaggataagaattgtgttagttaaggatttagtgataaataaaatagagtaggatttatttttcgtggtaattatagaaaagttagatagttatggtataaattgggagggaagaagaggtattagtaggatagttataaaaagggaatgggggtttgaaagagttgtcgagaaagttttttttaggaagtgttgttcgtttttaaaagtagagtagaattgaagtttatgaatatttgtgtgagagaaagagtttttgtatgggagtggttggtgagagatttttattatgattgttataggtgtaaagatttttaggaatggaaaattatgattattgatttttgtttttcgtataggtttcggggatttaggaggttatttttagtttttttattttaggattattggttttagtgggaggttagtagaatagtgtaggatataatagtagttttgtgaaataatatttatttttaaaatgtttgaaaaatgtgttttttatttcgtttaattttattgtttaatatttaaaatagtgtatttttatatgtgttatgtgtgtagtaagaacgaatgtttattttttaaaaatttatgattgtttgatatttattatttgtattattatttaatttttatattttatttattttatttttatgtatttgtttgtttgttttagatagggtttttttttgttatttaggtataattaggtgcggcggtataattagggtttattgtagttttaattttttaggtttaggtgatttttttattttagtcgatttttttattttagttgatttttttattttagttttttaaatagttgggattgtaggtatatgttaatatatttcgttaatttttgtattttttgaagagacggggttttattatgttgtttaagttggttttaagtttttgggtttaattgatttgttagttttagttttttaaagtgttgggattatatgtatgagttattaagtttggttttgatttttatattttaaaaattttgaattttattttatatattttaaaatgtaaattaataggaaagtaagattttatgattgagttttatttaaattattttttatagatttatttaatttgaaaattgagattggttttttaagtatataaaaatgatattttaaaaaaaattataaaataaagaagaaaaaaatgatattttttttttggtatattttagatttttttttaattatggtaaaatatgtatatattaaatttattattttaattatttaggaatatagagtttaaaagtgtttagtgtatttatattgttgtgtagttttcgagtgttattttttttattgttaattttgattaaattgtgttttttgtagtttgagaaagattagtttatattttatgaggtagggaattattgagttttttttgtttgaggttatataggtgagtaaatggtggagtgataatttaaatttaggtatttgattttaagttttatttttaattattattaaaaatatttttatatatatttggtttgttattttttagaatgtgatgttagaatcgtttttagttaaattatttagattgtttaatagaaatttagatttttgggttttattttggaagattgaatttgtattttaaatgagtttttattgtttttttttaggtatgtttttttgtagagtgaaaaatttagtcgtattgtttggttgttttttttgaagtttatagagttttgttggatgttgtttaagttgttagtgttggttggagtttaggttggttgattttgtagattttagtgggatggtagagttggggcgggtttttagggtttttgagggttagtgaagtttttttcggcgtggattggttatgagggagacgtttagggtaaattgaaggaatagaaggtgggatagtttttattgtttttgtttcgggggaagtttgttttatttattatttgttgggatttggaagggagcggtttagtttttttttcggtattgggggattagtagttatttattttagttgtttttttgttcggaggtgttatagtatttatagagaagttagaaatagatagagttatatttaatttttttttatgagttttttttattattttttgttttttttgtattttgtgtgtcgggggagggagagtttcggtttagattagattaggggggaggatttagtttttt

SEQ ID NO: 23 - DNA, 16545 bp, Artificial Sequence
  chemically treated genomic DNA (Homo sapiens)
  unsure 1461, 3953: n is a or g or c or t
ttaggagtttgagattagtttggttaatatggtgaaatttcgtatttattgaaaatataaaagttagttgggtatggtggtgggtgtttgtaattttagttatttaggaggttgaagtaggagaatcgtttgaattcgggaggcggaggttgtagtgagtcgagattgtattattgtattttagtttgggtagtaggagtgatatatcgttttaaaaaaataaaataaaataaaataaaataaaaattatatagaattatatatttttaaatggttaatattgtaaattttatattatatgtgttttttataattataatttttaaaagttaaaatgtataaaaagaagtgtttagtttttttaaggatgttataaaatagatattaaataggaaagatatttgattaaattttagtaaggtaaatgttattagataaaatcgaaaggtaaatgtttaaattggggggaaaatatttgtaatatttgtagtaggtaaaaggttaattatattattaatataatatattaagattttttataatttaagaagataaaggtgaataatttaatagaaaaaaaaagtaaataggaagtagttatttttagagaaagataagttaaaaaaaaaaaaaagttaggtcgggtatagtggtttatgtttgtaattttagtattttggggtgttgaggtgggtagattatttgaggttaggagttttagattagtttggttaatagggtgaaattttatttttattaaaaaatataaaaattagttgggtatggtgatgtatatttgtaattttagttattcgggaggttgaggtatgagaatcgtttgaatttaggaggtagagaggttgtagtgagttaagattatattattgtattttagtttgggtgatagagagagattttgttttaaaaagaaaaagaagaaaagaaaagttgatataagtaaaatatgtgtttatttttattagttattatataattttatatttttatgagtcgggtgcggtggtttatgtttataattttaatattgtgggaggttgaggtcgttggatcgtttgaggttaggagtttaagattaatttgggtaatatggtgaaattttgtttttataaaaaataaaaataaaaataaaattagtagggtagggtggcgtttgtttatatttttagttattatggaggttgaggtaggagaattatttgagtttaggatgttaaggttttagtgattgtattattgtattttagtttgggtaatagagcgagattttgttttaataaaataataataattttaaaataagaagatgttaagtttttttttttcgattaggaaatatttaaaagatgggtaattgttaatgatttatatggtttatttggatataaggagagagagttagatgagtagagaggttcgtttggataattgtttatttaaggnaataatttaagatgtgaatatttagttcgtatatttttttttttttttttttaattattgtatatattatttttgtaattagggaaaaaattaaatagttttaaggtggttaatcgtatgaaaattgatatgtttttaatgtaataaataaatgtaatgtattgaaaaaaaattttattaatgttaattgaaataatatgaagagggaggtggttttatatttttttaggagtataatttggtataaatttttgtaagataatttggtaggttttattaatattttatatgtgtttatttaattaaataattttattttaataaatttattatatgaaaatatttttatatgtgtataaaggtatatatataaagttttattaatgttagtaatgtttgtatgagtaaaaatgttggaaatgatttaagagtttattaataggatattggttaaataatttatggtatatttttattatggaaaacgatgttagagtttaaaaaattatataaattgattttgaaagatatttaagagtattattaagagaatatgataagttttagaataattgtaaaaatatatgtaatgatataattttatttttgtaaaataatgttaaaatgttagaaaaaaatttggaaaaaatatttttaaaataggtattttattgtttttaatagtggttttttttgatttaggtttaagtgggattatagcgaatatttgttttttaaaatatatatttttgtattttttgaaatttttgattgaatttttgaaattagaaaaaaatgttaaatataaataaatcgagtatttggtgtaattttttttattttttgatttttttttaaatatttttttagagttttagtttatttagttagtttttgttttttcgtttttgggttgtttggagtttagattataattagtgtttttgttataggttttttattgtttatcgattggttgtgttaattaagaggggaatgtttatagggtaaggtgtttttatttgtacgttgattacggtgttgagtgattagaagaaagtttattttgtgaaataatttttattttgagaagggaaaggatgatttttttaaatttatgattaggttaagggtgattggtattttgtttttgttttggttttatttttatataagaagagagaattagagggggagtttatgattttgttatttagcgttgagttatttgtttcggttagttgggattgcgagtattttgtttatgttgggatagtttatattttatttattgttattttttatgtagtatagtttcggaaagggagtttttttttttttagaatttttagtgagggttttttaggaatttgaaaagtttaggaagttttttataggtttggaatttagatttaggtattaaatacgtaggttagtgattaaatgatgagtaagtgaattttataatgataatagtgttttttttttatagggaataattgtaggtttttaaggaaagtgtttttaaattttttttttgggttgttttagtagaggatattttttatttatattattttttgttttaatttttagttaatgaggaagttagatttgtattaagttattgtattaggtgatttaaaattatttggaattttttgtgcgtttagagggatgtaatgtatgttttttttattgaagcgggggtattttgggtatcgggtggggaaagtttaagaaatatagatggttgaggtttatttattgagtttttgttttaatagggttaggtgatatttgagaatttgtattgtgagtatatttttatattatgttgttgttgtattttggtggtttttatgttttgggaatttttgtgttgaagacgaagtagagttaggaaggttagttaggaagttgcgttttattttaggttagataggattggagtttgaggtagcgtaggttagtagggattgagggaggatatagagttgaggggtatttttggtcgggggagtattaggttgtggtgtttaggtggttgtgggagtatgagggagatatagggttttagattgattgatttttagtttgaagggtcgaggggtggatttggaagttggtaatttaggaggtatagtagttttgagggtagggaagaagggtttagttttagataggatgagtttgaagagttggagagttatttggattgggatgtttaataggtaattgattattttagtttggattagggtgagggagggggattatgagaatgtggagttgaaagtaatattgtagagttggtagttgataatgtgggaaatgaattagttatttagggatagtatatgaattatataaagaagagtaattattagttagttatggtggtttatatttgtaattttagtattttgggagattaaggtggagggattgtttgaatttaggagtttaagatcgagattttgtttaattanaaataaaataaataaataaaaagaagtttaggcgtagtggtttatatttgtaggttaaggtaggtggattacgaggttaggagttcgagattagtttggttaatatggtgaaattttgtttttattaaaaatagaaaaattagttgggtatggtggtaggcgtttgtaattttagttatttaggaggttgaggtaggagaattgtttgaatttgggaggcggaggttgtagtgagtcgagattgtattaatgtattttagtttgggggatagggcgagattttattttaaaaaagaaaaagaagtagtttaagaattataggattgtggaaaattttataggttaagagttttgttaggtgtgttttaattttgaagtaggttttttagtttgtagatatttagagatatttaaaggaaaattaggaaggagttaagagagaatgaagtttaaggtgttttgagatttttagagaatttagtttaagggttaggagtttgtgttaaggtgtagtaggtgagtagggtacgtaggattttttttttgggtacggaaggtatttttttttagtttttattggttttaggttcgtgttagataaggtatgattgtatttattttggggatagtgtttgggcgttttaggtagatttaggggtcgtatgtagtagggtttgaggagggaggtgtggacggaggaggttcgttgttatttttggtatggtttttattttaggagtatagttgtatttggttttattttgggtagtttataaggtttggtgtgagttttgtttatgtaagtgtagtataaaaggaataaatttattagtatcggggttgttgttattgagtttttttgtatatattttttaaatgataatttattttatttattttttttttttatttttaaggcgatttattgaaaaaattattttatatggtaatattgttaatatatcgttagttggtttttttagggattttgtttaaagaagattcgtttttggggttttatattgttttggtatttatgttaaagatatattagtttttagttattgggagaagaattttttatattttcggtaagtattgtacggtttttgttattttttttttttcggggttgtttggttttttgggtgcgggaggtgtttttagattggtttggtttttgtgacgttggtttagattatatattagagtttttggtgggtagcggtatttgtaagtatattgtagtttgttgagaaaaggcgtatttggttatgggatattttggggtaggggtagtttggaatcgtgttttttgttttagaatggggattggcgggatataatgtttgtagtttttattagttttgttttttagggttagtgtagatttatattttgatgttttttgttttgggttagaatgtttgggaggttgttttaggggattatatattttgtagaaaagtagttttttagaatatttgagttaaagttaatagtggttttggtgtttgtgagttgtttagtttatgaaatgtttgtgttgggaatgggagggtattttttttaggttttttgtgggtttttttgttttttgatttgtgtttggttgaggagaatggagggtttttgtagtttttgaaggttttaggattattgggggatggagaaaattttatttgttttgtggtatcgtgaggttttagggtagaaggaatttgggatttatttagtttatttttttttgatgaggatattgaggtttagagacgtatagttatttatttaaaagatttatatttaattgtgatttatttgtagatgttattattttttttaatttatttaatatatatataatatatgtataaagaattaagaggaagatgagatgaaggggttatttttatgtttggtattagaatttattagtatttttttataggtgaggtaggttgggtgtggtagtgtaggttttgaaggtagattgttaggttaattaagttattgagcgattttagtttttttatttgtaaaatgggggtaagaataataatatttatttggcgatggtgtgaggattaaacgagagaatgcgtatatatagtatttagtttaaggttgttagggttcggttttgagtttttaaattttaagaattatttggagtgtttgttaaaatatagattgttttatgttttattttagattttgattttagtaggtcgagatatggtttgatatttggaatttttaataagtttttaggcgatattgaagttgttggtttgggattatattttgtatagggaggttttaagtgtttattttgattatttgaatgtgggtttggattttgatattaatttttgggttgaaaagaggaagagttttttgtgatagagagggatgggtgttggagaaattgtaatgaatagtaagattttatatgttaggtttgagaaaaggggatgggtcgtgtgatattatgattttggggcgagatattttttttttttttttttgtttattttgttaatatttattgagtatttattatgggttaggtattgtttttgttttttagggatagtggagaggtttttgtagttattggaagagatagataaatagatgagaattatggagtaaataagtatacgaaaggggtaaaggttaggaggagtttattatttaatttaggagttattagggaagattttttggaggaagaggtgtttgagtttggttttgaagtaaggattaagtttggttttttttggtaaagaggaagtatggtttttgggatttaagtggtttaattttattgaatttagatagtaaggtaggaattaggtaaaattaaatttagaggggttcgtagggttggattataagggttttagattttaaaggattaggttatggggagttatggaagggttttaatttggagggtatttgttgaaggggttgttttggtagttgtgaggagagtggattggaatagggtaagagcgttattgtagtatgcggtggttttgagttggtggtatgggtgtcgtgtaggtagaagtaagaagggttggtgataggttgggagggaagagggcggtattagggtattgggtatgggtttagggtgggtggtgtgagtttgtgagggtagtttcgggtagaggttgttgatgaggagagtagttttggaggtgtggagttggggtgttaggggggttttggtgggggagatgtacggtaggttttgtaggtttagagtttaagagaggggtttggataggagtagagttaggggagtgaatggaagttcgggtaagagttagaagataaggtatttacgatagattgtggaggatttaaaatattatttagtagagttgtttttaattgaatttatgtatatatagaatttagtgaagatattttgaagttaattagaggtgttgttagaattttttatcgtggtagtgttttttatagataatttttttttgttagggtttttgatggtttgtatatacgtgtaggtaaataataaaaggtagagacgtagttgtttatatgttatttgaagtttttatttaaaaatttgtcgttaattattgtttgaaattttattatcgtagaggtttttcgtttaggtttaatattttttgttaaaatgaaaatgtttttgagaattgatataaatttaatttttaatagttattgatgtgtgaaatggattatttaattttttttaatatgataggttttattttgggagtaagttttgatggagaagagtaagagagattaataagaattattattttttatagtttttgacgatagggattgacgaagttcggatagtaaatattttaggttttcggagtttgaagttttttgttataagtatttaattttattattgtaataaaagtagttatagataatatgtaagtgaatggatgtggttgtgttttagtaagattttattagattttgagatttgaatgttatataatttttatgggttatgaaatatttttttttttttgttttttttttaatcgtttgaaaatgtagggtcgggtgtagtgtttgtatttgtaattttaatattttgggatgttaaggtagtaggataattggaggttaggagtttgagattagtttgggtaatatagtaagattttgttttaataaaaaaaatttttttttgaaattagtagaatgtagtggttatgttagttatatgtttgttattttagtttttaggatgaggagaaaggatttttgagtttaggagtttaagtttgtagtgagtttgatggtgttattggatttaatgtttaggtgatagagtgaggtttagtattttaaaaaaaaaaaaaaaaaagaaaaattattttgagatataggttatatagaaataggtcggaatttgttttattttgatttataatgtttacggtatttttattttcgttttgttattttgtgagatagatattattatttttatgttttagcggaggaaattaaggtttagggaaggaagggattgggttgtgggaaaggggaattaggagggagaagagggtaaaggaaggaggagtagtgggaggatttttagagttaaatttgttttttttgaggtgttggggagggtggattttaatagttttgtttttatattgggtttgaggtggttagggagacgggtgagtgagtaaatgatttgtatttattatgtttttggtttttggttatttttggggttaggggaataaaagttttatttttgagttagtgagagttttaatgaagtttagatgttattcgtgttgaaagaattagaataattttttgttttttgttaagtatgaagcggttgtgattttaggaaattatagtgattttgattttggtttagttgatatgttcgagtttagttataaattattagaaagtagttgaggaaagtttagaattttttttggtagagatggtttacgagtttggttttagggtgaattttttttttttagagtagtacggggttttttggaggttcgatttcgttagtttttttattgttttttttttgttttttttatttttatttcggttgagttttgtttttaaaatagtagattttaagttatttgaagggttgtagaatagcgttgttgatagttttaagtcgttttgtggtttttttgagttgttgttgtgttttggaaataaaattttaggttttttttttttttgtgtgtgggaaatatcggagagagtttggggagggagataaaagggtttattgaaaatttagataggtttgaattgtaagttatatcggagagagggttgttgaggggattttagagggaggtagtttcggagtatagttttgtttttttggttatttttttgttttggaggttgttttttttttaaggtggattatttgttagaatagggtagtattgttgtttattggttagtttggagagaagattgtttatgtgattttaagttaggtttttgtgattgaattattatgaggttggattgtggggattcgggtattttagaggtagagtatattaggtttgggaggggggttatttagacggtaatattgttatttaatatttattgaatatttattgttttaatttatgtttgttgttattatagaatatgtgagattgggttatttataaataatggaaatgtattttttaaagttttggaggttgggatatttaagattaaggtattagtagatttagtgtttgtttggtgagagtttagagtttgtttttaaggtggtattttgttgttgtatcgttatatggtagaagagtaagagagagtgagaagggattaaattcgtttttttataaaaaaatttatttttgagaaggatattagtttatttaagagggtagaattttgttgttaaaattggtaattaaattttaatatgagttttgagggggataaatatttaaattatagtatcgtttgtgtgttaaatatttatttaggtgttggggttgtaaaaagtaaatttaggcgtggttttggtataggagggattttattttatagagagaaaagaatatagatttttttgttttagggtgtttgttgttaatcgttttggagagataggttgaagtaaaaatattaaatatggagaagttatgatagttttttaaagtagtgacgaaggtatattttaggtttgggaagtgttttcggtgggtgttaggtttgttttttttagttttttttcggtgaagagatttttggttaagttttttattttttttgagatttggaatatattgttgttttatttattaaagtaatttgtattttttttattgtattaaatattttagtttttttattgtatggaggtttttagtaattagtttataagttaatttatttattatttagtaattttttttgatattgagattgtttttaattttgattattttaaataaaggtgtgaaaataggttaaatttttttatttatttatgattattttataaagatagattcgtagaataagtatttttaaatttttttttagaaaagtagtataatttaatatttataagtagtgaatgtgaagttaattttttatatttttgttagtaagggtggttttaagaattatatatagtattttagttaaaggtaaaggtagtttttattttggttatagtatattgttgatggttaataagatattaagttttgtttatagatgttaaatagagttttttttttttttttttttttttttttttttttttttttttttttgagatggagtttcgttttgttgtttaggttggagtgtcgtggcgcgatttcggtttattgtaacgttcgtttttcgggtttacgttatttttttgttttagttttttgagtagttgggattataggtatttgttattatgttaggtttattttttgtatttttagtagagatgggttttattatgttagttaggatggtttcgattttttgatttcgtgattcgttagttttggttttttaaagtgttgggattataggcgtgagttattgtgttcggtttaatgtgttttttattaatgtatttgataatgggatttagttgtaggtttaataattttgtattgtaattttgaagtagtgatgtttagatgttattttgagatgttagtaataattgtaatgtaatatgaaaatattttgatttttattggtgataaaattataaatattattattattgtattttgaggtttatatttaaaatggaaggaaatgttaaattttagttattggttagaaaaaataagaaaagttttttttatttcggtttatagattttttgaattttattaatgaatttttgtgaggtttttggattttagattaagagtttttttattagaaaattttaggtatttttaggtttttttttgtatgttttaggaattttgagtttcggggatttagtttatagggtagtaggtaggtttaagttttattttttttttagtttttggtttaggggttgaagtggagatggtagtttttttttagtgtgtatgtatttttgttggtaggaggtaagtttttggcgtaggttaagagttgggtttatttaagtttagttgaggttattttttgagttttagggaggaagaaggttttgttttttagtcggcggttattgtttttttttttagtttttagtttttgatttttagtagtgtcgggttaagcggagtgtttttattagttatttgtaggttttagttatttagtttttttttttgtttagggttggggttggatagggtttattttttttatagtttttttttttattttttatatatataattttttgtttagttaagtaagtttaggttatagaatggtattagaggggtttgtggttagttattttattttgagggtagcgcgggtattacggggtggaggggagggggaggttgtcgggagtttttagatgttgtttgttggtttgtaggagagttttgtaatagttgttgtttttgtttcggtaatcgttttattttttttattttagtttttattcggaggtttcgacgacgggttagtttttggttgtttataattgatttagttttttttttttatacggggaaagtatagtagggatgtgtggaaagaatgtatttgtagatgtgtatatattatagtgttgtaattttgtatgtagtaattatgtaaatatatgtatggattttattatatatatatataaaaatttttaaaggcgtatttttagaaaaatagcgtattattgttttttttgaaaatagtttgaataagaataaaattaatttttatagtagaaaaaaaaaaagaaaaagaaaattttagttatttttatgattttagaattatttgtatgttgaggatttttttgtttgtatttttagtttagattttagttttttgagtttagattggtatatttaattttttatttgatatttttatttggatattttataggtattttaaattttaatatgttaaaaaaattttaaacgtgaacggttaaattttttcgttatttagttttttttagaggtttttttttattttaatatatggattattttatcgtttaagttgtttaaggtagaaatacgatattaattttcgtagtatttttttttttaagtgattagtaagttttatggatttgatttttaaaatattaaatttatttgtttttttttatgttgttatattattttaagttattagtttgtaagaattttttaattattttttttgtttttttttaacgtttgttttattatttattatataattgttaaaatttatattttaaatattgattgggtatggaggtttatatttgtaattttagtattttgggaggttgagatgggaggatcgtttgtatttaggagttcgagattagtttgggtaatattagtgatattttttttttttttttttttttgagatcgagtttcgttttattatttaggttggagtgtagtgtcgcgattttggtttattgaaatttttgtttttcgggtttatgtaagttttttgttttagtttttcgggtagttgggattgtagacgtgggttattacgttcggttaagttttgtatttttagtagagatggggtattattatgttggttaggttggttttgaattttagggtggttttttaaagtgttgagattataggcgtgagttattgtgttcggtcgagattttattttttttaaaaaatagtaagtaaatttaggtttgaattttatttaaaattttttaatggtttgttgttatttttaagataaaaaatagattttttattatggtttataaagttttgtatgatttagttttatttgtttttttagttttatttggagttattttgtttttttttggttatattttaaatataatgattttttaatttttagaatatgttaaggttttttttatttaagtatttttaaatatatagttatttgtgttttaatgttttgttttatgtttttggaatgattaattgtattgtattttttaagttttagtttaaattttgtttttttagatagattttattttgattattttagttataaatttttgtttattttttattatagtatttttaagtattttttttatttcgattatagttgatttttggataatatgggttttaatggtgtgggtttatttatatacggatttatttttgttattgtcgtttttgagatagtaagattaatttttttttttttttagtttatttaatatgaagatgacgaggatgaagatttttataatgatttatttttatttaataaatagtatttatattttttattttttatgatttttttaataatattttttatttttaagtttatttttttgtaagaatatagtatataatatatataatatataaagtatgtgataattgattatgttattaataaggtttttagttaagagtaagttattagtagttaagtttttggggagttaaaattttatatatatatatatttatatatatatagagatatatatatatatatatatatattatgtttttttcgtggttgtcgagagagagagggggcgggcgtatatatataatatatagtgtaggtgagtgcgggtgataatttttatttatatttacgcgagatattttttgtatttttagtagagacggggttttattatgttagttaggatggttttgattttttgacgtcgtgattcgtttattttggttttttaaagtgttgggattataggcgtgtagtcgcgttcggttataagaatttttatagtttggtgattgaaatttatatataggaatttatatttattttattaaatttaattttggttgtgtgtggtgggttatttgtaattttagtattttgggaggttgaggtaggagaattatttgaatttaggagtttagattagtttgggtaatagagggagattttgtttttatagaaaaaaatttttatattagttagttatagggtatgtttgtgattttagttatttgggatgttgaggtgggaggatcgtttgggtttgggaggtcgagtttgtagtgaattgtgtttttgttattgtattgtagtttgggtgatagagtaagattttattttaaaaaatatatatatatatattttttgatttagtttattttttgtgttttttgagatttttttggatttttatttttttatttagtgtatttaatattatttttttttagttgttttatttgaaaattttattaatttgtgttttatatttttatttaatttatttataaaaatgttatatgagaaagggttaagagtagagttttgggatatattgttgtttttttattgatattgattgaggtagtcgtaaatatattaaattgtattattgtttagtatatggttttattaagagggatattttattttggattttgtgggttggtttagagagtgaggatttatttttggggttatgggagatataaggattagtagagatagaggtaaagttggatttaagaagttatagtaggttttttttttagtatgagttttgttttgaatatatttgggaagggtttttttttagttttgaaaatgtttataagtttttgtttagtatttatttagtttttagatttcgcgtttttaggtttgtggtgttgttttttttttgttttagtatggttttttttgtttagtttttgtatgaggttatttggggttaagggttataggttttagaagttttttttttttcgttttatgttataggtatttgtaatcgtatattttggataaaattttagtcggttttttttttatgtgtttggcgttttttttttttttgggtttttggaagtttgtttgtttacgtttttagttggggttttttttatttttgtttcgtttattgggtttttttagggtaggaggtaatttttgattgtttttcgaggttttgttgttttttttttattattaaatgttaggaatttgttagatgttgtttgtaatttaaaagaaagaaagaaaaagaaaaagatataggaaggaaggaaggtagaaaaagagaaagaaagaatgcgtgtagtagatgttgggaaagttaatttttttattattttgtatttattttagttcggattttagtatggggtagggaattttttgttgtttttatttgtcgaggtaatagtgagttttattatggagttttttttttttttttttttttttagagtgttttttttttattaaggtgtttttatttttaggagtgtatattttatttataattattgtttatttttttttagtgatatgttatgttattgatttttaattatataaattatatgtaaatgtagtttttttgtaaaaaaattaaaatattatagatataatttagtatttttttttttagtttttttttatatttttagaggtaattatgataattagtttgttaggtgtttttttagaatttttagtttttttttttggtttgtatatggttatttttttattgtattttttcgtggtttattttttgtatgtatttggattttaattttttttttttataaagatatttattgtattggagtagttatattggatgatagttatattgtattaattttattttaatttaattatttttttaaagattttatttttaaatatagttattttttgtgtattgggggttaggattttaatatgaatttttggggggatataatttatattttagggtagagggaggaggtttaattgttagtgagtgggaggttaagtttatgtttgttttttttggaagtgtgttttgattgtaggtagggttaggttttaaagttaagaaattgtttttaaattgatttgataagtggttgattagtttttttttttt

SEQ ID NO: 24 - DNA, 16545 bp, Artificial Sequence
  chemically treated genomic DNA (Homo sapiens)
  unsure 12593, 15085: n is a or g or c or t
gggagaagagaattagttagttatttgttaaattagtttggagatagttttttggttttggggtttgattttatttgtaattagggtatatttttaggagggataggtatgggtttggttttttatttattggtagttgagttttttttttttgttttgaaatgtgaattgtgtttttttaaaaatttatgttgaagttttaatttttagtatatagaaggtgattgtatttggagatagggtttttaaagaggtaattaagttaaaatgagattaatgtaatatggttgttatttagtatgattattttagtataatgggtgtttttataagaagagggaattaggatttagatgtatgtagagggtaggttacgggaggatgtagtgagaaggtggttatatataagttaaagaaagaagttaaaagttttggaaggatatttagtaaattgattattatgattatttttgggagtgtggaaaggaattgggagaagaagtgttgggttatatttataatattttaatttttttataaggaggttgtatttgtatatagtttatataattaaaaattaatagtataatatattattaggaaaaaataggtagtggttataggtgaaatgtatatttttaagggtagaagtattttgatgaggaaggggtattttgggaggagagaggaaaagaagggattttatgatgggatttattgttgtttcgatagatggggataatagaggattttttattttatgttgagattcgaattgggatggatgtaaaataatgaagaaattaatttttttaatatttgttgtacgtattttttttttttttttttttgtttttttttttttttgtattttttttttttttttttttttttttgagttataaatagtatttgataaatttttggtatttggtgatgaaggagaagtaatagagtttcggaagatagttagagattgttttttattttgggaggatttagtgggcggggtagaagtggggaaggttttagttgagggcgtgggtaggtagatttttaaaaatttagagaaaagagaggcgttaggtatataaagagaaggtcggttgaagttttatttaggatgtgcgattgtaggtgtttatggtatggagcggggagaggggaatttttaaaatttgtgatttttggttttagatggttttatgtagaagttggatagagaagattatattgaagtagagaggagatagtattataggtttgagaacgcgaggtttgaaggttaggtagatgttgagtagaggtttgtaaatatttttaagattaaaaggaagttttttttagatatgtttaaagtaaggtttatattaggggagaggtttgttgtgattttttaaatttagttttgtttttgtttttgttgatttttatgttttttatagttttagagatgagtttttattttttaaattagtttataaggtttagaataggatattttttttgataaagttatgtattaagtaataatataatttggtatatttgcggttgttttagttaatgttaatgaggaggtagtaatatgttttagggttttatttttgatttttttttatgtgatatttttataaatgaattgaatgaaaatataaagtataggttgataaagtttttagataaaatagttgggagagagtaatattaaatatattgggtgaaagaataaaagtttaagaagattttaaaaggtatagaaaatgagttgaattagaagatatatatatatatattttttgagatggggttttgttttgttatttaagttgtagtatagtggtaagaatatagtttattgtagattcgattttttaggtttaagcgatttttttattttagtattttaagtagttgggattataggtatgttttatggttggttgatataaaaatttttttttgtagaaatagagtttttttttgttgtttaggttggtttgaatttttgggtttaagtgatttttttgttttagttttttaaagtgttgagattataagtgatttattatatatagttaaggttaaatttaatgaaatgaatatgaatttttatatgtgggttttaattattaaattgtgaaagtttttgtggtcgggcgcggttgtacgtttgtaattttagtattttgggaggttaaggtgggcggattacgacgttaggagattaagattattttggttaatatggtgaaatttcgtttttattaaaaatataaaaaatgtttcgcgtgggtgtgggtggaaattattattcgtatttatttatattatatattatgtgtgtgcgttcgttttttttttttttcggtagttacgaagagagtataatatgtgtatatatatgtgtgtgtttttatatatatatagatatatatatatataaagttttgattttttagaaatttaattattaatagtttatttttgattggaagttttattgataatatggttagttattatatattttatatattgtatgtattatgtattatatttttatagaaaagtaagtttgagaatagagaatgttattaagaaaattataaagaatagaaaatatagatattatttgttaagtggaagtggattattatgaaggtttttattttcgttatttttatgttgagtaggttgaggaagaggaggggttggttttgttgttttaggggcggtagtggtagaagtaaattcgtgtataaatggatttatattattgaaatttatgttgtttaaaagttagttgtagtcgaaataaggaaaatatttaagagtattgtgatagagaataagtaggggtttatgattagagtagttagggtaaggtttgtttgagaagataagatttgagttgagatttgagggatgtaatatagttggttattttaagagtatagggtagagtattaaaatataggtaattatgtgtttagaagtgtttagatgggaaagattttagtatgttttggggattgaaagattattgtgtttggagtatagttagagaaaagtaagatgattttaggtaaggttggagaggtaagtggggttggattatgtaggattttatgggttatggtaaggagtttgttttttattttgagggtaatagtaagttattgaaaagttttaagtgggatttagatttaaatttatttattgttttttaaaagagatgaggtttcggtcgggtatagtggtttacgtttgtgattttagtattttgggaggttattttggagtttaaggttagtttggttaatatggtgatattttatttttattaaaaatataaaatttagtcgggcgtggtggtttacgtttataattttagttattcgagaggttgaggtaggagatttgtatgaattcgggaggtagaggttttagtgagttaagatcgcggtattgtattttagtttgggtgatagagcgagattcggttttaaaaaaaaaaaaaaaaaagagatgttattaatgttgtttaggttggtttcgaatttttggatgtaagcgatttttttattttagttttttaaagtgttaggattataggtgtgagtttttatgtttaattaatatttaaagtataaattttggtagttgtgtggtaaatggtggagtaagcgttaagagaaggtagggagagtagttaggaaatttttgtaggttggtggtttgaagtagtgtggtaatatggaaagagatagatggatttggtattttggaggttaggtttataggatttattaattatttaggaaaaaagatattgcggaggttgatgtcgtgtttttgttttgaataatttaaacgatagggtagtttatgtattgagatgggaaaaggtttttaaagagggttgggtagcgggggaatttaatcgtttacgtttggggtttttttgatatgttaaaatttgagatgtttgtgagatatttaagtagagatgttaagtgggaggttgaatgtattagtttgaatttagaagattgaggtttgggttggaaatatagataagggagtttttagtatatagatggttttgaagttatgagaatggttgagattttttttttttttttttttttttgttgtagaaattaattttatttttatttagattatttttaaaagaagtagtggtgcgttgtttttttaaaaatacgtttttagagatttttatatatgtatataataaaatttatatatgtatttatatgattgttatatataaaattatagtattgtggtatgtatatatttataggtatattttttttatatatttttgttgtgtttttttcgtgtgaaggagggagattgaattagttgtgagtagttaagggttggttcgtcgtcggaattttcgaatgggggttggggtggaggaggtgaggcgattgtcgaggtaggagtagtagttgttgtagggtttttttgtaggttagtaggtagtatttggaggttttcggtagttttttttttttttttatttcgtggtgttcgcgttgtttttaaggtggggtggttgattatagatttttttggtgttattttgtggtttagatttgtttggttgggtaagaagttgtgtatgtgaggggtggaggagggagttgtgggaggaatagattttgtttagttttagttttgagtaggggaaagggttggatggttaaagtttgtagatgattggtgagaatatttcgtttggttcggtattgttaagggttagagattagaggttgggagggagagtagtggtcgtcggttggggaatagggttttttttttttttggggtttagagggtggttttagttgagtttgagtaagtttagtttttagtttgcgttagaggtttgttttttgttagtagaggtgtatgtatattggggaggggttgttatttttattttaatttttgggttaggggttggggaagaaatggagtttaggtttgtttgttgttttgtagattaggttttcggggtttaggatttttgaggtatgtagagaagggtttgagaatgtttgagattttttagtgaaggggtttttaatttggggtttaggaattttatagagatttattgatagaatttaggggatttgtgaatcggaataggaaaaattttttttgttttttttaattagtgattgaaatttagtatttttttttattttgaatgtaggttttaaagtatagtagtagtaatatttgtaattttgttattagtagaaattaagatatttttatattgtattatagttgttgttgatattttaaaatagtatttaaatattattattttagaattatagtatagaattattagatttatagttagattttattattaaatgtattgataaagaatatattaggtcgggtatagtggtttacgtttgtaattttagtattttgggaggttaaggttggcggattacgaggttaggagatcgagattattttggttaatatggtgaaatttatttttattaaaaatataaaaaataagtttggtatggtggtaggtgtttgtagttttagttatttagaaggttgaggtaggagaatggcgtgaattcgggaggcggacgttgtagtgagtcgagatcgcgttacggtattttagtttgggtaatagagcgagattttattttaaaaaaaaaaaagaaaaagaaaaaaaaaagaaaagaaaaaagaaagttttgtttagtatttgtgagtaggatttggtgttttgttgattattagtagtgtgttatggttaggataaaagttatttttgtttttagttggggtattgtgtgtggtttttggggttatttttgttggtaaaggtatggagaattggttttatatttattgtttgtgagtgttaaattgtattatttttttgaaagggaatttgaaaatatttattttacgaatttatttttgtgaaatggttatgagtgaatgaaaagatttggtttgtttttatatttttgtttaaaatgattaaaattaggaataattttaatattaaaaaaagttattgaatagtaaataagttggtttgtaaattaattgttggaagtttttatataatggagaaattgaaatatttaatataatagaaaaggtgtaagttgttttggtaggtgaaatagtagtatgttttaaattttagagaaggtaaagaatttagttagagatttttttatcgagaagaggttgggaaaggtaggtttggtatttatcgaggatattttttaagtttgagatgtgttttcgttattattttggggaattgttataatttttttatgtttggtgtttttgttttagtttgtttttttagagcggttggtagtaagtattttaaaataaaagggtttgtgtttttttttttttatgaaatggagttttttttgtgttagggttacgtttagatttattttttatagttttagtatttaagtgggtgtttaatatataggcggtgttatggtttgaatgtttgttttttttaaaatttatgttgaaatttagttattaattttaatagtagggttttgtttttttgaatggattaatgttttttttaagaatgggtttttttataaaagggcgaatttggtttttttttatttttttttgtttttttgttatgtaacggtgtagtaataaggtgttattttggaagtagattttgggtttttattagatagatattgaatttgttggtgttttgattttggatgttttagtttttagaattttgagaaatatatttttattgtttataaataatttagttttatatattttgtggtagtaataaatatggattaagatagtaggtgtttaatagatattgaatgataatgttgtcgtttgagtggttttttttttagatttggtgtgttttgtttttgggatattcgagtttttatagtttagttttatggtggtttagttataagggtttgatttagaattatatgggtagttttttttttaagttggttagtgaatagtagtgttgttttgttttagtaggtggtttattttgagaagaaagtaatttttaaagtaaggaagtagttaaagaagtaaagttgtgtttcgggattgtttttttttagggtttttttagtaatttttttttcggtgtgatttatagtttaagtttgtttgggtttttaatgggtttttttgtttttttttttaaatttttttcggtgttttttatatatagaaagagggagagtttggaattttgtttttaaagtatagtagtagtttagagaagttataaggcgatttgaagttgttaataacgttgttttgtagttttttaggtggtttggagtttgttattttgaaggtaaaatttaatcgaagtgagggtggggaaggtagggggaaggtagtgggagggttggcggagtcgagtttttaaagggtttcgtgttgttttgggaagaaggggtttattttggagttagattcgtggattatttttgttaggagaaattttaaattttttttagttgttttttggtaatttgtggttagattcgagtatgttagttgaattagagttaaagttattgtggttttttggggttataatcgttttatgtttggtagggagtagagagttgttttggtttttttagtacgaatgatatttgggttttattgaagtttttattgatttaggaatgaagtttttatttttttagttttaaaggtggttagaaattaaagatataatgaatgtaagttatttgtttatttattcgtttttttggttattttaaatttaatgtgagggtagagttgttaaaatttattttttttagtattttaaaggagataagtttggttttagaaatttttttattgttttttttttttttattttttttttttttttggttttttttttttatagtttagttttttttttttttgggttttagtttttttcgttagaatatggaaatgatagtatttattttataagatgatagaacggaaatgaaggtgtcgtagatattgtaaattagggtaaggtaaatttcggtttgtttttgtatggtttatattttagaatggttttttttttttttttttttttttgagatattgggttttattttgttatttaggtattgagtttagtggtattattaagtttattgtaggtttgaatttttgagtttaaggattttttttttttattttaggagttgggatggtaggtatgtggttggtatggttattatattttgttaattttaaaaaaaaattttttttgttgaaatagggttttgttatgttgtttaggttggttttaaatttttggtttttagttgttttattgttttggtattttaaagtgttgggattataggtgtaagtattgtattcggttttatatttttaaacggttgagaaaaaagtaaaagaagaaaaatattttatgatttatggaaattatatgatatttaaattttagagtttaataaagttttattgaaatatagttatatttatttatttatatattatttatggttgtttttgttataatggtagaattgagtatttgtgatagagaattttaggtttcgaaagtttaaaatatttattattcgggtttcgttaatttttgtcgttaagggttgtaaagaataatgatttttattaattttttttatttttttttattaaaatttgtttttaggatgaagtttgttatattgaaaggaattgaatgatttattttatatattaatgattattgaaagttgaatttatgttagtttttaaagatatttttattttgatagaaagtgttaggtttaaacggagggtttttgcgatgatgagattttaaataatagttggcgataggtttttgggtgagagttttaagtgatatgtaagtagttgcgtttttgttttttattatttgtttatacgtatatataaattattagaaattttggtagagagaaattgtttatgaaaaatattgttacgatggaaaattttaatagtatttttaattaattttaggatatttttattaggttttatatatatatgagtttaattaaaaataattttgttgagtaatattttggattttttataatttgtcgtgggtgttttattttttggtttttattcggatttttatttatttttttggttttgtttttgtttagattttttttttgagttttaggtttgtagagtttgtcgtgtattttttttattaaaatttttttggtattttaattttatatttttaggattgttttttttattagtagtttttgttcggagttgtttttatagatttatattatttattttgagtttatgtttaatgttttggtgtcgttttttttttttttaatttattattagttttttttatttttatttgtacggtatttatgttattagtttaggattatcgtatgttgtagtagcgtttttgttttgttttagtttattttttttatagttgttaaagtagtttttttaatagatattttttagattaaaatttttttatggttttttatagtttgattttttagagtttaaagtttttgtaatttagttttgcggatttttttgaatttagttttatttgatttttgttttgttatttaaatttagtggaattgagttatttgagttttaaagattatgttttttttttattaggaaggattaagtttggtttttattttaggattaagtttaggtatttttttttttaggaagttttttttgataatttttgggttgagtgatgggttttttttggtttttatttttttcgtgtatttatttgttttatggtttttatttgtttatttgttttttttagtaattgtagaagtttttttattgtttttaaggagtagagatagtgtttggtttataataagtgtttaataaatgttggtagaatgaataaggggaaagaggaaagatatttcgttttaaggttatgatgttatacggtttattttttttttttaggtttggtatgtaggattttattgtttattgtagtttttttagtatttatttttttttgttataggaagttttttttttttttagtttaagggttagtattagagtttaaatttatatttaagtaattaaagtgagtatttagagtttttttgtataaagtgtggttttagattagtagttttagtgtcgtttgggagtttgttaggaattttaagtattaggttatatttcggtttattggaattagaatttggggtggggtatggggtaatttgtgttttaataagtattttaggtgatttttaaagtttgagaatttagggtcgggttttgatagttttgagttgagtgttgtatatacgtattttttcgtttaatttttatattatcgttaagtagatattattatttttgtttttattttataggtgaggaagttgaggtcgtttagtaatttggttagtttgatagtttgtttttaaggtttgtattgttatatttagtttgttttatttgtgaagagatgttagtgaattttgatgttaaatatagaagtggtttttttattttattttttttttaattttttgtgtatgtgttgtgtgtgtgttgggtgggttggggggagtaatgatatttgtaaatgggttatagttgggtgtgagttttttggatgagtggttgtacgtttttaggttttaatgtttttattagaggagaatgaattagatgggttttaagttttttttattttgaaattttacgatgttatagggtaagtggaattttttttattttttaatgattttagagtttttaaggattgtagaaattttttattttttttagttaagtatagattagaggatagagagatttataggggatttgaagaaaatatttttttatttttagtatagatattttatggattaaatagtttatagatattaggattattgttggttttgatttaagtattttgaaaagttgtttttttgtaaagtatatgattttttaaaatagttttttagatattttaatttaagataaaggatattagggtgtggatttgtattggttttggggagtagggttagtagagattgtaggtattatatttcgttagtttttattttgaggtagggagtacggttttaagttgtttttgttttaggatgttttatggttagatacgtttttttttagtaggttgtagtatgtttgtaggtgtcgttgtttattaagggttttggtgtgtgatttgggttagcgttatagaagttaggttaatttggaggtatttttcgtatttaggaggttaggtagtttcggaaaggaagaggtggtaaaagtcgtatagtatttatcgagggtatgagaggttttttttttagtgattgagggttggtgtgtttttggtatgaatattagagtaatataaaattttagaggcggattttttttaaataaagtttttaaaaaggttagttgacggtgtgttagtaatattattatataaggtggtttttttaataaatcgttttgggggtagggaaggggggtgggtagagtgagttattatttgaaaaatgtatgtaaaaggatttagtggtaatagtttcggtgttggtagatttgttttttttatgttgtatttgtataaataaaatttatattaggttttataagttgtttagagtgagattagatgtagttgtgtttttggagtgagaattatattaagaatggtagcgggtttttttcgtttatatttttttttttaggttttgttgtatgcggtttttgggtttgtttgggacgtttaggtattgtttttaaaatgggtgtaattatgttttgtttggtacgagtttgggattaatgaaagttgaagagaaatgtttttcgtatttaggaaagaaattttgcgtgttttatttatttgttgtattttgatataagtttttaatttttgggttgagttttttgagggttttaggatattttaggttttatttttttttggtttttttttggtttttttttaaatatttttaaatatttgtagattgagggatttgttttagggttgaggtatatttaataagatttttggtttgtaggattttttatagttttgtgatttttgagttgttttttttttttttttgagatagagtttcgttttattttttaggttggagtgtattggtgtaatttcggtttattgtaattttcgttttttaggtttaaataatttttttgttttagttttttgagtagttgagattataggcgtttgttattatgtttagttaatttttttatttttagtagagatagggttttattatgttggttaggttggtttcgagtttttgatttcgtgatttatttgttttggtttataggtgtgagttattacgtttggatttttttttgtttgtttgttttgtttntaattagatagggtttcgattttgaatttttggatttaagtaatttttttattttggttttttaaagtgttgggattataggtgtgagttattatggttggttgatgattgtttttttttgtgtaatttatgtattatttttaggtagttggtttattttttatattattagttattagttttgtagtattatttttaattttatatttttatggttttttttttttattttgatttagattaaaatgattaattgtttattggatattttaatttagatgattttttagttttttaaatttattttgtttaaaattgaattttttttttttatttttaaagttgttgtgttttttgggttgttaatttttaagtttatttttcggttttttaagttagaagttagttagtttagaattttgtgttttttttatgtttttataattatttgggtattatagtttggtgttttttcgattagaaatgttttttagttttgtgtttttttttaatttttgttggtttgcgttgttttaggttttagttttatttggtttggagtggggcgtagttttttgattggtttttttgattttgtttcgtttttaatatagaggtttttaaagtatggggattattagagtgtagtagtagtatgatatgggaatgtgtttataatgtagatttttaggtgttatttagttttattgaaatagaaatttagtgaataggttttagttatttgtgttttttaaattttttttattcggtgtttaggatattttcgttttaatagaagaagtatgtattgtatttttttaaacgtatagggagttttaggtggttttgggttatttggtgtaatggtttggtataggtttggtttttttattaattgaaaattgaggtaggagatggtgtgaatgaggagtgttttttgttgagatagtttagaggaaagatttaaaaatattttttttgaggatttgtagttgttttttgtggagaaggaatattgttgttattgtgaggtttatttatttattatttgattattggtttgcgtgtttagtgtttaagtttaaattttaggtttgtggaaagttttttgagttttttaagtttttagaaaatttttattggggattttggagggaagagggtttttttttcggagttgtgttgtatagaaggtggtagtggatgaggtgtgagttgttttagtatggatagagtgttcgtagttttaattggtcgaggtaggtagtttaacgttaagtgatagggttataagttttttttttgattttttttttttgtgtgggaatgaggttagggtagggatagggtgttaattatttttgatttgattatgggtttagaggggttattttttttttttttagagtaagggttgttttatagagtgagtttttttttaattatttagtatcgtggttagcgtgtagatgggggtattttgttttatggatattttttttttagttggtatagttagtcgataaataatgaaaagtttataataaaggtattggttgtgatttaggttttaaatagtttagagacgagaaagtagggattaattgaataaattgaagttttgaggaaatgtttagggagagattagaaggtgagggaggttatattaggtattcgatttgtttatatttaatatttttttttggttttaaaaatttaattaaaaattttaaaaaatataaaaatgtgtgttttagaaagtaaatgttcgttataattttatttagatttaagttagagaaggttattgttaagggtaataggatatttattttaaaaatattttttttagatttttttttaatattttaatattattttataaaaatgggattatgttattgtatatgtttttataattgttttgaaatttgttatgtttttttaataatatttttggatgttttttaaaattagtttatataattttttaaattttagtatcgttttttatagtagggatatattataaattatttgattaatattttattgatgggtttttgggttatttttagtatttttatttatgtaaatattgttaatattaataaaattttgtatatgtgtttttgtgtatatgtgggagtatttttatatggtaaatttgttaaagtggaattgtttgattaagtaagtatatgtgaaatattgatggaatttgttaagttgttttataaaaatttgtattaggttatatttttgggagagtatgagattatttttttttttatgttattttagttagtattaataaggtttttttttagtatattatatttgtttattatattagaaatatgttaatttttatacgattggttattttagaattgtttagttttttttttaattataaaagtaatatatgtaatgattaaaaaaaaaaagaggaaaatatacgaattaggtgtttatattttgagttattnttttgagtgggtaattgtttaaacgagtttttttgtttatttggttttttttttttgtgtttagatgaattatgtggattattggtaattatttattttttaaatgttttttaatcgggaaggagaaatttagtatttttttgttttaaaattattattattttattgagatagggtttcgttttgttgtttaggttggagtgtagtggtgtaattattggagttttgatattttgggtttaggtgatttttttgttttagtttttatagtagttgggaatatgggtaagcgttattttgttttgttaattttatttttatttttattttttgtagagatagagttttattatgttgtttaggttggttttgaatttttggttttaaacgatttaacggttttagttttttatagtgttggaattataggtatgagttatcgtattcggtttatgaaagtgtaaaattatgtggtaattaatgagaatgaatatatgttttgtttatattaatttttttttttttttttttttttttgagatagagtttttttttgttatttaggttggagtgtagtggtgtgattttggtttattgtaatttttttgttttttgggtttaagcgatttttatgttttagtttttcgagtagttgggattataggtgtgtattattatgtttagttaatttttgtgttttttagtagagatggagttttattttattggttaggttggtttggaatttttgattttaggtgatttgtttattttagtattttaaagtgttagaattataggtatgagttattgtgttcgatttaatttttttttttttttaatttgtttttttttgaaaatggttgttttttgtttattttttttttttattggattgtttatttttatttttttgagttatgagagattttggtatattatattagtgatataattagttttttgtttattataagtgttgtaaatattttttttttagtttaaatatttgtttttcgattttgtttggtagtatttgttttattaaagtttaattaaatgttttttttgtttagtgtttgttttataatatttttaggaaggttgagtatttttttttatatattttaatttttaaaaattgtaattgtggaaaatatatataatataaaatttataatattaattatttaaaaatgtatggttttatatggtttttgttttgttttgttttgttttgtttttttgagacggtgtgttatttttgttgtttaggttggaatgtaatgatgtaatttcggtttattgtaattttcgtttttcgggtttaagcgatttttttgttttagttttttgagtagttgggattataggtatttattattatgtttagttaatttttgtatttttagtagatacggggttttattatgttggttaggttggttttaaatttttga

SEQ ID NO: 25 - DNA, 6301 bp, Artificial Sequence
  chemically treated genomic DNA (Homo sapiens)
tgtgttttattttgggttgtttttattgttatgtttttaaagtttattaattttttttttattgtttaatttttttttaatgttatttagtgtattttattttttagatattttagtttttatttttggaagttttatttgagttttttaaaacgtattttttatatttgtatttaagtttttgaatatatagaatatagttatagaaattgttttaatgtttttatttgttaattttaatatttgttagttttaagttagttttaattgatttatatttttattattatgggtgtgtttttcgttttttggtatgtttggtaattttttaattttaatttttttattttttgagatagagttttattgtattatttaggttggagtgtaggggcgtgattttagtttattgtagtttttgttttttgggtttaagtgatttttttgttttatttttttaagtagttgggattataggtatttattattatattcggttaatttttgtatttttgtagagatggggttttattttgttggttaggttggttttaaatttttgattttaggtgatttattcgttttagttttttaaaatgttgggattataggtgtgagttattacgtttcgttatgtttggtaattttgtattgaatgttaggttttgtgatgttttattttgttgggtgttggatatttttgtatgtttataaatatttttgagttttgttttgtgatgtagttatttggaaatggttttaattttttgggttttgtttttatgatttggttaattagtttagagtagtgttttatttaggattaattattttgtattgttgaggtaagatttttttaagtattttatttagtgttttgtgaatgattagttttttttagttttgcgggtggaaggtagtggttgttttaggaagaattattttagttttttatattttattttcgttataagtggaagtttttttattaattttttgattttgtttgttattttttaaagtattttttttttttttttgtttttttattttagagattttagttatttggatattaagttgtatgaaggttttttatagtttatagattttttggttattttttattttattttattttttttgagacggagttttattttgttgtttagattgtagtgtagtggtgcgatttcggtttattgtaatttttatttttcggtttaagcgatttttttgttttagtttttcgagtagttgggattataggtgtttattatcgtgttcggttatttttgtatttttagtagagacggggttttattttgttggttaggttggttttgaatttttgtttttaggtgattcgtttattttggttttttaaagtgttgggattataggcgtgagttattgcgtttggtcgtgtttattttttaaatttgttttttttttgtgtgttttatattggatttttttttattgttatgtttttaagtttatttattttttttaatgtagtatttataggtaaacgcgtttagtgtattttaaaattttagatgtagtttttatttttagatattaaattttttatattttttttgtttttatttgttaggtttaattttttttttagttttttaaatatatggaatatagtaataattatttttttaatgtttttttttattaattttattatttgtgttaattttaggttagttttgattgatggattgtttttattatggattatatgtgtttgtttttttgtatatttgtgaaaaatttggtaatattttataggtggtagaaattgtaaattttatttttgggtaaaatttgagtgttgaatgtttttatatttttatagatatgtttgagttttgatttgggacgtggttaagttatttggaaattacgatttttaggttatgttttttaggttttgtaggtaggataagtataatattttattaggagttaatttttttttaggttggagtattttgatgttttgtggattataaggttttttattttggttgatggaaataggaattatttttggttcgttatgaatttaagaattattttttttatttttttcgggattttttttttttggttttaggtagtttttttttatgtatttattgattagattttagggaatagtaaatttttaggattttttttttttgtagttttattttttgttgtaattggttttgtaaattttaatgtttggtttttttgaatttttagtttatggagattagtaagttgtgtttgggtatttttttgttgtattgtattttgaaagttttttttagattgtaagttggggtaattgtagtatttatattatttattttttgtttttgagggtttattgtttttttttgtttgatgattaatgttttgaaaattattgttttatgtgttttttttttaggttttagttgttttaggtaggatggtaaatttggcgttgttttttttattttatgaagtttttacgttaatttttgaaaattaagttgaacgatgtagtattttttgtaattgtatatttaatttttttttttttttttttttttttttttttttttttttgagatggaattttgtttttgtcgtttaggttggagtatagtggcgtaatttttgtttattgtaatttttattttttgagtttaagcgatttttttgttttagttttttgagtagttgggattataggtgtatgttattatagttagttaatttttttatttttattttttttagtagagatggggttttattatgttggttaggttggttttgaatttttaattttaggtgatttatttatttcggttttttaaagtgttgggattataggtttgagttattgtgttcggtttagtttttaataggtaaaatttattgatttatttgttttaagagtatgattttaatttaaaatataaattttaaattttaaatttaaatttaagtaaattagtttagttattatttttagggatattattttttttaataaatgagtattattgtgcggtggatacgtttgtagttgttggggtttataattgtggacgagataaaatttttgcgtttgaggaatttatattttagtgagaatgtttttgaaaatgttaatgtggcggggcgtggtggtttatatttgtaatttttatttttgaaggttgaggtaggtggattatttgaggttgggagttcgagattagtttaattaatatggaaaaatttcgtttttattaaaaatataaaattagtcgggtgtggtggtatatgtttgtaattttagttatttcggaggttgaggtaggagaatcgtttgaatcggagaggtggacgttgcggtgagtcgagatcgtgtttttgtattttagtttgggtaataagagtgaagttttattttaaaataaaataaaataaaataaagttaatgtaatttgtttgttaattgttagtttttttgtataaagttttaaatagtaacggtgagtgatgtaaaaattttaaggaataatgataaatttagataaatttaatttgaaatatgtttataaattagtagttttgaattataaaaaattttgtagtatttgtgggtaacgtttatttaattgagatataaattgaattgtaggtaggtattttattagttcgtttggtgtttaaggtaatttttggtttatagtagttgtttaatatatatttgatttaaaaattttagtttatttgttttaagggtttttattttgttttttgcggtagtataattgatagggaatagttagttagtattagggggatgaaaaggcgttaagtgtaatttatagggcgatatggaaatataatacgaagttggtcgtttgttttttattgttagtttttttaaatttatgttcggtaggtgagagttgatattttttgtttttggtttggtttttaatattttaataggatggatttaaattttgtgttttgatttttttaggtgagggtgaggaggagagaaagaagaggggggttttgtagtttttaaattttattttttaggggtttgtatgtatgtatgtgtgtgtgtgtgtgagagggaggaagagaaatagagagagagaagagagagatagagatgagagaggtatgagagatataggagagagagatagatgagagagagaaagagagatacgatagagagagagagacgagagagagagagatacgggagagagagatagaggagagaagaggagaggagagagatacgagagatagatgagagatagtgagatacgagagagagagagagatgagaggagagagagatatgtgagagagatataggagagatagagatgagagagagatatgagagagatttatgagagagagatattggagaaagagggatagagatgagagagagatagacgagagatagatataagagagagggatcgatgagcggaaagagaggtacgagagagagatgagagagagagaagaggggtttttaatgaatatgtgggaatatatggaaaacgcgaatatttaaatgatatttggaaaatttggttgtgttggggtggttagggatttagttttttaggtgttttttttttggttcgcgattatttattcgggatatcgacggatttcgcgtcgttaattagtcgtttttagagcgtgggtggtaggcgtggttttgttcggggtcggtcgttttttttacgttttcggaggtttcggcggaaggcgtgtaggcggtttttgggcggcggttgtaggggagatagtggaggggttcggcgtttttgttcgttcgtacgtgttcggggcggggcggttggggttcgacgggcggggtcgggggcggtggcggcgggggcgtggtcgggcggttacgtgacgggcggcgcggttattaagtcgcgcggtagttgttcgtagtcggagttggtgtttcgttcgagatttagcgtttaggcgtgtcgtttcgagaggagtcgcgcgaaggttatttcgcgttcgtcgttcgtcgttcgtcgttttcgtgggttcgtttgttagttagttcgtgcgttcgagtttttcgcgtttcgtcgtagtttcggttaatcgagcgttatgaattagatagagttcggcgtgtagtataattacgtgtacgacgaggatgagtatatgatttaggaggaggagtgggatcgcgatttgtttttggatttagtttgggagaagtagtagaggaaggttagtaggggttcgcgggtcgttcgcgcgtggtggggtcgggtttttcgcggggttttcgtgcgcgtggtcgcgtggtttggcgattggcgagagggcgttttgtggaggtgttgtgttgttttgtgttttcgtagtttcgggggttttttaggaaagaggatacgttcggggataggtaggatattgggcgtcgtgtgtgtgcgcgcgcgttagtagtatcggaggtatagatgtggttttgttttttatattaattcgcgttagattagatttgaaggggtttttggtttgtttttgattttttgagtttgtgattttggttttcgatttatatttttttggttcgtttgtgtttatttattttagttttttttttttttattgaaagaagtaaaagaatattagttttattgtaatttttatcgggttgtttttagagttatggaaagttatttatttaattttttgggttttttggagagggatgttgtatgaatattagatatttatcgatagtgataattattttatattttatttatagtttattgaggtaagtatatagggacgaaggagttagttagtttttaaaagttttttttttattttgattggcgttttttgggggtttagtggaatattttattattttaaggtttttttttgatttttttggttggaataaatagggaatgtttattaggaggtttaatttcgttttttatttgattaggtagggagtttggttgggttaggtatgataatagagatttgttaatttaattttaagataacggggttatggtaaaagttaaacgttttgaattttttttcgtttatttttttgggcgtggggtaagatagattttttttttaaggatttgttttaagtggatagtttgtggtgattatagtgtgtatgggaatttttgtataatgggtattgtagttgattgtgcgatagtatttggtgaataggggtatgatggtggagaat

SEQ ID NO: 26 - DNA, 6301 bp, Artificial Sequence
  chemically treated genomic DNA (Homo sapiens)
gttttttattattatatttttatttattaaatattatcgtataattagttatagtatttattatatagagatttttatatatattatggttattataggttatttatttaaagtaggtttttagaagggaaatttattttgttttacgtttagaaaaataggcggaaaaaagtttagagcgtttggtttttgttataatttcgttattttaaggttgggttggtaggtttttgttgttatgtttgatttaattaggttttttgtttagttaagtaagaggcgggattaagttttttggtgagtattttttatttattttagttaagaggattaagaggaaattttgaaatagtggaatgttttattgggtttttagagaacgttaattaaaatggggagggagtttttagaagttggttgattttttcgtttttgtgtgtttattttaatgaattataaatagagtgtgaaataattgttattatcggtaaatgtttagtgtttatataatatttttttttaaggaatttaaaagattgaataaatgattttttatgattttaggggtagttcggtggaaattgtaatgaagttgatgtttttttgttttttttaatggggaagagagaggttggggtaaatggatataagcgggttaggagagtataagtcgggggttaaggttatagatttaaggggttaggagtagattagagatttttttagatttggtttaacgcgggttggtgtgaggaatagaattatatttgtattttcgatgttgttagcgcgcgcgtatatatacgacgtttagtgttttgtttgttttcggacgtgtttttttttttaaggggttttcggggttgcgagggtataggatagtatagtatttttataaagcgttttttcgttagtcgttaggttacgcggttacgcgtacgggagtttcgcgggggattcggttttattacgcgcgggcggttcgcgggtttttgttgatttttttttgttgttttttttaggttgggtttaggagtaggtcgcggttttatttttttttttggattatgtatttattttcgtcgtatacgtagttgtattgtacgtcgggttttatttggtttatggcgttcggttggtcggggttgcggcggggcgcgaggggttcggacgtacgggttgattggtaaacggatttacggaggcggcgggcggcgggcggcgggcgcggggtgattttcgcgcggtttttttcggggcgatacgtttgggcgttgggtttcgggcgaagtattagtttcggttgcgagtagttgtcgcgcggtttaatagtcgcgtcgttcgttacgtggtcgttcggttacgttttcgtcgttatcgttttcggtttcgttcgtcgggttttagtcgtttcgtttcgagtacgtgcgggcggataagggcgtcgggtttttttattgttttttttgtagtcgtcgtttagaggtcgtttgtacgtttttcgtcgaggttttcgggaacgtgaggggagcggtcggtttcgagtagagttacgtttgttatttacgttttgagagcggttggttagcggcgcggggttcgtcggtgtttcgggtgggtgatcgcgagttaggggagggatatttaagaggttgggtttttgattattttaatatagttaagttttttaaatattatttggatattcgcgttttttatatatttttatatatttattggagatttttttttttttttttttatttttttttcgtgttttttttttcgtttatcggttttttttttttgtgtttgtttttcgtttgttttttttttatttttgtttttttttttttagtgttttttttttatagattttttttatattttttttttatttttgttttttttgtgttttttttatatgtttttttttttttttatttttttttttttttcgtgttttattgttttttatttgtttttcgtgtttttttttttttttttttttttttttgtttttttttttcgtgtttttttttttttcgtttttttttttttgtcgtgttttttttttttttttttatttgttttttttttttgtgttttttatattttttttatttttgttttttttttttttttttttgttttttttttttttttttatatatatatatatatatatatatataggtttttaaggagtaaagtttaaaagttatagaatttttttttttttttttttttttttatttttatttggggaaattaaggtataggatttggatttattttattaaaatgttaggaattaaattaaaggtaggaagtgttagtttttatttgtcgggtataaatttaagagagttgataatgaagggtaagcggttagtttcgtgttatatttttatgtcgttttgtgggttgtatttaacgtttttttatttttttagtgttggttagttgttttttattagttatgttgtcgtaggaagtaaaatgaggatttttgggataagtaggttgaaatttttaaattaaatatgtattaagtaattattgtaaattagaggttgttttaggtattagacgagttgatgggatgtttgtttgtaatttagtttatattttaattgaataaacgttgtttatagatgttatagaattttttgtgatttagggttattaatttgtggatatgttttaagttgagtttgtttggatttattattgttttttagaatttttatattatttatcgttattgtttggggttttatgtagaaagattaataattagtaaataggttgtattaattttgttttgttttgttttgttttgagatggagttttatttttgttgtttaggttggagtgtaagagtacgatttcggtttatcgtaacgtttattttttcggtttaagcgatttttttgttttagttttcggagtagttgggattataggtatgtgttattatattcggttaattttgtatttttagtagagacggggtttttttatgttggttaggttggtttcgaatttttaattttaggtgatttatttgttttagtttttaaaagtggggattataggtgtgagttattacgtttcgttatattaatatttttaaaaatatttttattaggatgtaaattttttaaacgtagggattttgtttcgtttatagttgtagattttagtaattataggcgtgtttatcgtatagtggtgtttatttgttgagagaagtagtatttttggaaatagtgattgagttaatttatttggatttaaatttaaaatttagagtttatattttggattaaaattatatttttgaaataagtggattaataaattttatttattagaaattgggtcgggtatagtggtttaggtttgtaattttaatattttgggaggtcgaggtgggtagattatttgaggttgggagtttaagattagtttggttaatatgatgaaattttatttttattaaaaaaaataaaaataaaaaaattagttggttgtggtggtatgtatttgtaattttagttatttaggaggttgaggtaggagaatcgtttgaatttaggaggtggaggttgtagtgagtagaaattgcgttattgtattttagtttgggcgataagagtaaaattttattttaaaaaaaaaaaaaaaaagaaagaaagaaaagaaaagaaattggatgtataattataaaaagtgttatatcgtttaatttagtttttaaaaattaacgtggggattttatgagatggaaaaaatagcgttagatttattattttgtttgaaataattaaagtttggggaaaaaatatataaaataatggtttttaagatattagttattaggtaaagagggataatgaatttttagaggtagaaaataaatgatgtgagtattgtaattgttttagtttatagtttggagaaaatttttaagatgtaatgtaataaagaggtatttaggtatagtttattggtttttataaattgagagtttagagagattaaatattagaatttgtaaggttaattatagtagaaaatggagttgtaaagagagagaattttggagatttgttgttttttggaatttgattagtgaatatatgagaggaaattgtttgaggttaaggaaagaaggtttcgaaaggaatagaaggaatgatttttaaatttataacgggttaggaatagtttttgtttttattagttagggtggaaaattttataatttataaagtattagagtattttaatttggagggaaattagtttttgatgaaatattgtatttgttttgtttgtaaaatttgaaaagtatgatttgaaaatcgtaatttttaagtaatttaattacgttttagattaaagtttaaatatatttataggaatatgaaaatatttaatatttaaattttatttaaaggtaaaatttgtaatttttgttatttgtgaaatattattaaattttttataggtgtgtaaagaagtaggtatatatgatttataatgagaataatttattaattaaaattgatttagaattgatatagatgatagaattagtagaaaggaatattaaaagagtgattattgttatattttatatatttaagaagttagaggaaagattgaatttgataagtagagatagaggagatatgaaaaatttaatatttagagatgaaaattatatttgaaattttaaaatatattaaacgcgtttgtttatagatattgtattagaaaagatgagtgaatttgaaggtatagtagtagaaaaaaatttagtatgaaatatatagagagaaaataggtttaagaaatgagtacggttaggcgtagtggtttacgtttgtaattttagtattttgagaggttaaggtgggcggattatttgaaggtaggagtttaagattagtttggttaatagggtgaaatttcgtttttattaaaaatataaaaatagtcgggtacggtggtgggtatttgtaattttagttattcgggaggttgaggtaggagaatcgtttgaatcgggaggtggaggttgtagtgagtcgagatcgtattattgtattgtaatttgggtaataaagtgagatttcgttttaaaaaaaataaaataaaataagaaatgattagaggatttgtgagttgtgagaagtttttatgtagtttagtatttaagtaattggagtttttgaagtgggagaataggaaaaaaaaaaaagtattttaagaagtaatagataaagttaagaagttagtaaggggatttttatttgtggcgaaggtggagtatggggaattgggataattttttttgaaataattattgttttttattcgtaggattggaaaaaattgattatttatagagtattgagtagaatatttaggaaggttttgttttagtagtgtagaatgattagttttaaatagagtattgttttaagttggttaattaaattataaaaataagatttaaaagattaaaattatttttaagtaattgtattataaaataaagtttaagaatatttataggtatataaaaatatttagtatttaataaggtaaaatattataaaatttgatatttaatataagattattaggtatggcggggcgtggtagtttatatttgtaattttagtattttggggggttgaggcgggtggattatttgaggttaggagtttgagattagtttgattaataaggtgaaattttatttttataaaaatataaaaattagtcgggtgtggtggtgggtgtttgtaattttagttatttgggaggatgaggtaggagaattatttgaatttaggaggtagaggttatagtgagttaagattacgtttttgtattttagtttgggtgatatagtgagattttgttttaaaaaataaaaaaattaaagttaaaagattattagatatattaagagacggaaaatatatttataataatgagaatataaattaattgaagttgatttaggattaatagatgttaaagttagtagataaggatattaaaatagtttttatgattgtattttgtatgtttaaaaatttaaatatagatatgaaagatacgttttaaaagatttaaataaaatttttagagatgaaaattaaaatgtttgagaagtagaatatattgaatggtattaagggaagattagatagtggagaagagattagtgaattttgaaagtatagtaatagaaataatttaaaatgaaatata

SEQ ID NO: 27 - DNA, 5501 bp, Artificial Sequence
  chemically treated genomic DNA (Homo sapiens)
aaataaaaattttttataagtagtatattttttttttttttattttatttatatatattttttgaaatagagtttcgttttgttatttaggttagagtataatggtataatttcggtttattgtaattttcgtttttcgggtttaagtaatttttttgttttcgtttttttagtagttgagattataggtgattgttattacgtttggttaatttttgtatttttagtggagatagggttttattatgttggttaggttggttttgaattttcgattttaggtgattcgtttgtttcggtttttttaagtgttgggattataggtgtgagttattgcgttcggttaagtagtgtattttttatggtaaattatataggttttgtgtttttaagtatataaatgatttatgttattatttttgttattaaaaaaatgaaaaaatgtcgagttatagaggattaaaaaatattaaaaaatagtaaagttttgagagattggtgtcgtatttttttttttttttaagaagtttaggggatgttatacgttgttttgggtatttttatatgtaaagatgtagacgatgtagaggattgtttagtgggggttgtaaatatgattggtattttgtttgtttagtatatttatttgtagtttggttttttttttttatattatgttttaaggattatgtcggtttttataaatttttttttttgttgttaattttgtagtgtgttttataggagggatggataggttttatttagttatttttttattggcggagtgtttaagtaatatagtagttaaagtatttttgggtatgtttttttgagtatgtgagtaataatttttttagggtagttattgaggataattgatgggttaaaggatgtgttgtgttttgttttttttttgtttgtttttttttttgttttttgttttttttttttttgagatagagtttcgttttgttattttggttggagtgtagtggttcgtattcggtttattgtaattttcgttttttgggtttaagcgatttttttgttttagttttttgagtagttgggattataggtgcgttttattatgtttggttaatttttgtatttttagtagagatagggttttattatgttggttaggttggttttaaatttttgattttatgattcgttatttcggttttttaaagtgttgggattataggtatgagttatcgcgtttagttgttaggatatgtatttttaaatttagataattattattttattttttaaaaatattatatggatttatttttttatttgttatgtatgaaagtgtttatttttttatgttttttttaatattgggtattatttattttttattttattttattttttttttagatagagtttcgtagtcgtttaggttagagtgtagtggtatgatttcggtttattgtaggtttcgtttttcggggtttatgttatttttttgttttagttttttgcgtagttgggattataggtgttcgttatttcgtttggttaattttttgtatttttagtagagacggagttttatcgtgttagttaggatggtttcgattttttaatttcgtgatttgttcgtttcggttttttaaagtgttgggattataggcgtgagttattattttcggttaagatatgtttttttaataggtatattatattattagaaaatagtttttgggtagttttaggtagtgtgtgttagtgttagtggtttttaatttttttttttattgtggtgggtaggaagttttgtgtttttttttagtgttttttagttggtatttgttgttgtttttaggttttgggaattcggtatttttaaaggaggtaagtatagaggtagggcgggtagcgttgttggagcgggcgttgcgggatttggaggtatagaatgtcgtgttggtgagtttttcgttgagtggttattatgttttgttttttttgatgcgaggttattattagttatatggatttgtgtttatcgtatttatttttatttagaattatatttaggagtaattttgggttgtgaaggtattgggagaaggattttaaaggttttggtattttgtttgtggtttgggggggtttaggatttaagttttatttggagggatatggttttatttttgattttggatggaagagttggatggtgttggggaaggttttttaggaagtggtttgggggttagaaatttattaggttttaagattatagttttttgttttgttttgtagattttaatttttattttgtatggagagttggattatattttggttcgagagttattgcggtagtttcgttatttgtttaattattttgtggtgaagttacgtaatgtaggttatgtttgttatttttataagtcgtaagatttttattttgttttgtttgttttttttgattatttattttgaattaatttatttttagtttttagtttggtatgagtttggatagtttggatcgttattttttttgaattagggagatagtttttgggattggaggttagaggttagggttagatttagttaggattttttattttattttatagatataataaaaaagtatatttgttttgtttgggaagtgataggtttcgttttttggtgtgttgtgggaaagacgggagtgggaggtaagtttgggattattttgggtttgggagttggaggggatgtttagtagtttgagaaggttaagaatgcgttattttttaagtgtttggttttattattttgtgtttgagtttttttatttgtaaaacgggtatgatggtaatatttaggttggagggtggttataggattgaatgagtttggataattgagtatttggttatataaggttggggaattgttggtgggaggcggggtgtattattgttgttgtatgattatagggattggtgggaaatttagggtttggatagttaagttaaggaagttaggaatttagagggtatggggaacgcgatttaataattagttagtattggtcgggcgtagtggtttatatttgtaattttagtattttgggaggtcgaggtaggcggattacgaggttaggagatcgagattattttgattaatacggtgaaaattcgtttttattaaaaatataaaaaattagtcgagcgtggtggcgggtgattttagttttagttatttagtaggttgaggtaggagaatggtgtgaattcgggaggcggagtttgtagtgagttaagatcgagattatattattgtattttattttgggtgataaagcgagtgagatttcgttttaaaaaaaaaaaaaaaaaaaaaaaaaaaaaaaaaaaaaaaaattagtattagttgggtattgtggtttatatttgtaattttagtattttgggaggttaaggcgggtggattatttgaggttaggagtttaagattattttggttaatatgataaattttgtttttattaaaaatataaaaattagtttagcgtggtggtacgtatttgtaattttagttattttggaggttgaggtaggagaattatttgaatttaggaggcggagtttttagcgagtcgagaaggagttattgtattttagtttgggtagtagagtgagattttattttaaaaaaataaatagttaaataattagttagtattgttatgagttaaagtttatttgttcgtatgaataaataggtaaataattagttagtattgttgtgagttaaaatttatttgttcgtatgatagagtgagattttgtattaaaaaaataattaaataaagaattatttagtattgttatgagttaaagtttatttgtttttatgttatgtgtgagtagttaagatttaaattttaggaaaggtgggatagaattttttttatagcgtgtttttttggtttagagattgaagtttttgttttttatttttttttaagttgatttagtttttggagtagagggtagatttggttgggagtataaagggtagttggggtataagtgggtaattgtagttgtggtttgtagggggttagtggtatatttgtgtttgtttagtttttttttttggtggttgtagaagagttagtttttttatattgtttatttagggttataattatatttatttatagtgattttattatatttatttattattttatattgttatatatataattatatttattgatagattgtatacgtagtggtacgtttaaatcgttatacgtgtttttgtttatgtatttatttttattttaggtattgttcgggttcggtacggtttcgggtagaattttgtaggaagtggagtttatagttttttggagtttagtgtgggtagatagatattggttaataattttagtataagtggagttgaggcgttagggaggattttttcgaggggttgaggtttgtagtggggagtcgttggagatttgtcgaggagggcgagggcgtaggtttagggttttgtagttttgtattttgagagtttcggggcggtttttttttttttcgttttattcgggggttgaaggaggaggcgtttttaggggacgggatcgttttgagttttcggcgtatatttgggggtaggagtggtaggcgtgtcgtgtggggcggggcgagtttgttagagtagggttagttcggagttcgtaattcgcggggcggcgttggtcgcggcggtcgttgttcggggacgggattcggatttaattttttagtaatttcgttgaggttcgaattagaggcgggcggggatattcgcgtcgacgcggtcgttggcgtcgggacggtttttattgacggttttcggttttcgtttcgatattcggtttcggttacgtggtgggcggatcggggcggttttgagtttgcgatttcgtaggcgatttcgttggattttaagtttaggttatagttagggaagggcgttgagaggcgagcgtgagtttagcgataggagagtgaggtgggggttttggggagggatagagggattggggtttcgtggtttgaaagtcgggtaattgggaggcgttggggttttttttgtttgttttttgtttttgtttttgtttttttttttttttaggagggcggggggagtataagtttgggtttaaattttgtttagttattttatgagttgtttttgaatttttttgagttttttagtttttttttttgtaaagtgggtattttgagtataaattttatggggtttttttggggattaaataaggaaatgtgttggaagtagatagtttagcgtttgaaatagaatgggtgttttttaatgggggtttcgaaatacggtattttatttttgtgggaagttcgggagtcgtcgtggggataggttgtgtgtaggagtttattatttttagggttttggaggggtagttagttatttattttgtttttagt

SEQ ID NO: 28 - DNA, 5501 bp, Artificial Sequence
  chemically treated genomic DNA (Homo sapiens)
gttgggggtaaagtgaatggttaattatttttttaagattttggaaatggtgagtttttgtatatagtttgtttttacggcggttttcggattttttataggggtaggatatcgtgtttcggagtttttattaaggagtatttattttgttttaggcgttgggttgtttgtttttagtatatttttttatttaatttttaaaagagttttatgaagtttgtgtttagaatgtttattttatagaggagaaagttgagaggtttagagaggtttaaggatagtttatagagtagttgagtaaggtttgaatttagatttgtatttttttcgtttttttaaaaaaaaaaaaaggtaaaaataaaaataaaaaataaataagaaaaattttaacgttttttagttgttcggtttttaagttacggagttttagtttttttatttttttttagggtttttattttatttttttgtcgttgggtttacgttcgttttttagcgtttttttttgattgtggtttggatttagggtttagcgaggtcgtttgcgaggtcgtaggtttaggatcgtttcggttcgtttattacgtggtcgaggtcggatgtcggggcggagatcgaagatcgttagtgagggtcgtttcggcgttagcggtcgcgtcggcgcggatgttttcgttcgtttttggttcgggttttagcgagattattggaggattagattcggatttcgttttcgggtagcggtcgtcgcggttagcgtcgtttcgcgagttgcgagtttcgggttggttttgttttgataggttcgtttcgttttatacgatacgtttgttatttttgtttttaggtatgcgtcgggagtttaggacggtttcgttttttaagggcgtttttttttttagttttcggatagggcgggaggaaagggggtcgtttcgaggtttttaagatgtagagttgtaaagttttgggtttgcgttttcgtttttttcggtaagtttttaacggttttttattgtaggttttagtttttcggggaggttttttttgacgttttagttttatttgtattgaagttattggttaatgtttgtttgtttatattgaattttaggaggttgtgagttttattttttgtaaggttttgttcggggtcgtgtcgagttcggatagtgtttagaatgggaatgaatgtatggataagagtacgtgtgacggtttaagcgtgttattgcgtgtgtagtttattagtggatatgattgtgtatgtgatagtgtgagatggtgggtgggtgtgatgaagttattgtgaatggatgtaattgtgattttggatggatagtgtgaggaaattggtttttttgtagttattagagggggaggttaaataggtataggtgtattattggttttttgtaggttatagttgtagttgtttatttgtgttttagttgttttttgtatttttagttaggtttgttttttgttttaggggttgagttagtttggggaagggtgagggataaagattttaatttttaggttaaggaggtacgttgtgggaagggttttgttttattttttttgaggtttaagttttggttgtttatatataatatgggggtaaatggattttaatttataataatgttggataattttttatttagttatttttttgatatagagttttattttgttatgcgggtaaatagattttaatttataataatgttggttaattatttatttatttatttatgcgggtaaatagattttaatttataataatgttggttaattatttagttatttatttttttgagatggagttttattttgttgtttaggttggagtgtagtggttttttttcggttcgttgaaaatttcgttttttgggtttaagtgatttttttgttttagtttttagagtagttgggattataggtgcgtgttattacgttgggttaatttttgtatttttagtagagatagggtttgttatgttggttagggtggttttgaatttttgattttaggtgatttattcgttttggttttttaaggtgttgggattatagatgtgagttatagtgtttagttaatgttggtttttttttttttttttttttttttttttttttttttttttgagacggagttttattcgttttgttatttagggtggagtgtagtggtgtgatttcggttttggtttattgtaagtttcgtttttcgggtttatattatttttttgttttagtttattgagtagttgggattaaagttattcgttattacgttcggttaattttttgtatttttagtagagacgggtttttatcgtgttagttaggatggtttcgattttttgatttcgtgattcgtttgtttcggttttttaaagtgttgggattataggtgtgagttattgcgttcggttaatgttggttaattgttaaatcgcgttttttatattttttaggtttttgatttttttggtttggttgtttagattttggattttttattaatttttgtggttatgtagtagtagtaatatatttcgttttttattagtaattttttagttttatgtggttaagtatttagttatttagatttatttagttttataattattttttaatttaggtgttgttattatattcgttttatagataaggaaatttaggtatagagtggtgaggttaggtatttaggaagtggcgtatttttagtttttttagattgttggatattttttttagtttttaggtttaaagtagttttagatttgttttttattttcgttttttttatagtatattaggaaacggaatttgttattttttaggtaggataaatatgtttttttattgtgtttgtgagatgaaatgaggagttttggttgggtttgattttggtttttggtttttaattttagaggttgtttttttggtttagggagggtggcggtttagattgtttaagtttatgttaggttgggagttgggagtgggttagtttaaggtagatggttaaggaaggtaagtaggataaggtggaagttttgcggtttgtggaggtaataggtatggtttgtattgcgtagttttattatagagtggttgggtaggtggcggagttgtcgtagtgattttcgagttaggatgtggtttagttttttatataggataagggttggagtttgtagggtaaggtagggggttgtgattttggggtttgatgagtttttgatttttaagttattttttaggaagttttttttaatattatttaatttttttatttaaggttagggataaggttatgtttttttaagtaagatttgagttttgaatttttttaagttatagatagggtgttaggatttttgagattttttttttagtatttttatagtttagaattgtttttgggtgtagttttgggtggaggtgggtgcgatgggtataaatttatgtagttggtggtggtttcgtattaggaagggtagggtatagtggttatttagcgaggggtttattaatacggtattttgtatttttaggtttcgtagcgttcgttttagtagcgttgttcgttttgtttttgtgtttgttttttttgaaggtgtcgagtttttaaaatttaggaatagtagtaggtattagttgaggggtattgggaaggggtataggattttttgtttattatagtgggggaaaaagttggggattattggtattggtatatattatttaaaattgtttagaagttattttttggtaatgtaatatgtttgttagaaaagtatattttggtcgagagtggtggtttacgtttgtaattttagtattttgggaggtcgaggcgggtagattacgaggttaggagatcgagattattttggttaatacggtgaaatttcgtttttattaaaaatataaaaaattagttaggcgaggtggcgggtatttgtagttttagttacgtaggaggttgaggtaggagaatggtatgaatttcggggggcggagtttgtagtgagtcgagattatgttattgtattttagtttgggcgattgcgagattttgtttaaaaaaaaaataaaataaaataaaaaataaataatatttagtgttgggggagatatggggaaatgggtatttttatatatgatagatgggaagataaatttatatagtgtttttggagggtgagatagtagttatttaaatttaaaaatgtatgttttggtagttgggcgcggtggtttatgtttgtaattttagtattttgggaggtcgaggtggcggattatgaggttaggagtttgagattagtttgattaatatggtgaaattttgtttttattaaaaatataaaaattagttaggtatggtggggcgtatttgtaattttagttatttaggagattgaggtaggagaatcgtttgaatttagaaggcggaggttgtagtgagtcgagtacgagttattgtattttagttagggtgatagagcgaggttttgttttaaaaaaaaaaaaaataaaaaataaaaaaagaaataaataaaaaaaaaataaaatataatatattttttggtttattaattgtttttagtagttattttagagaaattattgtttatatgtttaaagaagtatgtttaaggatgttttagttattatattgtttgagtatttcgttagtagaggaatggttgaataaagtttgtttattttttttatgggatatattgtagggttgataataaagagggaggtttgtagggatcggtatgatttttgagatatgatgtagggggagaaaattaagttatagatggatgtgttaagtagataggatattaattatgtttatagtttttattagataattttttatatcgtttgtatttttatatgtgggaatatttagaatagcgtgtggtattttttaaattttttagagagggagagaaatgcggtattagttttttagagttttgttattttttagtattttttaattttttatgattcgatatttttttatttttttaatgataagaatgatagtataaattatttgtgtatttaaaaatataaaatttatatggtttgttatagaaagtatattgtttggtcgggcgtagtggtttatatttgtaattttagtatttggggaggtcgaggtaggcgaattatttgaggtcgggagtttaggattagtttggttagtatggtgaaattttatttttattaaaaatataaaaattagttaggcgtggtggtagttatttgtaattttagttattggggaagcggaggtaggagaattgtttgaattcgggaggcggaggttgtagtgagtcgagattgtgttattgtattttagtttgggtgatagagcgagattttgttttaaaaaatatatataaataaaataaaaaaaaagaaagtatattgtttgtgaagagtttttattt

SEQ ID NO: 29 - DNA, 6128 bp, Artificial Sequence
  chemically treated genomic DNA (Homo sapiens)
gagtgttaggaagttaatgttttggaagtattgttagaggggagggggtagttagattttttagttttttcgtttttttgttgggttaagtttgtaatatatttattattttttagagtgttgtttagggatagagttttaggtgtttagtgtggtgatttgtttatgttagttttttttttttttttgttttgtttcgtatttatattttttttatgttttttttttttaaataaattatttgtattgaaatttttgttttaggttttgtttttggggaaatttgaatttagcgaggagagtttaaggaaagtaataacgggtggcgtgggattttggtaataaagggaattattgttttttaagaaaacggtaggaggttaggtacggtagtttatgtttgtaacgttaatattttgggaggttaaggtgggtggattatttgaggttaggagtttaagattagtttggttaatatggtaaaattaagtttttattaaaaatataaaaattagtcgggtatagtggtgggtgtttgtaattttagttattttagaggttgaggtatgagaattgtttgagtttaggaggtggaggttgtagtgagttgggattgtattattgtattttattttgggcgatagagtgagattttgttttaaaattaattaattaattaataggtaagagggaatttggaatggggagggtatggagaggtgggttaggaggattgataggagatgtggttttggtagagagatatagttagtttagtgattgtgtatcgagggaaagggggaatgaatattttgatttttttttttttatttgttgtttttttgttggtgttttttgttgataaaatttaattagagttagagggtaggagagtttattggttttatttatagtagtatggttgtcggatatagaggagtagagtagcgtgtagaagggtggagagtgtatttgtaggggtaaatagaagaattgtattacgtagtttggttttttggatttgatttatttggaatgtagaattttgatagtttaggatttgggtaaagggttttttaggtgttaggatggaagtgattaaggtgtagaggttggagggttggggtaggtagaagtaagtatttttgttatttattgttgtgtgataatttttttttaaaatataatggtttaaaataatatttattttattatatattttaatattataggttaggaatttgggttgggtttatttgggtaatttttttgttttatatggtattgattaaagtttggtttttagtgggtagttgggttggatggtttaatatagtttcgttaatatgattgttgttttcgtagggatggtggaagtttgggtttagtgggattgttaattggaatggttatatgtggatttttttagtatgatggttttttttagaagtttgggtttttagagagaatgtttaagaggttttaaaggatattataaagtttttttatgattaaggttcggaaatttaggaagtttgtttttattacgttttattattttaataagttatttaggttagtttaggtttaagaggaggaaatttagattttattttgtaatgtgaagaattgtaaataatttgtgttatttttaagtaattagtaatttatttaggttgattggtattttagtaatgtggtgggaagtggtgggattgatgttgaagagggatttgaatgttatgagaggttggggaggtaataaggtggggagtgaagtttttcgagttagatttaaatttaaattttagttttgttatttataatttatgagttaagtaggttgtttttttatttgaattttagtgtttttatttgtaaaatgaggagaatattttttatatttgaggatgattgtaaagatgaaatgggatgggtgtttataaagtgttttttagtgtatttggttttaaatttgttttagtaaatggtagtttttattattgaattcgagtaatatagagagttaagaaaggattttataaaaaatttttttggttttgataatgtatgagatttattgatagggtttggttttgtgtttttatttaaattttatttagtagtttttataatttttatatgttgtgggagagattcggcgggagataattgaattatgggggatggttttttttatgttgtttttgtgatagtaaataagttttataagatttgatggttttaaaaatgggagtttttttgtaggcgttttttttttgtttattgttatttatgtaagacgtgatttgttttttttttgttttttgttatgattgtaaggtttttttattattgtggaattgtaagtttattaaagttttttttttttgtaaattatttagttttaggtatgtttttttttttttttttatgagatggagtttcgtttttgttgtttaggttggaatgtaatggtgtaattttggtttattataatttttattttttaggtttaagcgatttttttgttttagtttttcgagtagttgggattatagttatatattattacgtttggttaattttgtatttttttttttttttttagtagagacggggttttattatgttggttaggttggttttaaattttcgattttaggtgatttttttgttttggttttttaaagttttgggattataggtatgaattattgcgtttaggttcgggtatgtttttattagtagtatgaaaataatggattaatatagttatttttttttttatttttatatataattaaattttaaatttagttgattttatattttaaatgtagtttgaatatgagtttttttattttttttattgatattattatgttttatttagattatggtagttgttttttttttggtattttgtttttttttattttcgttggttttttgtaatgttttttttttatagtagggagtttaggttttttaaagtgttttgtgggtgcgaattatttgggggttttgtttgtataaaatatagattttattttagtaggtttgggatggggtttgaaagtttgtatttgtagttagtttttaggtgatgtgggtgttgatgatttttggattatatttttagtagttggagaatattttttttaaataaaagggtgattttgtttcgtttttatttaaaatattttattgattttttaggaattttatattatcgttgggttttatatttttggtaggatttagtttttattagattttttagttttttgttttttatttttttatttttttttttttttttgtttatgggtttgttaatttatttatgatgaaatgaaatgaagttattatttattttagtattggaatattattaataatttgtgtgtggttaggcgtggtggtttatgtttgtaattacgttttgggaagtcgaggtgggtggattatgtgaggttaggtgttcgagattagtttggttaatatggtgaaatttcgtttttattataaatttaaaatttagtagggtacggtgttacgcgtttgtaattttagttattcgggacgttgaggtcgagaattgtttaaaatttaggaggtggaggttgtagtgagtcgagatttcgttattgtattttagtttgggcgatagagtaagagtttattttaaaaaaataaaaataaaaataaaaaaataaaaaataaaaattagttaggcgtggttgtgggcgtttataattttagttattcgggaggttgagataggaaaatcgtttgaaacgttgggggtgcgggggagcggtggggaggaggcgggttagaggggtagaggttgtagtgagtttagatcgcgttattttattgtagttttcgcgaaagagcgaaatttcgttttagtaaataaataaataaataaataaataaataaataaataaataaataatttgtattcgcgtgttattttttttcgtttttattttttttcggtttttttttttttatttgagataattatttttttcgtatttatgtttattttttttttgttttatattttttttatcgatgtatgtgtttaaatatatatatttttggttttgtttttatatattttaaaagttgtattattgtatgtagtttttcgtaatttagttttttttatttaatattgtttttgagatattgtttttgttgttgtttggttgaagtttatttcgttttattgttgtttaacgttttatggtgtgaatatttcggtttatttgtttattcgttcgtggaggggtatttgagggtgtttttaatgtttttgttattcggaatagcgttggtgtgaatattttgtataggtttttggttgcgtttgggcgggttttttaaaggtgaatgtttaggaggggattgtttgtgtttttttttttttcgagttttagtttttttcgtttttttttatttttagttttttggagttttttacgtagaatgttttttttatttttatttatttttgatgaatttttgtaggttttgtaggttacggttggtttttttcgaaagttttttaattatataattatggtgtgtgtttttgcgacgagcgttcgtttattcggtggaaggtacgtcgttcgaggtttgcgatgttttcggggttttcgtttttagtttgggtttggcgtatagtagcgtttagattgtagggggacgtttgaaagttgttggaggagtcggggggaaggtagcgtttagcgaggcggttggagcgcgcgtttataggtgggttcggtcgggcgtcgcggggtcgtagttttcgggtcggcgggcgaggacgtcgggtttagaattttaggaaatgcgcgatttaggtcggcgggcggggcgggggtttcggcgagagggcgggtttcgggaacggcggcgggcggggcgggaggcggggttcggttcgttaagaagagcgtggtcggtcgcggttatcgttggttttagggaaagtcgagcggttatcgagtcggtagagatttatcgagcggcggcggagggagtagcgtcggggcgtacgagggtattatggtttagacgttcgttttcgataagtttaaagtgagcgcgcgcgggggtttcggggacgggggttcggcgtttgggcggttcgaggggtttagcggggtttagttcggggcgtttaaattttgggaacgaacgggggtttttgtaggcgagtttttttttcggtttaggtcgtggtttgtttgcgggttaattagggataatggggtagagaaggtttagaattcggaggtttttagagtttgtttttgtttttgatttgatttttttgggttttagtttcgttgtttgttaagtgggtattttagtatcgttgagcgttgtgtgggtttgggtagggatttgaggtttttgaagtttagttgtatgattaggttcgatgtttacgtcggataggtatttagtgttgtgttcggcgtttattgagtgtttagtgaatggaagtagttttgtacgttagcgttatggtggtgagcgttaaggagtttaggtttgtggatgcgtttcggggaagaatcgtgagttttgttagaaaggggagggaggggagtagagtattttttttttttcgcgcgggaagaataggagttaggtaggttttgggtttggggttttagtagggtttattcgaggttaagttatggttattggttttaggggagaatttttttgttttttcgtttattagttgtggcgttttgggattgttggggttagggagggtttggatttttttggtttgtcgtagagttcgagaggaggggtttaggagtttgttaagtagggtgagttagttagtagggtgtgagagtggttggggaaggagttagttgtagttagttttaatttatttttttaagaaataggtgtgagtggtttaggaggttggtttacgtttgtaattttagtattttgtgaggttgaggcgggaggattatttgagtttaggagtttgagattagtttggataataaaattagatttcgtttttttaaaaaataaaaaaagttaggggaagtgtgtgtggtggtgt

SEQ ID NO: 30 - DNA, 6128 bp, Artificial Sequence
  chemically treated genomic DNA (Homo sapiens)
gtattattatatatattttttttaattttttttattttttggagagacggggtttagttttgttgtttaggttagttttaaatttttggatttaaatgattttttcgttttagttttataaagtgttgggattataggcgtgagttaattttttgggttatttatatttattttttagaagggtaagttgaggttgattgtagttgattttttttttaattatttttatattttattggttgatttattttgtttggtagatttttgggttttttttttcggattttgcgataggttaagggggtttagattttttttgattttaatagttttaagacgttatagttggtgggcggagaaataaggggatttttttttggggttagtggttatggtttggtttcgagtgaattttgttagggttttaaatttagggtttatttagtttttgtttttttcgcgcgggggaaggggggtgttttgttttttttttttttttttttggtagggtttacggttttttttcggggcgtatttataaatttgagttttttggcgtttattattataacgttggcgtataaagttgtttttatttattgagtatttagtaggcgtcgggtatagtattaggtgtttattcggcgtagatatcgggtttgattatatagttgagttttagagattttaagtttttgtttaggtttatatagcgtttagcggtgttaggatgtttatttgatagatagcgaaattgagatttagaggggttaagttaggggtagaagtagattttggaggttttcgggttttggattttttttgttttattgtttttgattagttcgtaagtaagttacggtttaagtcgaaggaagaattcgtttgtaggagttttcgttcgtttttagggtttggacgtttcgggttgggtttcgttaagtttttcgggtcgtttaggcgtcggattttcgttttcggagttttcgcgcgcgtttattttgggtttgtcgaaggcgggcgtttgggttatggtgttttcgtgcgtttcggcgttgtttttttcgtcgtcgttcggtgggtttttgtcggttcggtggtcgttcggttttttttggggttagcggtggtcgcggtcggttacgttttttttaacgggtcgggtttcgtttttcgtttcgttcgtcgtcgttttcggggttcgttttttcgtcggagttttcgtttcgttcgtcggtttggatcgcgtattttttggaattttggattcggcgttttcgttcgtcgattcgaaaattacggtttcgcggcgttcgatcggatttatttgtgggcgcgcgttttagtcgtttcgttgggcgttgtttttttttcggtttttttagtaatttttaagcgtttttttgtagtttgggcgttgttgtgcgttaggtttaagttagaagcggggatttcgggagtatcgtaagtttcgagcggcgtgttttttatcggatagacggacgttcgtcgtagaaatatatattataattgtatagttaaggaattttcgaggggggttagtcgtggtttgtagaatttgtaggagtttattaggggtgggtgggggtggagaggatattttacgtgagagattttagggagttgggagtgaaaggaggcgaggaaggttggagttcggagggagggagaatatagatagtttttttttgggtatttatttttaagaaattcgtttaggcgtagttagagatttgtgtagaatgtttatattagcgttatttcgaataataggaatattggaaatatttttaaatgtttttttacgggcgagtgggtaaataaatcggaatatttatattatgaaacgttagatagtagtgaaacggaatgaattttagttagataataatagaaataatgttttagaaataatgttgagtgaaaaaaattaagttgcggaaaattgtatataatggtgtaatttttagaatgtgtaaaagtaaaattaaaagtatgtatgtttagatatatgtatcggtggaaaaaatgtaaagtaagggaaagatgagtatagatacgagaagagtggttattttaggtgaaagggaaggagtcgggaggaggtaaggacggagggaaataatacgcgggtataggttatttatttatttatttatttatttatttatttatttatttatttattgagacggagtttcgttttttcgcggaggttgtagtgaagtggcgcgatttgggtttattgtaatttttgtttttttggttcgttttttttttatcgttttttcgtatttttagcgttttaagcgatttttttgttttagtttttcgagtagttgggattataggcgtttataattacgtttggttaatttttgttttttgtttttttgtttttgtttttgtttttttgagatggatttttgttttgtcgtttaggttggagtgtagtggcgaaatttcggtttattgtaatttttattttttggattttaagtagttttcggttttagcgtttcgagtagttgggattataggcgcgtggtatcgtgttttgttaagttttggatttgtagtagagacggggttttattatgttggttaggttggtttcgaatatttgattttatatgatttatttatttcggttttttaaggcgtgattataggtatgagttattacgtttggttatatataggttattgataatgttttagtattggggtggatggtagttttattttattttattataaataaattaataaatttataaataagggggaaagagagagtgggagagtggagagtaaggggttagaaggtttgatgggagttgaattttgttagggatgtgggatttagcgatggtgtgggatttttaggaagttagtggagtgttttaagtggaggcgagataaaattatttttttatttggaaaaaatattttttagttattgaaagtgtgatttagggattattagtatttatattatttgggagttgattataaatgtagatttttagattttattttagatttattgaagtagaatttgtattttatataaataggatttttaggtggttcgtatttatagggtattttgagaagtttgggttttttgttgtgaggggagggtattatagggggttagcgggggtgagggaggataggatattaggaaggaggtaattgttatggtttgggtagggtatagtgatgttagtgggggaagtggagaaatttatatttaagttgtatttagggtgtaaaattagttggatttggggtttggttgtatgtgggagtgagggagagggtggttgtattagtttattatttttatgttattgatgaagatatattcgagtttgggcgtagtggtttatgtttgtaattttaggattttgggaggttaaggtaggaggattatttgaggtcgggagtttgagattagtttgattaatatggtgaaatttcgtttttattaaaaaaaaaaaaaaaaatataaaattagttaggcgtggtggtgtatgattgtaattttagttattcgggaggttgaggtaggagaatcgtttgaatttgggaggtggaggttgtggtgagttaagattatattattgtattttagtttgggtaataagagcgaaattttattttatgaaaaaaaaaaaaaagatatatttgagattgggtaatttataaaagaaagaggttttaatagatttatagttttataatggtggggaggttttgtaattatggtagaaggtaaaggaggagtaagttacgttttatatggatggtagtagataaagagagagcgtttgtagggaaatttttatttttaaaattattagattttgtgagatttatttattattataagaatagtatgggaaagattattttttatgatttaattatttttcgtcgagttttttttataatatgtaggaattatgggagttattagatgagatttgggtgaggatataaagttaaattttattagtgggttttatatattgttaaagttaggggagttttttgtaagatttttttttggttttttgtgttattcgggtttaataataggggttgttatttattgagataggtttggagttaggtatattgggaagtattttataagtatttattttattttatttttatagttatttttagatgtaggaggtgttttttttattttatagatgaggatattgaggtttagatagagagatagtttgtttggtttatgggttgtaagtggtaaaattggggtttaaatttgaatttgattcgagaaattttattttttattttattgtttttttagttttttatgatatttaagtttttttttaatattagttttattattttttattatattgttgaaatgttaattaatttagatgagttgttggttgtttaagggtgatataaattatttgtaattttttatattgtaagatggagtttaggttttttttttttggatttgggttggtttgagtgatttgttggagtaatagagcgtgatgggagtaagttttttggattttcgagttttggttataaagaagttttgtggtgttttttggggttttttgaatattttttttgggaatttaagtttttagaagagattattatgttaagagagtttatatatggttattttagttgatagttttattgagtttaggtttttattatttttacgaagatagtaattatgttagcgaagttgtgttgggttatttagtttagttgtttattgaaaattaggttttggttaatgttatgtgggatagaagaattatttaagtaagtttagtttaaatttttgatttatagtattgagatatgtaatgaaatggatgttattttaagttattgtgttttagggggagattgttatatagtagtaggtaataggaatgtttgtttttatttgttttagttttttagtttttgtattttagttatttttattttgatatttggaaaattttttatttagattttagattattaaaattttgtattttaaatgggttagatttaaagggttaggttgcgtgatgtagtttttttgtttgtttttgtaggtgtattttttatttttttgtacgttgttttgtttttttgtgttcggtagttatgttgttgtgggtgagattaatgggtttttttgttttttggttttggttgggttttgttaatagggagtattagtaggagaatagtagatgagaggagagaggttaggatatttattttttttttttttcggtgtatagttattgggttgattgtgtttttttattaaggttatattttttgttagtttttttggtttatttttttatattttttttattttagatttttttttgtttattgattgattgattgattttgagatagagttttattttgtcgtttagggtggagtgtagtggtgtaattttagtttattgtaatttttattttttgggtttaagtaatttttatgttttagtttttggagtagttggaattataggtatttattattatgttcggttaatttttgtatttttagtagaaatttggttttattatgttggttaggttggttttgaatttttgattttaaataatttatttattttggttttttaaagtgttggcgttataggtatgagttatcgtgtttggttttttgtcgtttttttgaaaggtagtggttttttttgttattagagttttacgttattcgttgttgttttttttaaatttttttcgttaggtttaggtttttttagaagtagagtttgagataaagattttaatgtaagtagtttatttgggaagaggaaatatgggaaggatgtgggtgcgaaataagataggaaaggggaagaagttgatatgagtaggttattatattgagtatttggagttttatttttgggtagtattttgggagatgatgaatatgttgtaggtttaatttagtagaggagcgaggaagttggggaatttaattgtttttttttttttggtaatgtttttaggatattaattttttggtattt

SEQ ID NO: 31 - DNA, 8323 bp, Artificial Sequence
  chemically treated genomic DNA (Homo sapiens)
ttttataaatattcggtaagtttatttgttgtaggttgtagtttaaatttattggttttttgttgattttttgttttgatgatttgtttagtgttgttagtggagtattgaagttttttattattgttgtattgttgtttattttattttttaggtttagtagtaattgttttgtaaatttgggatttttagcgttaggtgtttatatatttaggattgtgatatttttttgttgaaatagtttttttttttattattatataatgtatttttttgttttttttaatttttgttgtttttaagtttgttttgtttgatataagaatagttatttttgtttgtttttggtttttatttgtatggaatatttttttttatttttttattttaagtttatgtgagtttttatgtgttaggtgagttttttgaagatagtaggtattttgttggtgaatttttatttattttgttattttatatattttaagtggagtatttaggttatttatatttaacgttagtatttagatgtgaggcgtaattttatttatcgtgttattgttgtttgtatattttgtttttttttttattgtgttgttgttgtataggttttgtaagatttatgttttaaagaggttttgttttaatgtgtttttaggatttgttttaagatttggagttttttttagtagtttttttagtgttggtttaataatgatgaatttttttagtatttgtttgaaaaagattgtaatttttttttatttatgaagtttagttttgttggatataaaatttttggttggtaattgttttgtttaaggagattaaagaaaggattttaattttttttagtttgtagggtttttgttgagaaatttgttgttaatttgataggtttttttttataggttatttgatgtttttgttttacggtttttacgatttttttttttgttttgattttagataatttgatgattatgtgtttaggcggtgatttttttgtgatgaattttttaggtgttttttgagtttttgatatttggatatttaggtttttagtaaggttagggacgttttttttgtttatttttttaaatatgttttgtaatttttagatttttttttttttttagtaatattaattattttgaggtttggttatttaatataattataaattttatgtaggttttgtttttttttaaatatttttttttttttgtatttgtttaattgtgttaatttaaaagttttgttttttagaagtttttttttttatttgtttgattttattgttgagattttttaatgtattttgtaattttttttgtttttcgtttttagaagttttgattgttttttttttatgttatttattttattagatatttttttatttatattttgtattgtttttttgattattataagttggattttatttttttttggtgtttttttgattggtttgataattaattttttgatttttttttatggtaatttagagattttattttggtttggatttacggttggtaatttagcgggattttttgggggtgttgaagaattttattttgttatattattagaattgtttttttggtttttttttatttaggtagattatattagagggaagatttaggatttaagggttgttgtttaaatttttttgttttataggatgtttttttgatgtggtgtttttttttttttttaagagatggagttttttgagagttgaattgtagttattgtttttttttttttagatttagtaatttagtggagttatttggttttggattggtattggggagtgtatttagagttttgtgatgtgatttatttttaggttttttggttatggatattagtattttttttagtggaggtagtaggagagtggagtggattttgtgagggtttttggatgtatttttgttaagcgtgttggttttgtgttcgttggtttttagttaggaggtgacgattttaagagtattttagttacggtagtttagggaggattaggtcgtgggtaggattatagtatttttaatagattatgtttttttttttagttattaggttgggtagagaaagattattaattaggggtagggttagatatgtttgagtttagattttttttggttagggtttgttgtggttgatttgggagatgagggtgtagtttttaggttaatggagttatgtttttagtgggattatagttgtttttgtcgtgttatataggttattaggggagtgggggaaagttggtagttataggttttatatagtttttatgtagtttagagtttgagggtcggttttatttttattatgagtttttaataaaaatgtgtttatttttttttagttagttggtgagtagagttgagaaattgttttaggttataagtttcgtaattgagaaagtaagttggtttacgttttttttgttgttttatagaggttggagtagtagtttatcgtttttaaagggtttgtggattttttttgtttttttggtatgtttttgtagtagtttttggagtaaaagtttataatgtgggtttttatgaattgttttgtttatttaagtagtaggtgtaagttagttttgttttttatttttttttattttgttttttgatgatttattttttttgatatattttaataaaatattttttttttaaggtttttttattttaaaagtagaagttatttttttaatttaattaataaatatttgagtatttattttgtgttagatattgagttaagagttgagaatttataatgaaaagatggagtaggattttttttttttgaattttacgttgaattttttttttggtacgattattttttgttttataggagggttttttgttttgtttatttgattatagttaattttattgttaatttgtaaatttttaaagaggagatatcggattttttggattatgggattgtttatagaatagtgtttgttttaatataaatgagtataagaatttaataattatttattaaatatttatagtatatatggagttaggtatagttgatgatataaatgaaatttaagaatatttttgattagaaatttttagtagaaattaggagattgatttttatattaaatatagagggcgataaaagggaatagatttaaaattataggagagatgttagtatgatagggatgtagagatataaagtataatagtgagatggagttaatatatttttacgagggtgattttgttttgtattttaaattttgggtaggatttgaatgggttagagggatagaaaagaagagaaagagtatgatgagtaagggtttgaatgttaaatagatttttttttgggggattagggagatataagtttttaaagtatatacgttttgtattggagaatggggaggagtagatagatgagaaggttgaagttatattacgaagttttgaatgttgaatattagatttggggttatatttttattttgatatattttagaagtaattgaaatcgtaggattttttttgtttttttattgggtgaatgttttttagttttggtgtgagttttagtgtttacgtagttaaagtttattgaaatgttttttttataattttagagagatatgttttttatgttgatatgtttatgttgatagattgtatttgattaaatagttgtttgtgtaatgtttttaagtgtggataaaagaaaaattaaatttataattttggatagttatgtgtagattagttatattgattaaagggtaatagaaatgatttagtgaggatttgtttgaattttttataattatttaaaatttattttaaatatttgtttatttataatgttttttttgaggtttttattttgaatagtatttttgtttttgtttttaaagtattaattgatttttgtgatagcgtattttttagttaggttgatatgtagatttggttgtttgtgtattttttttttatagattgtgagtttttttttatgaataataattgtagttagtatttagtagggtgtttttatttgttaaattttatgatgagtgttttatatagattatattatttatttattaaatagttttttaaaatggtgttatatttattaaatagttttttaaaatggtgttatatttattaaatagttatttaaaatggtattatttttttttattttataggtaaataaattaaggtaaaaaaaaaaagtgaaataataagtgttagtatatagagttagtaaggaatagggtttgttaggttttaaaaagtatgttattatttttgttttatattgtttttggtatagatagaggtaatgttttatttattattgttatttattggatttagtttagtgtttgatatatagaggggtttagttaatgttgattggtttgaggtggagtaaaaatgtttagtagggtgagtatttttgttgtgattgagtatttgattttttatgaagagaaggggagttttgagttaaatatatttttttggtttttggttgttatttttatttgttcggtttttttgtttttttttttttttaattgtatcgtttggatttaaagttggagtttaatgtagataaagggaaaatagaattttgaatgattattgtgggattaagagaggagaaataagaaatttgatagatgaggaataaagtgaggagaagagaaaatgattaagttttattattttaatttaatatttaatttaatgaaaataaaattttatttgaaattggaaaaattaatgtattgattgttggtttattgtttttttttttatgatttgatagtttgtgaataatttaatgggtgtggtttaaagatttagattatgtgtggaattggaatcgggtgttatttaagtaaaaaaaataaataaatatttatgtaatatatttgttttatgtatttgagtagggaagaaatttataaggatttattagttttttggtttgtagagaagatagaattaatatgagtatagtaggaaaagtaagtaaaaaatatattattgttggaattatatttttattaatataataaagaaagtaatatagtatttgatgaattatttaaaatttatatttaaattagaaatgatatattgaaatatgatatgtaatatatgttataatatgtaatgtatattgaattatagtggaaataagttatttttaaatatttttaaaaagaatgtatagaatttgtatttatgaagtgtttattttttatattaaagatatttgcggtaaagcgataatttattttaagttaattatgattaatttgtaaagttaaagttagaaatgttttttattaagaagttttttttatattaaggtattataatttaaatgtattattatttgtatttatattttttgtgaatataagaaagttaagtttgatgaaagttttatgagaggatttgatttagaagattttgaaatatttttttaattttaatataaaatagtttataaaatgtttattggttttatagtattagaattattaaggttaattaagataatattaatatttaaattttgatttaaaagggtttagtaggatataatttaggtaatttttagagtaattttatggaatagtattttttttatataaaagttaatatggttttatagaaaattaataatataatttgaattatttattagtattaggaatatagatatttggttttgttttttataaatattttaattgtttaatgtgtttataggtgtataaaaatatatgtggtaatataatataattaattgatattttaattgtttaattataaaaatttgtgtaattatttttagtttttttttgtgttaggagtgtattatatagtaaaatattttattatgataatttagtttaaaggttttgaggtttttttatatattttgtgataaaataggtttatattaataagattggttggaaattatatgggtggtttattgttattgtttttattttattttattttatttttatttattattgattaatatgtatattttatatagaaaataattagtaaaaaaattaaatttattaaatttaatttaaaagaaataatgagtttttatagtaaaagtataaattaattatattaatgaaaataataattgatgaaatagataattgtttttttttttgggtataatattaataatttagtttgttgttagtattttatttatgtttatatattttgtattatattttttttaaatgttaaatagtgataatattaatatttattttataaagtagttgtgttgtgataatttaataaatgaatattataaagaatttaaaattgtatttgggatgtagaaataagttaataattattagttattattattattgttgttatttaattttttgttaattttttattgatatcgagtagtgaaaatataaggttagatttatttttattttttggaaagttagttttgagattttagagaaattagttaattattgagttaatggatttttaattattttagttgtaaaataaagttaataatttaatagtattgttttggtagtatttttatgagattttaaaataatgtatgttgtttatagtagtataatttgtaattataaaatatagaattgatttaaatgtttatcgataaacgagtagataaagaaaatatggtgtgtatatattatggaatattatttagttattaaatagaataaaataaaataatggtttttgtagtaatttggatggagttggagattattattttaagtaatttagaaatggagaattaaatattatatgtttttatttataagagagagttaggttatgaggatgtaaaggtatgagaatgatattatgaattttgggaattcgagggggaaggttgaaaggggaggtgagggataaaagattatatattgggtgtaatgtatattgtttgagtgaagggtgtattaaaattttagaaattattattaaagaatttatttaggtaattagaaaatatttgtattttaaaaattattgaaattaaaaataaattttataaataaatataatgtaaataatttatcgagtataggttataatgtgtttgttatattataggtatttgataattaggaatttttattattagtattttatttttaagtattttgatatttatttggtattgattatgttgaatattttgtaaagttgaataatttgataaataaataatgataacgaattattagaagaataaattttaattgaatttttattataattgtaattttgttgattttttttggaaagagttttgtgaattgtatatgtttaattataatgaagatagatattatagtttattgttaagtattggaaattatgtgtatattttttatttttaagaatatttatggataagatttgttagttagaaatttaaatatatagtgtttttaattttgaaatatgtatgtgtaggtttgagtgtatatatatatatatatatatatatatatatatatatatatttaattttaatttttgtaatttggggtttaaattaaagttggaaggagtttttatatatagattagataatagtatagttttttaaagttaagttgtaaatgggtgttggaataagtaatatatagaagtggtggagagagaaaattaaaagaggagaataggaaaagagagagaaagagatgttattttaggtaggaaggtaaatatatttttataaatttagatttttttggtttaagtagaaaattgagaaagaaaatagtgtattttatgtgaatagatattgattttgttagtaaaatgaaggtgatttagaatttgatgtattagttaataattgtgggtgaagagatatttttagtatagtattaggaaatgttaggattaaataattttggagaaaaataataataatataaggatggttttaatgaatatattttattttattttagtgtgttgttatagttaattgtttatttttttttatgttattgtttttttaaaatatatttttttttttttataaattagaggtgattatttttatagagtatttgttaggtattagatatgggattagatgttgtatgtataaagatgaaatgatataatatttgattgtaagcgtgggagaatattggtgttatttttttgtttgtttttttagg

SEQ ID NO: 32 - DNA, 8323 bp, Artificial Sequence
  chemically treated genomic DNA (Homo sapiens)
tttagaaaagtaaatagagagatggtattagtgtttttttacgtttgtagttagatattgtgttattttatttttgtatatataatatttaattttatgtttggtatttaataagtgttttatagaaatgattatttttgatttataaagagaaaaaaatatattttaaaaaagtaataatataaggaaagataaatagttaattataataatatattgagataaaatggaatatatttattaaggttatttttatgttgttgttgtttttttttaaagttgtttaattttgatattttttaatgttatgttgaaaatgtttttttatttataattattggttggtatattaaattttaagttatttttattttgttgatagagttagtgtttgtttatataaaatatattgtttttttttttaattttttgtttaggttaaaaggatttgagtttataaggatatatttatttttttgtttgggatgatatttttttttttttttttttttattttttttttttaattttttttttttattatttttgtgtgttatttgttttaatatttatttgtaatttagttttgagaggttgtattgttatttgatttatgtgtagagattttttttagttttgatttgagttttaaattataaaggttagagttgggtgtgtgtgtgtgtgtgtgtgtgtatgtgtgtgtgtgtatatatttagatttatatatatatattttaaaattggagatattgtgtgtttgaatttttagttagtagattttatttatagatgtttttaaaaataaaagatgtatatataatttttagtgtttggtagtgaattgtaatatttgtttttattgtggttaagtatgtataatttataaaattttttttagagagaattaataaaattgtaattatgataaaaatttaattgaaatttgtttttttgataattcgttgttattatttatttgttaaattatttaattttgtaggatgtttaatatgattaatgttaaataaatattagaatatttggaagtaaagtattaatagtaggagtttttgattattaggtgtttatgatgtgataggtatattgtggtttgtgttcggtgagttatttgtattatatttatttataaaatttatttttaattttaatagtttttggggtgtaggtgttttttggttatttgggtaagttttttagtggtgatttttgagattttggtgtattttttatttaagtagtgtatattgtatttaatatgtagttttttattttttatttttttttttaattttttttttcgagtttttaaagtttatgatattatttttatgtttttgtatttttatagtttaatttttttttataaatgagaatatatgatgtttggttttttatttttgaattatttagaataatggtttttagttttatttaagttgttgtaaaggttattattttattttattttgtttaatggttgagtagtattttatggtatatgtatattatattttttttatttattcgtttgtcgatgggtatttaggttagttttgtattttgtaattgtaaattgtgttgttataaataatatgtattattttaaaattttataaggatgttattaggatagtattattgaattattggttttattttatagttgaaataattgaggatttattgatttagtgattaattaatttttttaaagttttaaagttggttttttagagaataaagatgaatttagttttatgtttttattattcggtgttagtaaaaagttagtaaaaagttaaatagtaataataataatagtggttaatagttattgatttatttttatattttaaatataattttaagttttttatagtatttatttattgaattattataatataattattttatgaaatagatgttagtattgttattatttagtatttgaggaaaatataatgtaggatgtataaatataaatgaaatgttgataataagttaagttattgatgttgtgtttaagaggggaggtaattgtttattttattagttattatttttattaatatgattggtttatatttttgttgtaggaatttattattttttttaagttgagtttggtaaatttaatttttttgttaattgttttttatgtggaatgtatatattaattagtaatgaatgaaagtaaagtgaggtggaataagaatagtaataatgggttatttatgtgatttttaattagttttattgatatgaatttgttttgttatagagtgtatagagaagttttagagtttttaaattgagttattatagtgagatattttattgtgtaatatatttttaatataaaaaaggattggaaatagttgtataaatttttgtaattaggtaattaaaatattaattgattatattgtattattatatgtatttttgtgtatttataaatatattgaataattaagatatttatggaaggtaaaattaaatatttgtgtttttagtgttaataagtgatttaaattgtattattaattttttgtaaaattatattgatttttatatggggaagatattgttttataggattattttggaaattgtttgaattgtgttttattagatttttttaaattagaatttgaatgttgatgttgttttgattaattttgatgattttaatgttgtgagattaatgagtattttgtaaattattttatgttaaggttaaaagggtattttaaagttttttaaattaaatttttttataaaatttttattagatttaatttttttgtatttataaaaaatataaatataaatagtaatatatttaaattatggtattttaatataaagaaaattttttgatgaaagatatttttaattttggttttataaattaattatgattagtttggaataaattatcgttttatcgtaaatgtttttaatgtgggaaataaatattttatagatatagattttatatattttttttgaaggtatttaggaatagtttatttttattgtagtttagtatatattatatattatagtatatattgtatattatattttagtgtattatttttaatttagatatgaattttaaatgatttattaaatattgtattattttttttgttatattgatgagaatatagttttaatagtaatatattttttgtttattttttttgttgtgtttatgttgattttgttttttttgtagattaggagattggtgagtttttgtggattttttttttgtttaagtgtataaagtaggtgtattgtataggtatttatttattttttttgtttgaataatattcgattttagttttatatatgatttaggtttttaagttatatttattagattatttatagattgttaaattataaagaagagggtaatgaattagtaattaatatattgatttttttaattttaaataagattttgtttttattaggttaaatattaagttaaagtgataaagtttaattatttttttttttttttattttattttttatttgttaaattttttgtttttttttttttagttttatagtggttatttaaagttttgttttttttttatttgtattaagttttagttttgaatttaaacggtgtagttaggaaggaggaagagtaaagaagtcgggtaaataaagatgatagttaggagttagaggaatgtgtttggtttaggattttttttttttttatagagaattagatatttaattatagtaaaggtgtttattttgttaagtatttttgttttattttaaattaattagtattgattgagtttttttgtgtgttaggtattaagttgggtttagtggatggtagtgataaataagatattatttttatttgtattagaggtagtatggggtaaaggtgatggtatgttttttgggatttggtagattttattttttattagttttgtgtattggtatttattattttattttttttttttgttttagtttgtttatttgtaagatgaagaagaataatattattttaaatgattgtttagtgaatatagtattattttaaaggattgtttagtgaatatagtattattttaaaggattgtttagtgaataaatgatataatttatgtaaagtatttattatagagtttaataggtaggagtattttattaaatgttagttataattattatttataaaaggaagtttatagtttatggggaaaagatatataggtagttaagtttatatattagtttggttgggaagtgcgttattatagggattagttagtgttttggggatagagatagaggtattatttagaatgaaggttttaggggaggtattatagatgaataggtatttgaggtagattttaaataattgtgggaaatttagataaatttttattggattatttttattgttttttgattaatgtaattagtttatatatggttgtttaagattatgagtttaattttttttttatttatatttggaggtattgtataggtagttgtttaattagatgtagtttgttagtatgaatatgttaatataaaggatatatttttttagaattgtaaagggaatattttagtaagttttaattacgtaggtattgagatttatattaagattgagaaatatttatttaatagagaagtaaggaaggttttacgattttagttgtttttgaaatgtattaaggtaagaatatagttttagatttgatgtttagtatttaaggtttcgtaatatggttttaatttttttatttatttatttttttttattttttaatatagggcgtatgtgttttagaagtttgtatttttttggttttttaaagaggaatttatttaatatttaagtttttgtttattatgttttttttttttttttttgtttttttggtttatttaaattttatttaaaatttgagatgtaggataaggttattttcgtggaggtatattaattttattttattgttgtgttttatgtttttgtatttttgttatgttagtattttttttgtggttttgggtttgtttttttttgtcgttttttatatttagtgtagagattagttttttaatttttattggaaatttttagttagggatgtttttaaattttatttatattattaattatatttagttttatgtatattgtaggtgtttaatgagtgattgttgaatttttatgtttatttatgttaggataggtattgttttatgagtagttttataatttagaagattcggtgttttttttttaagggtttatagattagtagtgggattggttgtggttaggtagataagatagagaatttttttgtgaagtaggaagtggtcgtgttaggagaagagtttaacgtggaatttaaaggaggaagattttattttatttttttattatggatttttagtttttaatttaatgtttggtatagagtgagtgtttagatatttgttgattaaattaaagaaatgatttttatttttagggtgaggaaattttgaaagaaaggtattttattaagatgtattaagaaaagtgggttattaggaggtaaaatggaggaggataggaggtaggattaatttgtatttgttatttggatgaatagagtagtttatggagatttatattgtgaatttttgttttaagaattattgtagggatatattaggaaagtagagagaatttatagattttttgaaggcggtggattgttgttttagtttttgtgggatagtagaagaaacgtgagttagtttgtttttttagttgcggggtttatagtttggggtaattttttagttttgtttattagttgattggaaggaaataaatatatttttgttgagggtttatggtgggagtgagatcggtttttagattttgggttgtatgggagttgtgtgaggtttgtggttgttagtttttttttatttttttgatgatttgtgtgatacggtagagatagttgtaattttattgggaatataattttattggtttgggaattatatttttattttttaaattagttatagtaagttttgattaaggagagtttaagtttagatatgtttagttttgtttttagttgatggtttttttttatttagtttggtagttgaagaaaaggatataatttattgggggtgttatggttttgtttacgatttgattttttttagattatcgtagttgaggtgtttttgaaatcgttattttttggttggaggttaacgaatataaaattagtacgtttaataaaaatatatttaaggatttttatagaatttattttatttttttgttatttttattggagaaggtgttggtatttatggttaagaaatttgaagatggattatattataggattttgaatatattttttagtattagtttaaagttaggtagttttattgggttgttagatttagaagagaaaaagtaataattatagtttagtttttaggaagttttattttttgggaaaaggggagagtattatattaagggagtattttataggataaaagaatttgaatagtagtttttgagttttagattttttttttgatgtaatttatttaaatgagaagaaattagaaaaataattttggtaatatgataaaataagattttttaatatttttaaaagatttcgttagattattagtcgtggatttaaattaagatgaaatttttgaattgttataaaaagaaattagaaggttgattattaaattaattaaggaggtattagagaaaggtgaagtttaatttatagtaattaaaaaaataatatagggtgtgaatgagaaaatatttagtgaaatagataatataagagaaaaataattaaaatttttgaaaacgaaggatagagagaattgtaaaatgtattggaaagttttagtaatagagttaaataagtagaaaaaagaatttttaaaaaataaggtttttaaattaatataattaaataaatataaagaaaaaagaatatttaaaaaaggataaagtttgtatgaaatttgtgattatgttaaatgattaaattttagaataattggtgttattggagaagaagagaaatttaaaagttgtaaaatatatttgagggaataaataagagaaacgtttttggttttgttagagatttagatatttaaatattagaagtttaaagaatatttgagaaatttattataaaaagattatcgtttaggtatatagttattaggttatttaaagttaagataaagggaagaatcgtaagagtcgtgaggtaaaagtattaagtaatttatgaaggaaaatttgttagattaatagtagattttttagtagaaattttataagttagaagggattggggttttttttttagtttttttaaataaaataattattagttaagaattttgtgtttagtaaaattaagttttataaatgaaggaaagttatagttttttttagataaatgttgagagaatttattattattaagttagtattaaaagaattgttaaaaggagttttaaattttgaaataaattttggaaatatattaaaatagaatttttttaaagtataaattttataggatttatataataataatataatgaaaaaaaaaataaagtatataggtaataatggtacgatgaatagaattgcgttttatatttgaatattaacgttgaatgtaaatggtttaaatattttatttaaaatatatagaatggtagaatggataagaatttattaataaagtatttattgtttttaagagatttatttgatatataaggatttatataaatttaaggtaaaggggtggaaaaagatattttatgtaaatgaaaattaaaagtaagtaagagtagttatttttatattagataaaataaatttgaaagtaatagaagttaaaaaagataaggaggtatattatataatgataaaagaaagaattattttaataggaaaatattataattttaaatatataagtatttaacgttggaggttttaaatttataaaataattattattagatttaagaaatgagatagatagtaatataataatagtaggagattttaatattttattgatagtattagataggttattaagatagaaagttaataaagaattaatggatttaaattatagtttataataaatggatttatcggatatttatagaa

SEQ ID NO: 33 - DNA, 7516 bp, Artificial Sequence
  chemically treated genomic DNA (Homo sapiens)
tgagaattaaaatttattatagtatagtagaaatttaatagaaagaaaagattttaataaatttattttttggtgtaattttttttttagaagattattaatgaagtgttttaaaattgataaattaatttaaagaaagatgtggtatttgagaagttgatgtttttattttgagaagagggaagggattttttaggatgagggttaggaggttttaggatggtaggtgtggtttgatgtaaagtattttttgtttatatggaagtaagttaaagattttagggagatatatagttgggaataaaatttttagggattatgttattattttatattttaagtaatttaaatggaaataaaattgatatgttttgggaaaatatgttaaaaaatttaaaagtggttttaaggttgacgaagatatataaaatatatattttgtatgtattatattattttgtataaaatggtaataatagtagaatttgtttaatagtattattgtgaggattatatgatttgttaattgtaaagtatttagaatagtaagtggtatatatttatagtgataaggatattagttattttattgatatttaggttattaaattcgagttaggttttttgggattttggttttattattagatgtgttatattgggaaatttatataatttttttaaattttagtgtttttatttgtaaaatgtgtatggtaatggtatttatttgataagttaatgttaaatattgttataagtaaggtaatgtgtgtatagagattagtaaagttagtattttatggatgttatatattgatattaattagttgtaatttttataaaaaaatatatttttaatttttaaaaggaaaaaattttttattattaaagaattttttagtttttagatatttttatattgtgataattatattatttgtattattttgtattgttttaataaatatttggtatttttatattattttagtaaatgtatttttaagtatatgttaagtatattattagaataatttaaaatgtattaataatttatttaaaatatattagtaaattattcgtggagtatttagatcgtttgtagtttggttattatagagaaggttggatggaatatttttgtttttggattgggttttttagattattttttaattgtttttataggaggaatgtaaataaatattttgtttttttatatacgttttttatggaagaattttaggttttatagttatagttagtttagtaagtattttagtttttttaatatttttggttttagtattaaaattaaaatgaaatgttaattgagtaagaatttatggttttgaatgtgggtatttttaaaaatttttttaggaatttaaaatttattttatttattgtaatattttatagattatttatgtaattattttatttttaagttttatttattgttattaaagttttttttttattttttattttgtattttatttttaaaaatgttttaaagtttgttatttatgtatatatttgaaatgttataatttttttttagtaattatttttataataatattaattttattattttgttaaatgatttaattttaaaaatgaagaatttgtattgaaggtattttttgttagttataatattattttttagatttaggtaaattattggtttatggggaaaaggagatagttggattttttatagagatgttagtttgtttttttcgaggttttggagttatatttttgtattatttattattatatgtataattatattagagatgttagtttttgttttttattaattttttaagagagtttgtggtaatttgttatattagtaatagaaaattaatatattttttttgtaaatatggttatttataggttgtgggtagatatatttttttttttgattataatttggaaaagttttttaattttaagaagttataagattagattaggtttatttggataatttaagttagtttttttattttaagatttttaacggaattatatttataaaattcgtttttttttatgtaaagtaatatatttttagattttagggattaggagtggatttttttgagggttattattttgtttagtatatcggggatcgttgatttaaattgaagtaagtatattatttttttggataagttgtatttataatatagtagttggtggaaatgtaatatagaatcgggttggtttatagagatatatatagagagagaaatagaggaaagtgatgttttgtgatttttagagagtgatagggttatttttggatattttagatgttgttataggtttgttatggttttttgatattagaatattgatatttaattatgtgataattgttttttttttttatttaaatttttagaaggtggggtaaagagtaagtatagagtagttgttagatggtattaagaaagattttttgattttatgaagtttgtgttaaagtttttttggtagtttatggagttatgtgtttataaagtgatgtaagtttataagtggatattatatttttaaatttattagggttttgaaaataaggtggtagtggttataattttttgaaatgttatgtttataggtgtgagagaggattaaatagaaaaatgtataaaagggggtattaggggagaaaaatgtttttaagattttttgtttatatgttgattgtatttatattttttaattgtaatttattttttttaataaattttaataaaatattttttttttaaggtttttttatttttaaattagatgttatttatttaatttagttaataaatatttgagtatttattttgtgttatttattgagttaagagttgagaatttataatgaaaagacggagtagggttttttttttttgattttacgttgaatttttttttggtatttattattttttgttttataggagggttttttgttttttttatttgattatagttaattttattgttaatttgtaattttttaaagaggagatattagattttttggattatgggattgtttatagaatagtgcgtgttttaatataaaggagtataagaatttaataattttttattaaatatttattgtatatatgaaattaggtatagttgaagatttaaatgaaatttaagaatatttttgattagaaatttttagtagaatttaggagattgatttttatattaaatataaaggttataaaagagaatgggttttaaaattataggagggatgttagtatgatagggatggaaagaagtgaagtatgattgtgagatggcgttaatatatttttataagggcgattttgttttagattttaaagtttgggtaggatttgaatgggttagagggatagaaaagaagagaaaaagtatgatgagtaagagtttgaatgaggaatggatttttttttggaggattatagagatatatgtttttaaagagtataggttttgtattggagaatggtgaggaatagttggatgagaaggttaaagttaggttatttggggttatttttttttcgttatatttttttaaattagtagtaattaaaattataggattttttttgtttttttattgggtgaatgttttttagttttggtgtgagttttagtgtttatataattaaagtttattgaaatgtttttttggtaattttagagaaatatgttttttatgttaatatgtttatattgatagattatatttaattaaatagttgtttgtatagttttatgacgtttttaagtgtggataaaagaaaaattaaatttttatgtttggaaagttatgaggatattagttatattgattaaagggtaatggaaatgatttagtgaggattttgttttattttttataattatttaaaatttgttataaatgtttgtttttttataatgttttttttgagttttttattttgaatagtaattttgtttttgtttttaaagtattaattgatttttgtgatagggtattttttagttaggttgatatgtagatttggttttttgcgtgtttttttattataaattgtgagtttttttttatgaataataattgtagttaatatttaggagggtgtttttatttgtaaaattttatgatgagtgttttataaggattattttatttatttataaatagttttttaaaatgacgttattatttatttttattttatagataaggaaattaaggtaaaaaaaatttagtgaaataataagtttaagtatatagaataagtaaggaattgggttggtttggttttataagttatgttattatcgttgttttatattgttttttggtataggtagaggttatgttttatttattattgttattttattggatttagtttagtgtttgatatagggaggtgtttagtttatatatattagttttgagtggagtagaattgttaggtatagtgattttttttgttgtgattaattgggtgtttgattttttgttgtaaagataaagaggttgttttttttattttatttcgttttttttgtttttttatttttttttttttttcgttattttatgtgtatttaaagttgtagtttagtgtagataaagggaatataaggtagaacgatttatgtgggattgaaagaagagaaataaggaattttagaggtcggggggggggtgggaagtgaggaaaagagaaagtgattataatttattattttaatttaatatttaaattaatgaaaataaaattttatttagaatttggaagttaatattttgattgttggtttagtatttttttatttgttttgatagtttgggaataatttagtgggtgtggtttaaagatatagattacgtgtggaattggaattggatgttatataagtaaataaaataaatatttgtgtaatatatttgttttatgtatttaagtagagaagaaatttataaagatttatagtttgttggtgggtagagaagatagaaacgatatgagtatagtaggaaaagtaagtaaaaaatatattattgttggtaatatatttttattaatataataaagaaaggaatatagtatttgatgaataatttaaaatttatatttaaattagaaatgatatgttgaaatatgatatgtaatatatattttaatatgtaatgtatattgaattgtagtggaaataagttatttttaagtatttttaataggaatgtatagaatttgtgtttattagtttttattttttatattaaataaatttatagtaaaatgatagtttattttaagttaattatgattgatttgtaaatttaaagttagaaaagtttttaatggtaagttatttttataataagaaattataatttaaatgtgttattatttttatttaaattttttatgaatataggaaagttgtttgatagaagtttgatgagaggaatttgatttagaagattgaaatattttttaattttattataaaatattttataaaatatttattgattttatagtattagaattattaaggttaagtaagatattaatatgtaaattttgattaaaaggggtttattatgatataatttagggaatttttataaaaattttatggaatagtattttttttatttaaaagttaatatggttttatagaaaattaatgatataatttgaataataatataatttgaattatttagtattaggaatatagatatttggtttttttttttataaatttgtatttatttgtttaatgtgtttataggtgtatgtggttatttaatataattaattgatttttttaattgtttaattatataaatttgtgtaattatgtttagttttttttttgtgttaggagtgtattatattgtaaaatattttattatgataatttaatttaaaggttttgaggtttttttttgtattgtgtgataaataggtttatattaataagattggttgatggagttagaggacgttattttaagtaaagtaatttatgaatggaatattaaatatttaatgtttttatttaaaagtggtagttaaattatgaggatataaaggatgagaatgatataatggattttggggattgagggaaaagggtagtaggaggaataagatataaaagattatatattgggtttagtttatattgtttgtgtgaggggtgtattaaaatattagaaattattattaaagaatttattcgtgtaattaaaaattatttgtattttaaaaattattgaaattaaaaattaattaatgaataaattttaagataaaaataatgtatgtaatttatttagtataggttataatgtgtttgttatattataagtattttataataagaatttttttattattagtattttttgtttaagtattttggtatttattttggtattgattatgttgaatattttataaagttgaaaattttgataaataaataatgaaaatgaattggtagaaaaataaattttaattgaatttttaaattatatttgtaattatgttggttttttttagaaagggttttgagaattatatatgttttattataacgaagatgggttttatagtatattgttaagtattagaaatatatgttgaattttatttttaagaatatttatggataagttttgttaaatagaaatttaagtatattgtttttttagttttaaaatatatatgcgtgggtttgagtgtatatatatatatatacgtgtatatatatatattattaattttaatttttataatatttggtttaaatttaagttgaaagaagtttttatatataaattagattataaaataggttgttaaagttaagttttaaatgagtaggaaataagtagtatatagaagtagtggagagagaaaattaaaagaggataataagtaaatagggagagaaagaaatgttattgtgcgtaggaaggtaaatgtataattgtttttatagagttagatttttttggtttaagtagaaaattgagtaataaagtagtgtattttatgtagatagatattgattttgttagtaaaataaaggtgatttttaattttatatattagttaatagttgtgggtagacgagtatttttaggacggtattaggaaatattaggaataaatatttttagagaaaaaataataatataagaatggtttaaataaatatattttattttttttaatgttttattatattttgtttatttttttttatgttattgttttttaaaagatatttttattttttttataaattagagtattttatttttatggagtatttgttaggtattagatatgggacgtaatattatatgtataaagatgaaaagatataatttatgattttaagagtgggaaaatattgttattatttttttgtttgattttttagg

SEQ ID NO: 34 - DNA, 7516 bp, Artificial Sequence
  chemically treated genomic DNA (Homo sapiens)
tttagaaaattaaatagagagatggtgatagtgtttttttatttttgaagttataagttgtgtttttttatttttgtatatgtaatattgcgttttatgtttggtatttaataagtgttttatggaaatgaagtattttggtttataaagagaataaaagtattttttaaaaagtaataatataaggaaagataaataaagtataataagatattgagaaaaatggaatatatttatttaggttatttttatgttgttgttttttttttgaaggtgtttatttttggtattttttaatgtcgttttgaaaatgttcgtttatttataattattagttgatatatgaagttagaagttatttttattttgttgatagagttagtgtttgtttatataaaatatattgttttattgtttaattttttgtttaggttaaaaggatttgattttataagagtaattatatatttatttttttgcgtataatgatatttttttttttttttatttgtttattgtttttttttaattttttttttttattatttttgtgtgttatttgttttttatttatttgaaatttagttttggtagtttgttttgtaatttaatttatgtgtagagattttttttagtttagatttgagttaaatattatagagattagagttggtggtgtgtgtgtgtgtacgtgtgtgtgtgtgtatatatttagatttacgtatgtatattttaaaattggagaaatagtgtgtttggatttttgtttagtagagtttatttatagatgtttttaaaaataaagtttagtatatatttttagtgtttggtagtgtattgtaaaatttattttcgttgtggtaaagtatgtataatttttagagttttttttagaaagaattaatataattgtaaatataatttaaaaatttaattgagatttatttttttgttaatttatttttattatttatttgttaaaatttttaattttgtaggatgtttaatatggttaatgttaaaataaatattagaatatttagatagaaggtattaatagtaggaagatttttattatgaggtgtttatgatgtgataggtatattgtgatttgtgttgggtaaattatatgtattatttttattttaaaatttatttattgattaatttttaattttaatagtttttggggtgtagatggtttttggttatacggataagttttttagtggtgatttttgatattttggtgtattttttatataagtagtgtagattgaatttaatatgtagttttttatgttttattttttttattgttttttttttttagtttttaaagtttattatattatttttattttttgtgtttttatagtttagttattatttttaagtgagaatattggatatttggtgttttatttatgagttattttatttagaataacgttttttagttttattaattagttttattgatatgagtttgtttgttatataatgtagagagaagttttagaatttttaaattgaattattatagtgagatattttatagtgtggtatatttttaatataaaaaaaggattggatatagttgtataggtttatgtaattaaataattaaaaaaattaattgattatattgaatgattatatgtatttgtaaatatattgagtaaataagtataaatttatagaagaaaaaattaaatatttgtatttttagtgttaagtgatttaaattgtattattatttaaattgtattattgattttttgtaaaattatattaatttttaaatggggaagatattgttttataggatttttgtggaaattttttgaattgtattataatggattttttttaattagaatttgtatgttgatgttttgtttaattttgatgattttaatgttgtgaaattaatgagtattttgtaagatattttatagtaaggttaaaggatattttagttttttgagttaaattttttttattaaatttttgttagataatttttttgtgtttataaaaaatttgaataaaaataataatatatttgaattatggttttttattataaagataatttgttattaaagatttttttaattttagatttataaattagttatgattagtttggaataaattattattttattgtaaatttatttaatgtaggaaataaagattaatagatataggttttatatatttttgttaaaggtatttaagaatagtttatttttattgtagtttagtatatattatatattgaggtgtatattgtatattatattttagtatattatttttaatttagatatgaattttaaattatttattaaatattgtatttttttttttgttatattgatgagaatatattattaatagtaatatattttttgtttattttttttgttgtgtttatgtcgtttttgttttttttgtttattagtagattgtgagtttttgtggattttttttttgtttgagtgtataaagtagatatattgtatagatatttattttgtttgtttgtgtaatatttaattttaattttatacgtgatttatgtttttaagttatatttattggattatttttagattgttaaaatagataaaagggtattgaattagtaattaaaatattgatttttaaattttagataagattttgtttttattagtttaaatattaagttaaagtgataaattgtaattatttttttttttttttattttttatttttttttcggtttttggaattttttgtttttttttttttaattttatataggtcgttttgttttgtattttttttgtttgtattaagttgtaattttgaatgtatatggggtggcgaggaaggaagaagagtaagaaaataggaaaaacgaagtaggatagagagagtagtttttttgtttttatagtagagaattagatatttaattagttatagtaaaggggattattgtgtttggtaattttgttttatttaaaattagtatgtatggattgaatatttttttgtgttaggtattaagttgggtttagtggagtagtagtgatgaataagatatgatttttgtttgtgttaagaggtagtatggggtagcggtgatggtatggtttgtgggattaggttaatttagttttttatttgttttgtgtatttggatttattattttattgaattttttttgttttaatttttttatttgtgagatgaagatgaataatggcgttattttaaaggattgtttgtgaataaatgaaataatttttgtaaagtatttattatggagttttgtagataggagtatttttttaaatgttagttataattattatttatgaaagaaagtttatagtttatagtgaaaagatacgtaggaaattaagtttatatattagtttggttgggaagtgttttattataggggttagttaatgttttgggaatagagatagagttgttatttagaatgaaggatttaggggaggtattgtagaggaataggtatttgtggtagattttaaataattgtgagaaatggagtaaaatttttattggattatttttattattttttgattaatgtagttagtatttttatggttttttaagtataggagtttgattttttttttatttatatttggaggcgttataaaattatataggtaattatttaattagatatagtttgttaatatgaatatgttagtatagaggatatatttttttaaaattgttaagggaatattttagtaagttttaattatgtaggtattgagatttatattaagattgagaaatatttatttaatagaaaagtaaaggaggttttatgattttagttgttgttagtttggaaaggtatgacggaaagaagatagttttagataatttggttttagtttttttatttaattattttttattattttttaatatagggtttatgttttttagaagtatgtatttttgtggttttttaaagaggaatttattttttatttaagtttttgtttattatgttttttttttttttttttgtttttttggtttatttaaattttatttaaattttgagatttaggataaggtcgtttttgtggagatatgttaacgttattttatagttatgttttatttttttttatttttgttatattagtattttttttgtggttttagggtttatttttttttgtggtttttatatttagtgtagagattagttttttaagttttattggaaatttttggttagagatgtttttgaattttatttaaatttttaattgtatttagttttatgtgtataataggtgtttaatgaaagattgttgaatttttgtgtttttttatgttaggatacgtattgttttatgagtagttttataatttagaagatttggtgttttttttttaagggattatagattagtagtgggattggttgtggttaggtagagaagatagagaatttttttgtgaagtaggaagtggtgagtgttaggagaaagtttaacgtggaattaaaagaggaagattttatttcgtttttttattgtgaatttttagtttttaatttaatgagtggtatagggtgagtgtttagatatttgttgattaaattaaatgaatgatatttaatttgagaatgaggaagttttgaaagaaagatattttattaagatttattaagaaagatgagttgtagttgagaggtatagatgtagttagtatatggataaagaattttgaaaatattttttttttttaatatttttttttatatatttttttgtttaatttttttttatatttgtagatatagtattttagggaattatagttattattattttgtttttaaggttttaatgaatttggaaatgtgatatttatttatgagtttgtattattttgtgaatatatggttttatgaattgttaaaagaattttggtataaattttatagagttaagagattttttttaatattatttggtaattattttgtgtttattttttgttttattttttaaaagtttaaatggaggggaagagtagttgttatatgattgagtgttagtgttttagtattagagggttatggtaggtttgtagtaatatttggaatgtttaaaggtaattttgttattttttaggggttatagggtattatttttttttgtttttttttttgtgtgtgtttttgtaagttagttcgattttatattatatttttattaattattatattataaatgtagtttatttagagagatgatatgtttgttttagtttgggttagcgattttcggtgtgttaggtagaataatggtttttaaagaggtttatttttaatttttggaatttaggaatatattgttttatatggaaaaaaacggattttgtaggtgtgatttcgttaaaggttttgagatgggaagattagtttggattatttaggtgaatttaatttaattttatggttttttaaaattggagagtttttttaggttgtggttaaagagggagatgtgtttatttatagtttgtagatggttatgtttgtaagaagggtgtgttaattttttattgttgatgtaataaattattataagtttttttggaaggttagtggaaggtaaggattggtatttttaatataattatgtatgtaatgatgagtagtgtagagatgtgattttaaagtttcgagaaggatagattagtatttttgtaagagatttaattgtttttttttttttatgggttaataatttatttggatttaagaaataatattgtaattggtagaaagtatttttagtataaattttttatttttggggttaaattatttggtaaaatggtaagattaatattattgtaaagatgattgttagaaaaaaattgtaatattttaagtatgtgtataaataatagattttaaagtatttttggggatgagatgtaaaatgaagagtgggagagggattttagtagtaataaatagaatttgagaatggaatagttatataaataatttatagaatattataataagtagagtaaattttaagtttttagaggaatttttgaaaatatttatatttaaaattatgaatttttatttaattagtattttattttgattttggtattgaagttaaagatgttgagggaattgaaatgtttgttggattggttgtggttgtggagtttggaatttttttatgaagagcgtgtgtgagagaataaaatgtttgtttatattttttttgtgaaggtagttgggaaataatttaagaagtttaatttaaaaatagagatgttttatttagttttttttgtgatagttaaattgtaaacgatttgaatgttttacgaatgatttattgatgtattttaaatgagttattgatgtattttaagttattttgatgatgtgtttggtatatgtttaaaagtatatttattgagatgatgtgggaatattaagtgtttattaaaataatataaagtaatataaatggtatggttgttataatataaaaatatttaaaagttaaagagttttttaatggtggagaattttttttttttgaaaattaaaaatatatttttttgtaaaaattataattgattagtattagtatgtaatatttatggagtgttgattttgttaatttttgtgtatatattgttttatttatagtaatgtttagtattaatttattaggtagatattattgttatgtatattttatagatgaagatattgaggtttagagagattgtataaattttttaatgtaatatatttagtggtggagttaggattttaggaagtttaattcgagtttaataatttaaatattaataaaatagttaatatttttgttattgtaagtatgtgttatttattgttttaaatgttttataattaatagattatgtaatttttataataatattattaggtagattttattgttattattattttatataaaatggtataatatatataaaatatgtattttgtatgttttcgttagttttaaagttatttttgaattttttagtatatttttttagaatatgttaattttatttttatttaaattgtttgagatatgagatgatgatatagtttttgaaaattttatttttagttgtgtatttttttggagtttttgatttatttttatgtgggtaggaggtgttttgtattaggttatatttgttattttggagttttttaatttttattttggggaattttttttttttttttagggtgagagtattagttttttagatattatatttttttttgaattaatttattagttttggggtattttattagtaattttttggagaaaaagttatattaaggggtgaatttattgagattttttttttttattggatttttattgtgttgtgatgagttttaattttta

SEQ ID NO: 35 - DNA, 9905 bp, Artificial Sequence
  chemically treated genomic DNA (Homo sapiens)
gaaaaagagagaagtaatgaggagagatagtttttgatgtttagttgtttaagatatattatttattttttgttttttgatgtttttgtgattgtttgttatattatattataaaatttattaatattagtttgattgtagttttgtttttgaagttaatatttttgatttaaaaagtatatttagagatttataatttttgagttttttttattttatttataaaatgagattaataataatattttttttgtatgattgtattaaggattttgtgtaataatgtgtggaaaattttgagttttgaaaatatagtaggtgtttaataaattatggttattaattttttgtaaatttatgttttataaataaattattaatatattaggaatttaaattatttttgatattttattatgtttgtttattattttgtaaataggttaatttaatgagttttttaaattggttgtaataggtgaattttttgatgttatttagattaagtagttagattttttttttttatattgttttttataaagtgggtgagtagagtgatggcgattttttagaagtgatgtttatttaattattataagattataatgaggaaatgaaaaattttttttatttttttgataggtggagtagtgtatttttagtaggattttttatatttgtataattggtgtagttagaaatagataataatgttgtttttttgataattttagaaaaatatagtttatgtatatatgttgatagattatatttaattgaatagttaaatgtattgtagtttttaagttttggtagaagatttgagatttattttttttaaattaaattcgtatttatttatatttatggtattaaataaagaataatggagtgtttaagtgagttttttggtttgtttgttaaagtgattatttttgtttttaaatattttttttttataaagttttttttttttaagttttttgattagaatgttttgtatttgatatagtattatttagataggttgatatgtttattgtgtgttttttttttttttagattgagagtttttatttatggataataattgtagttaatatttgttgaagatttttttatttgttatagatgttttatatggattattttattaatttattaaataattttttaaagaggtgttattgtgtttagaattagttttttttggtgggtttttggtttcgttgattttaagaatgaagtcgtggattttcgtagtgagtgttatagtttttaaagatggtgtgtttggagtttgtttttttagatgtttagatgggtttggagttttttttttttggtgggtttgtggtttcgttgattttaggagtgaagttgtagattttcgtaatgagtgttagagtttttaaaggtggtacgtttagagttgtttgtttttttttgtgggtttgtggttttattgattttaggagtgaagtcgtagatttttatagtgagtgttatagtttttaaaggtggtacgttcggagttatttttttttttggtgggttcgtggttttgttggttttaggagtgaagttgtagattttcgtggtgagtgttatagtttataaaggtagtgtggatttaaagagtgagtagtagtaagatttattgcgaagagtaaaagaagaaagtttttatggtatggaaggggattagagcgggttgttgttgttgttttgggtggttagtttttatttttttatatggttttgtttatattttgttgattggtttattttatagagtgttgattagtttattttatagagtgtttattggtttatttttatagagagttgattggtgtatttataaatttttagttagatatagagcgtagattggtgcgtttttatagagtgttgattggtgtatttataaatttttagttagatatagagtattgattggtgtgtttataattttttagttagatagaaaagttttttaagtttttatttgatttagaagtttagttggttttattttttaattttttatttaaatatgatattttaattgttgttgggaattgggcgatgattgttttagttaatttttgttggataggagcgaagaaggggttttgtagttgtagtgttttttagaggggaattttttaggttagtgaaagggttagtgggttggtttaggggtttttagtagaagttgagtttatttggggttttatttgtaagattatttgtagtttgacggtttcgattttagaggaaataaatttgataaggaggttaaaaatatagggtttgaaggcgagtaatagtaaatggtagttacgggatttagaaaggggagaagttatgttgtttaattttagaggttggtataagagtttgaaaggtattgtttgattttagaagtttttttttgtaaatgttgggaggtatttcgtattatttttgattggttagtgtaaaaataatattttttttttaagaaggtggagagttttttttttttagtagtgatgaggtttaggttttagaggttttggagtgttattgttgttaaagagtttatttgggattgtagagtaaggatagattttattgttttttgtaaattgagagattttttgagagtgtgtggtagtaggataatatatgttatattgttaatttttagtaaattttatttttgttgaaaaatttgtaagtttgggattttaattattttttgttattaataagatttcgtttagtttatattaatttagagttggtatagatggtttttttttgatattgtaagtattttaaggtttggttgagtgtaaaataattcgtacgttcgaatagattaattattaggtaatttttttaattttgtttttataagagtttttttattatttattgaatatttattgtgttttttttttttaattattttggaggaaatatttattgttttgttttgagttttttttagatttggtaggaattttgtatggtaattaattaagatttagattttttgttaggaaatttgttggtttaaagattttttataggaaggttataggttgttagtggttttagtgttgtcgggttatttttttgtttatattgataataagatggtattggagtgttatagggttatagagaggatttttaattattaattataggttttaaatttattttggtttttaaaggaatagagtatattattttttttttattatttttatttttttttttttttgattttttttttgtttttttttttttgatttttttttttgtttgtttttttttttttgtttttgattttgttttttattttttttttttttgattttttttttgtttttttttttttttttgtttttttttttttgattttttttttgtttttgtttttttttttttttttttttttgtttattgagaggtgaagttagttggatttttgggttaggtagggatttggagaatttttttgtttagttaaaggattgtaaatatattaattagtgttttgtgtttagttaaaagtttgtaaatataataattattattttgtaaaaatgtattaattagtgttttgtgtttagttaaaggtttgtaaacgtattaattagtattttgtaaaaatgtattaattagtgttttgtgtttagttaaaggtttgtaaatgtattaattagtattttgtaaaaacggattaattagtattttgtaaaatggattaattagcgttttgtaaaatggattaattagtaggatatggggtggggggggttaaataagggaataaaagttggttatttaagatagtagtagtaatttatttaggtttttttttatgttatggaagttttttttttttgtttttcgtaataaattttgttgttgtttattttttgggtttatgttatttttatgagttgtaatatttatggtaaaggtttgtagttttatttttgaagttagtaaggttatgaatttattaggaggaataaataattttggacgtgttatgtttaagagttgtaatatttattgtgaaggtttgtagttttatttttgaagttagtgagattatgaagttattgggaggaatgaataattttggatatgttatttttaagagttttgatatttattgcgaaggtttgtagtttttggatataatattatttatttttattttaaagacgaggaaattaaggtaaagaatagttaattaataagtttaagtatatagagttgttaaggaatagtttgtttgattttaaaggttgtgttataatcgtttttttatattgttttttagtagaggtaagagttaagttttatttattattgttattttattagttttagtttagtgtttgatatagggagatgtttaattaatgttgattgttattgagtggattagaaatgtaaggtatagtgagtttttttgttgtgattgatggggtgtttgattttttgttataaagaggagagtgttgtattaaatatatttttttggtttttagttttttttgttttattttgtttatttaatttttttattttttttttataattgtattatgtggatttaaaattgtagtttagtgtagataaagggaaaacggaattttgaatgattttaaagggaaaattgaattttgaatgatttttgtgggtttgagagaagagaagtaggaatttgagagaggaggaagagagaaagtaattaaaatgtatcgttttaatttaatatttaatcgaatgatagtaaaattttatttgaaattggaaaagttaaggttttgagtgttggttcggtgtttatttttttatgatttgatagtttgagaagaatacgacgggtgtggtttaaaaatttagattacgtgtgtagttggaattgggtgttatatgagtaaataaaataaatatttgtgtaatatatttgttttatgtatttaagtagagaagaaatttataagtatttattagttttttggtttgtagagaagatagaattaatatgagtatagtaggaaaagtaagtaaaaaatatattattgttgataatatattttttttaatataataaataaaggaatatagtattaataatgaataatttaaaatttaaaatttatatttaaattagatgatgaataatttaaaatttatatttaaattagaaatgatatattggaatatgatatgtaatatatgttataatatgtaatgtatattgaattatagtggaaataagttatttttaaatatttttaaaaagaatatatagaatttgtatttattgtttttattttttatattaaataaatttgtcgtaaagtgatagtttattttaagttaattatgattgatttgtaaatttaaagttagaaaagtttttaattagaagttatttttatattaagaaagtataatttaaatgtgttattatttgtatttatattttttgtgaatataagaagttaagtttgataaaatttttatgagagggatttgagaagattttgaaatatatttttaattttattataaaatattttataaaatatttattgattttatagtattagaattattaaggttaagtaagatattatatttaaatttcgtttaaagggggtttattatgatataatttaggtaatttttatagaaattttatggaatagtattttttttatataaaagttaatatgattttatagaaaaataataatgtaatttgaattatttattagtatttagaatataaatatttgtttttttttttataaatttatatttattttttaatgtgtttataggtgtatagaaatgtatgtggttatttaatataattaattgatattattaattgtttaatttaaaaaaatttgtgtaattatttttagttatttgttgtgttaggagtgtattatataataaaatattttattatgataatttagtttaaaggttttgaggtttatttttatgttgtgcgataaaataggtttatgttaataagattggttggaaattatatgagtggtttattggtattgtttttatattattttattttattttatttttatttattattgattaatatttatattttttatagaaaataattagaaaaaagaaaatttaaatttattatttattaaattcgatttaaaagaaataatgagtttatagagtaaaagtataaattaattattaatgaaaataataattgatgaaatagataattttttttttttgagtgtaatattaataatttagttttttgatagtattttatttatgtttattcgttttgtattttattttttttaattttaaattgtgataatattaatgtttattttataaggtagttgtgagaatttagtaaattaatagtgaaaagtatttagaatagtatttggtaaataaaaataagttaataaatattagttattgttattgttgttttataattttttgatatttattattacggagtatagaaaacgtgaggttatattaatttttttattcgtttttttgtttggagatggagtatttttttattgtttaggttggagtgtaatggtgatttcggtttattgtaatttttgtttttcgggtttaagtgatttttttgttttagttttataagtagttgagtttataggtatacgttattatgtttggttaattttagtatttttagtagagatagggttttattatgttggttaggttggtttttaatttttgattttaggtgattcgtttatttcggtttgttaaagtgttgggattaaaggggtgggtaattgtattcggtttgatttttattttttggatagttagttttgagattttaggaaaattatttaattattgagttagttgatttttaattattttagatgtagtaagattaataatttaatagtattgttttggtagtattcgttttaggtttaaaagtaatttatattgtttataatagtataatttgtaattgtaaaaatatggaaattttttaaatgtttattaattaacgagtggataaagagaatgtggtatatgtatattatgagatattatttagttataaaatggaataaaataatggtttttgtagttatttggatgaagttgaaggttattattttaagtgaagtaatttaggaatggaaaattaaatattatatggttttatttataagtgggagttaagttataaggatataaaggtataagaatgatatagaggattttggttagggataaaagattatacgttggatatagtgtatattgttcgggtgatatatgtagtaaattttaaaaattattattaaagaatttatttatgtaattaaaaataatttgtattttaaaaattattgaaattaaaaataaataaattttaaaaataaaaataatgtatgtaatttatttagtataagttatagtgtatttgttatattataggtatttgataattagaaatttttattattagaattttatttttaagtatttcgatatttattttggtatggattatattgaaaattttgtaaagttgaaggatttgataaatgaataatgaaaattaattggtagaagatgaaattttaattgaatttttattatatttgtaattatgttgattttgtaaagaaagagtttagtgaattgtatatgttttattataataaagatgggttttatagtatattgttaagtattggaaatatgtgattagtttttatttttaaggatatttgtggataagtttgttagttagaaatttaaatatatagtttttttagttttaaatatatgtgtgtggtttgaatgtatatatatatatatatataaatatatatatataatattaattttaatttttgtaattttgggtttaaatttaagttggaaggagtttttgtatataaattagatgaataaaataggttgttaaagttaagttttaaatgggtgtttgagataagtaatatatagaagtggagagagaaaattaaaagaggataataggtaaatagagaaagagatattattttaagtaggaaggtaaatgtataattgtttttatggagttagatttttttggtttaagtagaaaattgagtaagaaagtagtgtattttggatagatattgattttgttagtaaagtaaaggtgatttagaatatgtattagttaatatttgtgggtaaatagttgtttttaggatagtgttagaaaatattaggattaaatatttttggagaaaaaaaaattaaaagaataaatggtgttgggaaaattggttagttatatgtagaaagttgaaattggattttttttttatattttatataaaaattaatttaagatggattaaagatttaaacgttagatttaaaattataaaaattttagaagaaaatttaggtattattatttaggatataggtatgggtaaggattttatgtttaaaatattaaaagtaatggtaataaaagttaaaattgataaatgggatttaattaaattaaagagtttttgtatagtaaaagaagttattattagagtgaaaaggtaatttataatatgggagaaaattttcgtaatttatttatttgataaagggttaatatttagaatttataatgaatttaaataaatttataagaaaaaaataaataattttattaaaaagtgggcgaaggatatgaatagatattttttaaaagaagatatttatgtagttaaaaaatatatgaaaaaatgtttattattattggttattagagaaatgtaaattaaaattataatgagatattattttatattagttagaatggtagttattaaaaagttaggaaataataggtgttggagaggatgtggagaaataggaacgtttttatattgttggtgggattgtaaattagtttaattattgtggaagttagtgtggcgattttttagggatttagaattggaaatattatttgatttagttattttattattgggtatatatttaaaggattataaattatgttgttataaagatatatgtatacgtatgtttattgtcgtattatttataatagtaaagatttggaattaatttaaatgtttaataatgatagattggattaagaaaatgtggtatatatatattatggaatattatgtagttataaaaaatgatgagtttatgttttttgtagggatatggatgaagttggaaattattatttttagtaaattatcgtaagaataaaaaattaaatatcgtatatttttatttataggtggaaattgaataatgagattatatggatataggaaggggaatattatattttggggattattgtggggtggggggaggggggagggatagtattgggagatatatttaatgttagatgacgagttagtgggtgtagcgtattagtatggtatatatatatatatgtaattaatttgtataatgtgtatatgtattttaaaatttaaagtataattaaaaaaatatttaaaaaaaataaaataaaataaaataaaaaagaataatttaaatgaatatattttattttatttaagtgttttattgtatttaattttgtttatttttttttatgttattgtttttttaaaagatatttttattttttttataaattagaggattttatttttatgtaatatttgttaggtgttagatatgggatttaatgttgtatgtataaagatgaaaagatataatttttgattgtaagcgtgggaaaatattggtattatttttttgtttgatgttttagg

SEQ ID NO: 36 - DNA, 9905 bp, Artificial Sequence
  chemically treated genomic DNA (Homo sapiens)
tttagaatattagatagagagatggtattagtgtttttttacgtttgtagttagaaattgtgtttttttatttttgtatatgtaatattgagttttatgtttggtatttaataagtgttgtatagaaatgaagttttttggtttataaagagaataagagtattttttaaaaaagtaataatataaggaaagataaataaagttaagtataataaggtatttagataaaatggaatatatttatttaggttatttttttttattttattttattttattttttttgaatgtttttttaattatattttaagttttagggtatatgtgtatattgtgtaggttagttatatatgtatatatgtgttatgttggtgcgttgtatttattaattcgttatttagtattaggtatattttttaatgttattttttttttttttttttattttataatagtttttagagtgtgatatttttttttttgtgtttatgtgattttattgtttaatttttatttatgagtgagaatatgcggtgtttggttttttgtttttgcgatagtttattgagaatgatgatttttagttttatttatgtttttataaaggatatgaatttattattttttatggttgtatagtattttatggtgtatatgtgttatatttttttaatttagtttattattgttggatatttgggttggttttaagtttttgttattgtgaataatgcggtaataaatatacgtgtgtatgtgtttttatagtagtatgatttatagttttttgggtatatatttagtaatgggatggttgggttaaatggtatttttagttttagatttttgaggaatcgttatattgatttttataatggttgaattagtttatagttttattaatagtgtaaaagcgtttttatttttttatattttttttagtatttgttgttttttgattttttaatgattgttattttaattggtgtgagatggtattttattgtgattttgatttgtatttttttgatggttagtgatgatgaatatttttttatgtgttttttggttgtataaatgtttttttttgagaagtgtttgtttatgtttttcgtttattttttgatggggttgtttgttttttttttgtaaatttgtttgagtttattgtagattttggatattagttttttgttagatgagtaggttgcgaaaatttttttttatgttgtaggttgtttttttattttgatggtagttttttttgttgtgtagaagttttttagtttaattagattttatttgttaattttggtttttgttgttattgtttttggtgttttagatatgaagtttttgtttatgtttatgttttgaatggtaatgtttaggtttttttttagggtttttatggttttaggtttaacgtttaagtttttaatttattttgaattgatttttgtataaggtgtaaggaagggatttagttttagttttttatatatggttagttagtttttttagtattatttatttttttgatttttttttttttaaagatgtttaattttgatattttttaatattgttttgaagataattgtttatttataagtattggttggtatatgttttaagttatttttattttgttgatagagttagtgtttgtttaaaatatattgtttttttgtttaattttttgtttaggttaaaaggatttgattttataaaaatagttatatatttatttttttgtttaggatgatgtttttttttttatttgtttattgtttttttttaattttttttttttatttttgtgtgttatttgttttaaatatttatttgaaatttagttttggtagtttgttttgtttatttaatttatgtgtagagattttttttagtttagatttgagtttaaaattatagaggttagagttggtgttgtgtatgtgtgtttgtgtgtgtgtgtgtgtgtgtatttagattatatatatgtatttaaaattggagaaattgtgtatttgagtttttagttagtaagtttatttatagatgtttttaaaaataaaagttgattatatatttttagtgtttggtagtgtattgtaaaatttatttttattgtggtaaagtatgtataatttattgagttttttttttatagaattaatataattgtaaatataataaaaatttaattgaaattttattttttgttaattaatttttattatttatttgttaaattttttaattttgtaggatttttaatgtggtttatgttaaaataaatatcggaatatttggaaataaagttttaatagtaggagtttttgattgttaggtgtttatgatgtgataggtgtattgtggtttgtgttgagtgagttatatgtattatttttatttttaaaatttatttatttttaattttaatagtttttggggtgtaggttgtttttgattatatggataagttttttagtggtggtttttgagatttgttgtatgtgttattcgagtagtgtatattgtatttaacgtgtagttttttatttttaattaaagttttttatattatttttatgtttttgtatttttatagtttagtttttatttataagtgagattatatggtatttggttttttatttttgagttattttatttaaaataatggtttttagttttatttaagtggttgtaaaggttattattttgttttattttatggttgagtagtattttatggtgtatatatattatattttttttatttattcgttggttgatgggtatttaggaagtttttatatttttgtaattgtaaattgtgttgttgtaaataatatgaattatttttaaatttaaaacggatgttattaggatagtattattgaattattggttttattatatttgaaataattgaggattaattgatttagtgattgaataatttttttgaagttttaaagttggttgtttagagaataaagattaggtcgggtgtagttgtttatttttttaattttagtattttggtaggtcgaggtaggcggattatttgaagttaagagttggagattagtttgattaatatggtgaaattttgtttttattaaaaatgttaaaattagttaagtatggtggcgtgtatttgtaaatttagttatttgtgaggttgaggtaggagaattatttgaattcgggaggtagaggttgtagtgagtcgagattattattgtattttaatttgggtaatagaaagatattttatttttaaataaaaaaacgaatgaaaaaattaatgtagttttacgttttttgtatttcgtggtagtaaatattaaaaagttataaagtaataataatagtggttaatatttattgatttatttttatttattaggtattattttaagtgttttttattattaatttattgaatttttataattattttatgaaatagatattagtattgttataatttaggattgaggaaaataaaatgtaggacgggtaaatataaatgaaatgttgttaaaaagttaagttattgatgttgtatttaagaggggaggattatttattttattagttattatttttattaatgattggtttatatttttgttttatgaatttattattttttttaagtcgagtttagtaaatggtaaatttaaatttttttttttttaattattttttatgaggaatgtaaatattaattaataatgaatgaaagtaaagtaaagtgaagtggtgtaagaatagtattaatgggttatttatgtgatttttaattagttttattgatatgagtttgttttgtcgtatagtataaaggtaagttttagaatttttaaattgaattattatagtgaggtgttttattgtgtgatatatttttagtataataaatggttggaaatagttgtatagatttttttaaattaggtaattaataatattaattgattatattgaatgattatatgtatttttgtgtatttgtaaatatattgaaaaataagtataaatttatagaagaaaaaataaatatttgtgttttgagtgttaataagtgatttaaattgtattattatttttttgtaagattatattgatttttatataggggagatattgttttataagatttttgtggaaattgtttgaattgtgttataatgggttttttttaaacggaatttgaatgtgatgttttgtttaattttgatgattttaatgttgtgagattaatgagtattttgtaagatattttatagtaagattaaaagtatattttaaaatttttttaaattttttttataaaagttttgttagatttaattttttgtgtttataaaaaatatgaatataaataataatatatttaaattatgtttttttaatataaagatagtttttgattaaagatttttttaattttaggtttataaattagttatgattagtttggaataaattattattttacggtaaatttatttaatgtaggaaataaagataatagatatagattttatatattttttttgaaggtatttaggaatagtttatttttattgtagtttagtatatattatatattatagtatatattgtatattatattttagtgtattatttttaatttagatatgaattttaaattatttattatttaatttagatatgaattttaaattttaaattatttattattaatattgtatttttttatttgttatattgaagagaatatattattaatagtaatatattttttgtttattttttttgttgtgtttatattgattttgttttttttgtagattaggaggttggtgagtatttgtggattttttttttgtttgagtgtataaagtaggtatgttgtataggtatttattttgtttgtttatataatatttaattttaattatatacgtgatttaggtttttaagttatattcgtcgtattttttttagattattaaattataaagaaatgggtatcgaattagtatttaaaattttgatttttttaattttagataagattttgttattattcggttaaatattaagttaaaacgatatattttaattattttttttttttttttttttttaagtttttgtttttttttttttaaatttataggggttatttagagtttagttttttttttggggttatttagaatttcgttttttttttgtttgtattaagttgtaattttgaatttatatggtgtagttatgaaggaggagtagggaaattggataaataaagtggaatagagagagttaggagttagaggagtgtgtttgatatagtatttttttttttatagtagaaaattagatattttattagttatagtaaaggggtttattgtgttttgtatttttagtttatttaataataattagtattgattgagtatttttttgtgttaggtattaagttggggttgatggggtggtagtgataaataaaatttgatttttatttttgttgagaggtagtatagggaagcggttatgatatagtttttgggattagatagattattttttagtagttttgtatatttggatttattagttgattgttttttgttttagttttttcgtttttaaggtgagaatgaatagtattgtgtttagaagttgtagattttcgtagtgagtgttagagtttttaaaggtgatatgtttagagttgtttattttttttagtggttttatggttttattgattttaggagtgaagttgtagatttttatagtgagtgttatagtttttaaatatggtacgtttagagttgtttgttttttttggtgggtttatggttttgttggttttaagagtgaagttgtagatttttgttatgagtgttatagtttataaaggtagtatggatttaaagagtgggtagtagtaagatttattgcgaagagtaaaagaagaaagtttttatggtatggaaggggatttgagtgggttgttgttgttgttttgggtggttagtttttatttttttatttggttttttttattttatgttttgttgattggtttattttatagagcgttgattggtttattttatagagtgttgattggttcgtttttatagagtgttgattggtgtatttataaatttttagttagatatagagtattgattggtgtatttttatagagtgttgattggtgcgtttataaatttttagttagatatagagtattgattagtgtatttttatagagtggtgattgttgtgtttataaatttttagttagatatagagtattgattggtgtgtttataattttttagttagatagaaaagttttttaagtttttatttgatttagaagtttagttggttttattttttaatagatagaaagagagagagaggaagagatagagataaaaagggagttagaaagagagagatagagagaggaagagagataaagagggagttagagagaaagaaagtaagagataaagttaaagatagagagggagagatagataaaaaagggagttagaaagagagagataaagaagaagttaaagagaaagagagatagaagtagtaaagaaaaaatagtgtattttatttttttaaaagttagggtaaatttaaaatttataattgataattgaaggttttttttgtaattttataatattttaatattattttgttgttagtgtaaataagggagtagttcgatagtattgaggttattgataatttgtagtttttttatgaaaaatttttaaattaataagttttttaataggggatttaaattttaattaattattatataaagtttttattagatttaggaggaatttagaataggataatagatgttttttttagggtgattaagggaaaaagatataatgggtatttagtaggtaataaggaaatttttgtagaagtagagttaggaaaattgtttaataattggtttgttcgaacgtgcgagttgttttgtatttagttaaattttaaagtatttatagtattaggaaggagttatttatattaattttaagttaatatggattgaacgaggttttattaatagtaaagaataattgaaattttaaatttataagttttttaataaaagtaaagtttgttaaaagttaatagtgtaatatgtattattttattattatatatttttaagggattttttagtttataagaaatagtgaaatttatttttattttataattttaaatagattttttgatagtagtgatattttaaaatttttgaggtttagattttattattgttgagaaaggaggattttttatttttttaggggaagagtgttgtttttatattaattaattagggatagtacgagatgttttttagtatttataggaaaaggtttttgaaattagataatgttttttaaatttttatattaatttttggagttgggtaatatggttttttttttttttaggtttcgtggttgttatttgttattattcgtttttaggttttgtatttttaatttttttgttaaatttgttttttttagaatcgaggtcgttaagttatagatggttttataaatggaattttaaatgagtttaatttttattgaggatttttggattaatttattggtttttttattggtttaaagagtttttttttggaggatattataattgtagggtttttttttcgtttttatttagtaggaattagttagagtagttatcgtttaatttttaatagtagttggggtgttatgtttagatgggggattgagaggtgaagttagttgggtttttgggttaggtggggatttggagaatttttttgtttagttaaaggattgtaaatatattaattagtgttttgtgtttagttaaaggtttgtaaatgtattaattagtattttgtaaaaacgtattaatttgcgttttgtgtttagttaaaggtttgtaaatgtattaattagttttttgtaaaaatggattaataagtattttgtaaaatggattaattagtattttgtaaaatggattaattagtaggatgtgggtagggttatataagggaataaaagttggttatttaagatagtagtagtaattcgttttggtttttttttatgttatggaagttttttttttttgtttttcgtaataaattttgttgttgtttattttttgggtttatattatttttatgagttgtaatatttattacgaaggtttgtagttttatttttgaagttagtaagattacgaatttattaggaggaaaaataatttcggacgtgttatttttaagagttgtaatatttattgtgaaggtttgcggttttatttttgaagttagtgagattataaatttatagaaaggaataaataattttggacgtgttatttttaagagttttaatatttattgcgaaggtttgtagttttatttttgaagttagcgagattataaatttattagaaggaagaaattttagatttatttgaatatttgaaggaataaattttagatatattatttttaagaattgtaatatttattgcgagggtttacggttttatttttgaagttagcgagattaagaatttattagaaggaattaattttggatatagtagtatttttttaaaagattgtttagtgagttaatgaaataatttatgtaaagtatttatggtagataggagaatttttaataaatattagttataattattatttataaatggaagtttttaatttagggaggaaaaaggtatatagtaggtatgttagtttatttgggtagtattgtgttaggtatagggtattttgattaaagaatttagaggaagaaggttttgtagagagaagatgtttagaaataaaagtgattattttggtaaatagattaaaaaatttatttgggtattttattgttttttgtttaatgttatgaatataagtgaatacgagtttgatttaaaaaaaataaattttaagttttttattaagatttgaggattataatgtatttaattatttaattggatgtagtttgttaatatatatatataaattatatttttttagaattgttaaaggaataatattattgtttgtttttaattatattaattatgtaggtgtagagagttttgttaggggtgtattattttatttattagagaggtgagaaaggttttttatttttttattgtggttttatggtgattgagtaggtattatttttagaaaatcgttattattttgtttatttattttgtggagagtagtgtaaaggaaggaagtttagttatttagtttggataatattaaggagtttatttgttgtaattaatttgaaagatttattggattggtttgtttatagagtgatggatagatatggtagggtattagaaataatttgaatttttaatatattggtggtttatttatgaggtataaatttgtaggaagttaatggttataatttattgagtatttattatgtttttagaatttagagttttttatatattgttatatagaatttttagtgtaattatataaggaaggtattattattagttttattttatagatgaggtaagagaagtttaaaagttgtagatttttaaatgtgttttttaagttagagatgttggttttaagaataaaattgtagttaggttagtgttaatgagttttatagtataatataatagatagttatagaaatattaaaggataagaagtgggtggtatattttgagtaattggatattaggggttgtttttttttattgtttttttttttttt

SEQ ID NO: 37 - DNA, 6038 bp, Artificial Sequence
  chemically treated genomic DNA (Homo sapiens)
attttgaaattttgggtttgataagttagttgtattttttttattattttttaaaagaaatatataattattaaaataaaaatatttgtttatgtaatatttaaaattattttaggtattattagttagtttatgttgtttattttgtaaaataatgagggtgatggagatttttttgtatatatttagaaaatttaaattggattaaatgtgatgattatgaaaaagagtttgtttatggtttttaagaatatttttatttagatttatgttgagaaattgatatagatatttgttattgagtttttttagaaaatttaattgaaagaatttggattaaaaaatttttatttttgatttttttttttttaagataataaattgtttagaatttggtattatatttattaaataatttttatagttattgtgatcgttattaggtttcgttagtattggtaatggtgtggaattttagtttatttttgggttttttttgggtttaattttatgatttttagtattattttatggaggttattaaaaaaggaagtagggttttttgattgagtggaatagtttttagggatatgtgggttatgttttatttttattatattattaatgttttatagggtaggatttataaattatatttgttttgtgttagtttagtgttttgtatatagttaataaatatttattgaatgaaagattgaatagatgaatgaatgttagtgaagtaagggtattagtagatatgttttgaggatgtatttggatatttttatatgtaaataatgtttttaaggatttaaaagttcggatgtaggaggttatgatttaggaagtgttagatgtttttagcgatattataatttttattaagttgttggtagtggtagttacggcgttttttgatgcgtttaatagggaagaggtgggtatttgaggttttttatttttttgttagtttgtgttataggtatatgtaaaggtgaaatgtgattatagtggatattaggattagtggttgggaaattgtagatgaagggtggaagagtagaatagggaaagttttattatttttatttttagtttttacgtatattagtgaggaatatttttagttgtaagtaatagaagatttgattattagagatgaaaataatcgggtttgtttttattataaattaagaaatatggaagtaggtggttttggtattggtttagtagttaaatattatgaaagttggtatttttatgattttttaggttatttttttagggtgtgggatggtattatgttaaatgtaggaagaaatgaagaatgggggtattttagttataattgtgtttttcgagttaggatgatttttttaaattaatcgatgttatttttatatttagatttttttaatgatttttcgttattttagagtaaaattagagtgttaataatgaagaaaattgttagcgatgtgttggtaagttaattttttaggaaaacgaaaaattttgatttgtaatgtttgttgatttttattatgtaaatatttttacggtggttgttttaatatgaagttattgaaatttgagttgggaagagatggatatgtttcgtttttgtgagttggtacgagtcggtataggtggttttagtatattattggatttggtttttatttatttttttgttttcgtgtggtattattttttttttttatgttatatttgtatgtatttttttgaattgtatttttagtgtgtatttatatgttttaattttggggtttttgtattcgtttgttttagttttttttagataattatatttattagttattgtttttttttagttttttattgaaatgttattttcgggtgattattaagataatattattattttaattattatttttatgggtttttattacgggcggaaggattcgtttttttattcgtggtgaagagtaggtgttattaaagtatgttaagtatgagtaaaagtgtatttgattgtttagagggttaagtttatgttagttttgggattatgtttttagagatgtaagtttaattattatgataataataaagtaataattatgttatgtgttaaggattttattagattttttattatagttaattaaattttaatttttatagtgttttgaatagtatataatgggtaaatcgagggatagatagtttaagaattagtttaaaggttgggtgtggtggtttatgtttgtatttttagtattttgggaggttgaggtgggcggattatttgaggttaggagtttaagtttagtttggttaatacggtgaaattttgtttttattaaaaatacgaaaaaaaaattagttaggtatggtggtgcgtgtttttagttttagttattcgggaggttgaggtgggagaattgtttgaatttcggggatgggggcggaggttgtagtgaatcgagattatgttattgtattttagtttgggtgatagattgagattttattttaaaaaaaaaaaaaaaaaaaaaaaaagaattagtttaaagttatataggtaataggaagttaagtagaagttgtaaattagatattttttgttatttttataggtttgttatttagtttggtttatagattagaagtaattagtgagatttgggaatataaagaaatgtaaaattttggttattgatatttgtagtgttaaatttgtattttaataagatttacgagatttgtatgtatgttaaagtttgaaaagtattgatggtgtgaaatgtggattatttattaatattttttataagagaaggtgggtaattttagttagtgtttttattattgtgaattgttaatttagttgttgttttgttttagattttgtttaatttagaggaataattgattaattttgtttgtggattttcggttaaagttttaattacgttaagtatagtttagtgttttaatagtttttatttatggattgaatatattagttttatagattatggttttattttggataggtattttttaggttaaagagaatagtgttaaaaatagtattttttaaagaaatttgaaattttttggaatatttgatgtgttttatggttagtaagaaaatagatttgtataaattggtttttttattaattttattttgtgaatttaattattttattatagggatagtgataggtaaagttaatttagattagagtagtattgttttgtagaaatataatgtaagatttttgtaattttaaattttttagtagttatattaaaaaaggtaaaaaagaggttaggagtgttggtttacgtttggaaggttgaggcgggtagatcgtttgaggttaggagtttgagattagtttggttaatatggtgaaatttcgtttttattaaaaatataaaaaaatttagttaggtacggtggcgtatgtttgtagttttagttattcgggagtttgaggtataagaatcgtttgaatttaggaggtagaggttggagatcgtattattgtattttaatttgggcgatagaataagattttagtttaaaaaaaaaaaaaaagtgaaatgtagtttaattaaaataatataattgtgtttagtggaaaaatatattgttttagttataaaatttaaatgaattaaaattaaataaattaaaaattaagttttttagttttattagttatattttaatatcggatggtattggttgtttttgatataattgattttagatatatgaaattgattattattttagatggttagtaagttaatgttataggatattgtagtttattaataatattgtagaatagggtttagtcgtttatatttatatttttagtgttttgggaggttaaggtgggagggttgtttgaggttaggagtttaagattagtttgggtaatatagtgagattttgtttttataaaaataaaaaaatgaaaattaaaaaaattattgtatagagaataaaggaataaaagtaatttggattataaagtatttattgatttttttttttttatagttggagttaattttttttttattggtttataattttttaattttttaattgtattaaattgtaagattagagttaggagttagggtgttatttattttttttttttatggttttagatttttttttttttatagttcgtatgtttttttggaaagtgaggtaattgtgttaaataggatagttttgagtggggtttagaggttgtaaaattttatgtttgtatttgatttatttggtaatttgttaaaaatatcgatgtttaggtttatttttttagattcggatatataaagtgatattttttatattaaataagttgttttaagtgtttttgaagtttaggaacgtttgggattattagatttagtaattgatttttaaaggttgcggattggaattagtacgtcgtgttgtcgttgttaggtattttatatttttttaggttgaggttttttaggttgttgttttttttttttttatttttgtagatggattttgtaggttgttaaattttattttcgaagatttgttttgatagcgttttttttttaagtgttgttatagggagttgagtttgtcgaggtagatagtggttacgtgattgttaaatcggttgttagaggcgcggttatttttggggcgggtatttaatttttcgttttgtaaattgcggggtgacgggacgttgttattaggatttaagatggttatcgcgttcgttagttatttcgttagttcgcgcgttagtgagttggtacgagatacgcggtggtttacggcgtttggggacgatttttagtttttcgtacggggcggagcgttcgttttttttttaattagtacgtcgggtcggttagttaggggtcgttcgcgcgcggggtgtgtgaggacgcgtttttagtcgttgagtgtttgagtcgggaagtagttgttgtggtatttgttgttgttcgagcggacgtagagtatcggacgcgggcgtcgtggcgttgggtaggagggcgaagttatgacgttagttaggtaacgagcgggcggttgttttgattgtttcgagttgggcgttagtttttcgagcgcgtgagtattgtcgttttttttcgcgggtggtttggagtttgttttcgtttttggtttttttcgtgttgggggtttttttcgtattttttatttgggtatttttgttttttttagaagttttcgggtttgtggtatattgcggagttttgtgtgtcgttgtttggtcgaggtgattttcgtttaaattttagggttgtaagcgtttttgggtgtgtagtggattttttatgaaaaatgtgttttattcgcgttttcgggggcggtttagggtcggagggagcgtggcgtgtatagtgtgtgttatgtttgcgtgttatgttttttgatagaattttattgttggtcgggagtagatttgtaaagttggtttttttttgatgtaggtatattgtttttaagttgtgaaattgtgtgtttttaaaatgtttgtttatgattggaattaggattttggttttcgaaggtattattttgtttttttattttttttattttagagttataagtgaaatgagttgagagatattgggtatgtagcgaaatttatgaaattggagatttttttttaattgtttttttagtttggaaggttttttttttgttaatgaggataggataatgggtttgtttatttttttttagtagttttgattgaatgtttaatttacgttagtttaattatttataaaaagagataaattgttttatatatttagtgttttgattggtttttttaaaagtagaatttgggttttgttgttttagagaaagggaggttttagtataaaaatgtgaagagaaataaaataagtttatttttggtttatgagttttttaggttttattcgttttggtgatttgagggttttttaatgttaat

SEQ ID NO: 38 - DNA, 6038 bp, Artificial Sequence
  chemically treated genomic DNA (Homo sapiens)
attggtattgagaagtttttaaattattaggacgggtggagtttggaaagtttatagattaaaaatgagtttattttatttttttttatatttttgtgttggggtttttttttttttgggataataaagtttaagttttgtttttaaaaaggttagttagaatattgggtatataaggtaatttatttttttttataaatagttgaattagcgtaaattaaatatttagttaaggttattgggagaaagtggataagtttattattttgtttttattaataaaaaaagaattttttaaattggaagagtaattgggggaaagtttttagttttatggatttcgttatatgtttagtattttttaatttattttatttgtgattttgagataaaaggagtaaagaaataagatggtattttcgggaattagggttttaattttagttatgagtaaatattttagagatatataattttataatttgagggtaatatatttgtattagagaagggttaattttgtaggtttgttttcggttaataatgaagttttgttagagggtatgatacgtaggtatgatatatattgtgtacgttacgtttttttcggttttgggtcgttttcgggggcgcgggtggggtatattttttatgggaaatttattatatatttaagaacgtttgtaattttggaatttgggcgagggttatttcgattaagtagcgatatatagaatttcgtaatgtgttatagattcgaaaatttttgaggaaagtagaaatgtttaaatgaaaagtgcggagggaatttttaatacgagggggattagaggcggaggtaggttttagattattcgcgagaaggagcgatagtgtttacgcgttcgggaggttaacgtttagttcggagtagttaaggtagtcgttcgttcgttatttgattgacgttatggtttcgtttttttgtttagcgttacggcgttcgcgttcgatgttttacgttcgttcgggtagtagtaggtattatagtaattgtttttcggtttaggtatttagcgattgggagcgcgtttttatatatttcgcgcgcgggcggtttttggttagtcggttcggcgtgttgattggagggaaggcgggcgtttcgtttcgtgcgaagggttggagatcgtttttagacgtcgtgggttatcgcgtgtttcgtgttagtttattggcgcgcgggttagcgagatgattagcgggcgcggtggttattttgagttttagtaatagcgtttcgttatttcgtagtttatagggcgagagattgggtgttcgttttaaaaatggtcgcgtttttggtaatcggtttagtagttacgtggttattgtttatttcggtaagtttagttttttgtaatagtatttaggaaagaggcgttgttagggtaggttttcgggagtgggatttaatagtttgtaaaatttatttgtaaaggtggggggaaaaaaagtaatagtttgggaagttttagtttaggaaaatataaaatgtttggtaacggtagtacgacgtattaattttagttcgtagtttttgagagttaattgttggatttgatggttttaaacgtttttgaattttagaaatatttagagtagtttatttaatatggaaagtgttattttatgtattcgaatttagaaaggtaggtttggatatcggtatttttagtaagttattaggtgaattaggtatagatataaaattttataatttttgggttttatttaaggttattttatttgatataattattttattttttaaagaagtatgcgggttataaaaaaaaaagaatttaagattatagaggggaaaagtggatggtattttaatttttggttttaattttatagtttaatgtagttgaagagttaagaaattgtgaattaataaaaggaaaattaattttaattatgaaaaggggggaattagtaaatgttttatgatttaaattgtttttatttttttattttttgtgtaataatttttttaatttttatttttttatttttgtagagatagggttttattatgttgtttaggttggttttgaatttttagttttaagtaatttttttattttggttttttaaagtattgggaatataggtgtgaacgattgggttttgttttataatgttattaatagattataatattttgtggtattaatttattgattatttaggatggtgattaattttatatgtttgaaattagttatattagaagtaattaatattattcgatattgaaatgtggttgatgggattgaagaatttaatttttaatttatttaattttaatttatttaaattttataattgaagtaatatatttttttattaaatataattgtattgttttagttggattatattttattttttttttttttttgagttggagttttgttttgtcgtttaggttggagtgtagtggtgcgatttttaatttttgttttttgggtttaagcgatttttgtgttttaggttttcgagtagttgggattataggtatgcgttatcgtatttggttaaatttttttgtatttttggtagaaacggagttttattatgttggttaggttggttttaaatttttggttttaagcgatttgttcgttttagttttttaggcgtgagttaatatttttggttttttttttattttttttaatgtggttattagaaaatttaaaattataggaattttgtattatatttttatagaatagtgttgttttagtttaagttagttttatttattattgtttttgtgatagaataattaagtttataaaatgaaattagtaaggaagttagtttatataaatttgtttttttgttagttataaaatatattaaatattttagaagattttaagtttttttagaaaatgttatttttagtattgttttttttaatttgggaaatgtttatttagaatgaagttatggtttataaaattgatgtgtttagtttatgagtaaaagttgttaaaatattgagttatatttggcgtggttaagattttgatcgaaggtttataagtagaattagttaattgtttttttggattaaataggatttgaagtaaagtagtagttggattagtaatttatagtggtggagatattggttagagttatttatttttttttgtggaaaatgttgatagataatttatattttatattattagtgttttttaaattttaatatgtatataaatttcgtggattttgttaaaatgtaggtttggtattgtaggtattagtgattaaaattttgtatttttttatgtttttaggttttattaattgtttttggtttgtgggttaggttgagtagtaagtttgtaaaggtagtaaaaggtatttggtttgtaatttttgtttgattttttattatttgtatgattttaagttggttttttttttttttttttttttttttttgagatggagttttagtttattatttaggttggagtgtagtagtatgatttcggtttattgtaattttcgtttttattttcggggtttaagtaatttttttattttagtttttcgagtagttgggattaaaggtacgtattattatgtttagttaatttttttttcgtgtttttagtagagataaggttttatcgtgttggttaggttgggtttgaatttttgattttaagtgattcgtttattttagttttttaaaatgttgggaatataggtatgagttattatatttagtttttaaattggtttttaaattgtttgtttttcggtttatttattatatgttgtttagggtattgtgaagattaaaatttaattaattatagtaaagagtttaatagaatttttggtatatggtataattattattttgttattattataatagttaaatttatatttttggaggtatgattttaaagttaatatgaatttggttttttgaataattaaatgtatttttgtttatgtttaatatattttggtaatatttattttttattacgggtgaagaaacgggttttttcgttcgtggtgaagatttatggggatagtagttggggtggtggtgttattttagtggttattcgaaagtgatattttagtagaaagttgaagaaagatagtaattaatagatatggttatttggagaagattggaataaacgagtgtaaaggttttaagattagaatatataaatatatattaggaatataatttaaggaggtatatatagatgtagtatgagggggaagagtggtattatacgagagtaaagaaatggatggggattagatttagtggtgtgttaaagttatttgtatcgattcgtgttagtttataggagcgaaatatgtttatttttttttaatttaggttttagtgattttatgttgaaatagttatcgtgggagtatttatataatggaaattaataaatattataaattaaggtttttcgtttttttggagagttggtttattagtatatcgttggtaattttttttattgttagtattttggttttattttgggatagcggggagttattggaagggtttgagtataagaatgatatcgattgatttaaaaagattattttgattcgaaaggtatagttgtgattggagtatttttattttttatttttttttgtatttaatatgatgttattttatattttgagaaaatgatttagaaaattatagaaatgttagtttttatgatatttagttgttgaattaatgttaaagttatttatttttatgttttttggtttgtgatgaaaataaattcggttgtttttatttttgatggttaggttttttattgtttgtaattaaagatattttttattgatatacgtggagattaaaagtagaggtggtagggttttttttgttttgtttttttattttttatttatagttttttaattattgattttgatgtttattgtaattatattttatttttatatatatttatagtataggttgatagaaaaatggaagattttagatatttattttttttttgttaggcgtattaggaggcgtcgtggttgttattgttaatagtttgatgggagttgtggtatcgttgaaaatatttgatattttttgagttatggttttttgtattcgagtttttagatttttaaaaatattgtttatatatgaaaatgtttagatatatttttaaagtatatttattaatgtttttattttattgatatttatttatttatttagttttttatttaataaatatttgttaattgtgtataaagtattgagttagtatagaataggtgtaatttatgaattttgttttgtaagatattagtggtgtagtagaaataagatatgatttatatgtttttagagattgttttatttaattaaggaattttatttttttttttggtggtttttatgaaatgatattgagaattatgaggttgagtttaaagaaggtttagagatgggttagagttttatattattgttagtgttggcggggtttgataacgattatagtaattgtaaggattgtttggtggatgtagtgttaaattttaagtaatttattgttttaagaggaaagaaattaagaatgggaattttttaatttaggtttttttaattaagttttttagaaaaatttaataataaatatttgtattaattttttaatatgggtttaaataagagtatttttagaagttatgaataagtttttttttatagttattatatttaatttaatttaagttttttggatatatataaagaagtttttattatttttattgttttgtaaggtgggtagtataaattagttggtgatatttgagataattttaggtgttatatgggtaaatgtttttattttaataattatgtgttttttttaaaggataatagaaaaaatataattagtttattaaatttaagattttaggat

SEQ ID NO: 39 - DNA, 6040 bp, Artificial Sequence
  chemically treated genomic DNA (Homo sapiens)
gtttcgaaggttttatttatttttttgagtttgcgttttttttttagtgtggtcgttcgtcgtcggtttacggatatcgatttttttttatatattttatacgtttacggtaggtattggtttggatagtgttcgggggtttttagttttttgtttttaaggggttttggggtttcggggtttagggtgagtttcgttcgttcgtagtttggtggttcgaagttttggaggtggataggtaggtagttttttttattatagaagcggggtttttggtagaagtagggggatgttttatatagttttatggggtcggaaaaggtttgtttttgttattagtttttaagttttagtagttttttacgttaattgttgggtgttatttaaatttttttcgttggtatggaattagagataaatatagttaacgttatagaaatttgagttttttttaagttgttgttgtatattaaggcgtttatagtggattagatgtgattttttttttttttttcgtatggtttttattttattttgttagtttgtttttggtttaggcgggtttttgtgtacgggtcgggaggtcgtcgggtgtaatttgattagtttttattttttagtagtttttgtggggtaggggcgttgggggaggatatattttttttttatttgttttttttaattatttttagttgggcggtttgtttgttgtttttttgtagtttcgaagaagttggtgggtatagggggaggagggaataaggaagggtaggtttaggttggaaggggttttaagagttaatttatttatttttttgttttttgatagtattttaattatattatattagtcgatgagatttttttaaagattttttttcggaaagaatgggattgttttagattttgggtatttatgggtatttagtatttagggataagaaggattaagatttagagtagttaatagattttatttttggggtttttaagtagttttgagttgtatgtttttttaggttttatttgggggggtaaattgaggtaagagaaattatttgggttttggtttttttggtaggggtaaagagaaattttttttttaatatagtagtcgtggttagagtagagattagaatttatagtttatacgttgttattttttttagagcggtaaggttaagatgttttaagttttttgttttttttttgttttatttcggattattgatttgtttttttatgttatttttttaattttttttttaatattagaatttttttggtttattaatgtggacgggggtgaaaaagtagaaaaaatagagttttttaaatttagtttaaattttttttttttttggttatcgggtttggttgttttgttttttattgtttgagttattaattttatacgtattatgtaggttttaaatgttaggtagagtagggattatttaattttgaggttttttaggttatggttattttttagtaggtgttttagggtttgagaggataaattttttttaatgtagtgggtagattttagatattagtagtgaataaggtttagttttagggttggggattatagggatattttagataggatttttgttttcgaatttattatttgatagataacggtgattatttttttttatttagtttttgatgtttaaatttttttcgaggcggttattgtttagtttttgtttacgttaggagatagttcgttttattgacgtgtagttttgggttgtaatttgttttttttattttttattttttgtttttagtttttttttttttatagattaatgttttgttttttattttacgatagattaaattgataagtttaagttagtggtaaggataataagaggaaggggaattttgttggggatttatgggagattttatagggaatatgagatttgcgaggtatgtgaagaattagtgttttttttttttattatttatagtagggagttaggagaattttgatgtttttttgggataggaaatggagggaaggagggaatatagttggataataaaagaattttaagtatgttgagggagagtagtgaggttttaattttgtttttggttttattagtatgatagaaagtagtagtataggtcgggcgtggtggtttatgtttgtagttttagtattttgggaggttaaggcgggtggattacgaggttaggagtttaagattagtttggttaagatggtgaaattttgtttttattaaaaatataaaaattagttaggtatggtggtgggtattgtaattttagttatttgggaggttgaggtagggaattatttgaatttaggaggaggaggttgtagtgagtcgagttcgtattattgtattttagtttgggtgatatagcgagattttgtttttaaaaaaaaaaaaaaaaaaaaaaaaaaaagtagtagtataggtattgtgtgggttttaaattttgtttttttttgattagttgggttgaagaagagtttttatttttaatatattttttgttaaataaaaaagaaaaaaaaagttttagtttattttttagttttatgagttttgagaaaagaagttatgttgaagttattataggaatttttatatttgtattttttgttattttaggatttagtgtgatttatttttaaataatgtgttttttttttttaaaatggaggtagagttggtttgttttatggtggtttttagattttattgtttagttggtgagtatgggttgatatgtgaaagttggattataagataagggagagttatgttgattttatagtaaatatgggggttttaattaattgtaaattagtagtttttttaaaagcgttttgggaatttttgggaagttaaaattgttgaagattggtgttttgtagaaggtttggggagtatgttgggttagtttttggagaattggtaggatttagatgaggagaggggagtaggggaaggggacgttgggtaggttgtttgtatggagtttggggtttaggtaagggggtgatttgagataaatttgtatagaggggaggaggtttagttgggtagggaaggatttgagagttgaggtaaggagatcgtatagaatagtgtgatggttatttaggaatgagatgatgaaggtttgaataatttttttagaggtaggaggatggattcgattgggagagggtgtatgttttaggttagtaaaggatggcgagtatgtaagtaataggggaatggttgtattaaatgatagggtatttggtatatggatatatttggtaaatgttattttttttttttgttttgtttttttttttatttttgtgtgttttgtaggggattatagtagtaggaatggaggagggaaaatttggttttatttcgaatgtgtttatttatttatttatttttttttttattaagtattgtgtatttagtattttgtgttaggtgttggggttattaagatatgttttttttgtttttagtatgtttattgatgagtaaggagaatgagtatataaagttatttaattaaggtagaaatagtaggttagagaaagtgttgacgtaatttagagaaggaatttattaatttatttttttatttgtttaatatatatttattgagaatttattttgtgttagttttttggttgggatttgatttggggtaagagtagtgtttagattcggcgtttgtttgtagaagttttgttgggtatgtatttggttttgtgtttggatgatgtttgtttttgattaaatatgagggtagagtcgggaggttagggtgattttgtgtgtttggtttttgtgaatttttgtttttgtgtgtgtttgtgtatgtttgagtatagtggtttggggattacgttaaagttcgatgtggggtatagatttttttggtttgagttgatagagtgatttaggtgtttttgatttgtttatattttgatgggggggattggttttgtatttattttgttttttttttagagtcgagttgtggagacgttttatttagaggtttggtttttttttttttgtatatttttttatttttataagttgttttttgatggatgggaatatattggtgttaagtatagaatagtttttgtgtttcgttattagcggtaatttattagttttaatttgatagtagggcgttcggttttaatttttatttttgttggtttgggtatatagggttttttgttttgattgtagtttttttttttagtagttttgcgttttttagaggaagtttttattttttattggggttttagggttatattgttggttttttaattttgattgttttaatttgattttgtttatttgtacgttgggttgatgttatttgtatggtagcggttggattttaaaatgtttagaaattttttttatttgttttttgttttttattattttttttgttgtatatttagttatagttttttggtttttagtattttttagtttttgttgattttgtaggtgggttgatttgggttgttatggtgtttggttaaaattaaagtaatttttttattttggatttttatgtgtttgggaatagaggagtaagaaggagaagggtttggaagggtgggggtttttggttgttttaaataggttttattatatatttttttaggttgggtttttgggtattattgatgaggatgaggtcgggggtgggggggggtgggggggggtggtaaatgtttgtgtattttaataggatatagatgtataaaaattatatgtaaattagtattgattatttgtggggtagtagttttgtagtaagatgagaatagattatagaattatagaaagttagagttgtaaggtagtttagaatttattagtttattttttttttttatatatggggaaatggaggtttagagaagggaagtgatttgtttaagcgtatagaggatgagtgttagaagtgtgaagggtgtttgttttgaattttagagttttttttttttttgtgaggttggtaggtgaggaagggtaagtagtaagtagtaagtgagtagatatttttcggtgggtttggggttataagtaggtagatagtgaggggttggagagtttgaatggagggtttagagagatattaggagaggtattgttggagagatgaaaagaagatataggagaggtgtgagagagagagtgggttggaggtgttaggtagaggtttgagggattgagataggggagatttggaggtagatgttaggattgagatgtgaggaggaagggagggttttttttttattaggtttttgaagttatacgttgtttttatggaggattgagtatcggatgattattgggaaatttcgtttttgtttggaatttgatgtttagagttaggattattttttaagaatttttggttttagggtgtgggaaggtgtagattcggaggtggaaggggttgggttggaggagagtgggtgagggttaaggggaggtgattggtggagataaagtagagagttggttttaaaaataattagaattaggtttagtattgtgaattggggatttggttttggtggggtttttggaaatacgggtagggattttttataagtattttacgtttttatgggaatagggtttttgggtttttagtttttggttaggataaatattattaggatacggagggaaagtagaagacggagttttggataaggtagggtatgttgttgttttgttttttttttggtttttaatttttttatttgtaaattaagatgtcgaattgattggttaggatgttttttttttttttttttttttgatttagtatgtgtatttggaggaagtgtttatggagttagggtaggaggattgttttgtatgaattaggtttagttttgaagatttataggattagagagggtagatttttagagatattttgttttttttttatttttatttcggtttttagg

SEQ ID NO: 40 - DNA, 6040 bp, Artificial Sequence
  chemically treated genomic DNA (Homo sapiens)
tttgggagtcgaagtggagatgggaaaaggataaaatatttttagaaatttattttttttgattttgtgagtttttagagttaaatttggtttatataaaatagtttttttattttgattttatgagtattttttttagatgtatatgttaagttagaaaaaaaaaaaaaaaaaaggtattttgattagttagttcggtattttggtttatagatggggaaattgagaattagagaggagatagaatagtaatatgttttgttttatttagggtttcgttttttatttttttttcgtgttttgatagtatttgttttaattaggagttgaaggtttaaaggttttgtttttataggaacgtaggatatttgtaagaaatttttgttcgtatttttaaaggttttattagagttaggtttttagtttatagtgttaagtttagttttggttatttttaaaattagttttttgttttgtttttattaattatttttttttgatttttatttatttttttttaatttaattttttttattttcgggtttgtatttttttatattttaaagttagaaatttttgaagaatgattttggttttgagtattagattttaggtagggacgggattttttagtggttattcgatgtttagttttttatggaaataacgtgtggttttagaggtttggtggaggggggattttttttttttttttatattttaattttggtatttgtttttaaattttttttgttttaattttttaggtttttgtttggtatttttagtttatttttttttttatattttttttgtattttttttttatttttttagtagtattttttttgatgtttttttaaattttttatttaaattttttaattttttattgtttgtttatttgtggttttaggtttatcgggaaatatttatttatttgttgtttattatttatttttttttatttgttagttttatagagggagaggaggttttgggatttagaataggtattttttatatttttgatatttattttttgtacgtttgggtaagttattttttttttttgggtttttatttttttatatgtggaggaagaaggtggattagtggattttagattgttttgtagttttgattttttgtgattttgtgatttgtttttattttgttgtaaagttattgttttataaataattaatgttgatttgtatgtaatttttatgtatttatgttttattgaaatgtataagtatttgttatttttttttatttttttttattttcgattttatttttattaataatatttagagatttagtttaggaaaatatatggtgagatttgtttggagtagttagaggtttttatttttttagattttttttttttttgtttttttatttttaagtatatgagaatttagaatggaaaaattgttttgattttagttaagtattatggtagtttaggttagtttatttgtaaaattagtagggattagaagatgttgaaggttagagggttgtgattgggtgtgtagtagaaggggtagtaaggagtagggagtaggtgaaggggatttttgagtattttgaaatttagtcgttattatgtaaatgatattagtttagcgtgtaaatagatagaattaagttgaaatagttagggttggggagttaataatgtggttttggagttttagtaggggataagggttttttttggagggcgtaggattgttggaggaggaggttatagttagggtagggggttttgtgtgtttaagttagtagggatggggattagggtcggacgttttgttgttaggttggagttgatggattgtcgttggtggcggagtataaaggttgttttgtgtttggtattaatgtgtttttatttattagagggtagtttgtgggggtggaggggtgtataaggggaggaggattaagtttttagatgaggcgtttttatagttcggttttgagagaagaataagatgggtatagggttaattttttttattagggtatggataggttaaagatatttgggttattttattagtttagattaagagggtttgtgttttatatcgggttttgacgtggtttttaaattattgtatttagatatatataaatatatatagagatagggatttatagaaattaggtatataaggttattttaatttttcggttttgtttttatgtttggttagaggtaaatattatttagatataaggttaaatgtatgtttaatagagtttttgtaggtaagcgtcgagtttaggtattgtttttgttttaggttaggttttagttagggaattgatatagagtgggtttttagtaaatatgtgttgagtagatgaaggagtgaattaataaattttttttttggattacgttagtattttttttagtttgttgtttttattttggttagatgattttgtgtatttattttttttatttattagtgaatatgttgaaggtagagagggtatgttttagtaattttagtatttggtataaggtgttgaatgtatagtatttgatagaaaaaaaaatgaatgaatgaataaatatattcggggtggagttaggtttttttttttttatttttgttgttgtggttttttgtagggtatatagaagtagaagagaagataaagtaagaaaagggaataatatttattaggtgtatttatgtgttaagtattttattatttaatatagttatttttttattgtttgtatattcgttattttttgttagtttgaaatatgtatttttttttagtcgaatttatttttttgtttttgaagaggttgtttagatttttattattttatttttggatgattattatattgttttgtgcggtttttttgttttagtttttaagtttttttttgtttagttgggtttttttttttttgtgtaagtttgttttaaattatttttttatttgaattttaagttttatataaatagtttatttaacgttttttttttttgtttttttttttttatttgaattttattagttttttaagagttggtttagtatgttttttaagttttttgtagagtattagtttttagtagttttggttttttaaaaatttttaaaacgtttttgaagaaattattggtttgtaattgattaaagtttttatgtttgttgtagaattaatatagtttttttttgttttgtaatttagtttttatatgttaatttatgtttattaattagatagtaaggtttggaaattattatagagtaagttagttttgtttttattttagaggaagaagatatattatttagaggtaagttatattggattttggaataataaaagatgtaaatatgggggtttttatagtggttttaatatgatttttttttttagggtttataggattggagggtaaattgaggtttttttttttttttttgtttggtaggggatgtgttagaaatagagatttttttttagtttagttggttaggggaaagtaaagtttagaatttatatagtatttatgttgttatttttttttttttttttttttttttttttggaggtaaagtttcgttgtgttatttaaattggagtatagtggtgcgaattcggtttattgtaattttttttttttgagtttaagtaattttttgttttagttttttaagtagttgggattatagtgtttattattatgtttggttaatttttgtatttttagtagagatagggttttattattttggttaggttggttttgaatttttgatttcgtgatttattcgttttggttttttaaagtgttaggattataggtatgagttattacgttcggtttatgttgttattttttattatgttggtaaggttaagaatagaattaagattttattgtttttttttaatatgtttagggtttttttgttgtttagttatgttttttttttttttttattttttgttttaaaaggatattagaatttttttggttttttgttgtgaataatgagaggaaggaatattggttttttatatgtttcgtagattttatgttttttgtgaagttttttatgagtttttagtagggttttttttttttttattgtttttgttattggtttgaatttgttagtttgatttgtcgtaggataaggagtaggatattagtttatggggaggaaaaaattgggaataaaggataaaagatagagggagtagattgtagtttaaagttatacgttaatggaacgggttgttttttgacgtgagtagaagttgaatagtagtcgtttcggaggagatttgggtattaggggttaggtagaaagaggtgattatcgttgtttattagatggtaagttcgagggtagggattttgtttggggtgtttttataatttttagttttaagattgagttttgtttattgttagtgtttaaggtttgtttattgtattggaaggaatttgtttttttagattttgaggtatttattgagaggtgattatggtttgagaggttttaagattaaatagtttttgttttatttgatatttgagatttgtatgatacgtgtaaaattgatggtttagatagtaagaggtagaataattaagttcggtggttaaggagagaggagatttaaattgagtttgaagggttttgttttttttatttttttattttcgtttatattaatgagttaggaaaattttggtgttggaaaaagagttgaggaggtaatatagaaggatagattaatggttcggagtgagatagggaggagatagggagtttaggatattttgattttgtcgttttggggaaggtggtaacgtgtaggttgtaaattttaatttttgttttgattacggttgttgtattaaagaggaaatttttttttatttttgttaagaaaattaaaatttaaataattttttttgttttaatttatttttttagatgagatttaagagaatatatagtttaaagttgtttgggaattttaaaagtggaatttgttagttgttttgagttttgattttttttatttttggatattgagtgtttatgaatgtttagaatttgaagtagttttatttttttcggagggaagtttttaaaagagttttatcgattgatgtagtgtggttaaggtgttgttaggaagtaaggagatggataagttggtttttaaggttttttttagtttaagtttatttttttttgtttttttttttttttatatttattagttttttcgggattgtaaggagatagtaggtaggtcgtttagttaggagtaattgaaaggagtagatgagaggggaatgtgtttttttttaacgtttttgttttataggggttgttgagaaatgaaaattaattaaattatattcgacggtttttcgattcgtgtataggagttcgtttgggttaggggtaggttggtagggtggggtgggggttatgcgggagaaagaaggggaattatatttaatttattgtaaacgttttgatgtgtagtaatagtttagagggggtttaggtttttgtggcgttggttatatttatttttggttttatgttagcggggagggtttaaatggtatttagtagttggcgtgaggggttgttggagtttgggggttggtggtaggaataagtttttttcgattttatggagttgtatgagatatttttttatttttattaggaatttcgtttttatgatggggaaaattatttgtttgtttatttttagggtttcgaattattaggttacgagcggacggagtttattttgagtttcgaggttttagggttttttgaggataaggggttggggattttcgagtattgtttaggttagtgtttgtcgtgggcgtgtaaggtgtgtaagaggaagtcggtgttcgtggatcggcggcgggcggttatattgagggagaagcgtaggtttaagaaggtgaatgaggttttcgaggt

SEQ ID NO: 41 - DNA, 12460 bp, Artificial Sequence
  chemically treated genomic DNA (Homo sapiens)
agtgaggaaggtatttgcgttgatgagtttggaaggggtatggggattttggggttttgggttttgggaggtttatgtttaggtttttttgggttattttaaaagttagttatagtggggtttataatttgtcgtgttttgtcgagttttcgtaagttatttgttgatgttttttagtttattttatgttttttaatcgtttttttttagattaggtttttttatggcgtttttgggagaattttttagtattagttttagatttttagtcgttttttttattgtacgtgtgtttgaagtttattatattttttattttagtttttttattttttagtttttggattttgtattattttttgtttatatttatttgtttttgttttattttcgttagtcggtttagaagtttttatttttgtttacggatgttatttttttttttgtttttttggagattttaaaggtttttgaaattattattagattattgtattatttttttttttattggaatgaatttatttttatgttttttattttgttgtttattttttttagtttttatatattttttgcgttttgaaattgatttgcgattttttttagttgagttaatgttgtggagatagggagtggtttgtagtgtttgaaattgtagggtagtagtcgttttttaggaatgttttgggttttttttttttttgaggttttttgttatatgtttagatggggttaggtatagtaacgggggtatatttttttttggtttagtagttggggtgttgttaggtttggtggaggtatttggtaaatatttgttatggaaaagtagtaggagggttttaaggttgggattttggagtttaggaataggttaggtatggttggagcgggttcgagttcgtgtattgtgttttgtatgttgtttttagtcgtatttaggagtagatgtgtaggttattgtttagaagttggtgggtattttcgtgtagtaggttttggggggtatagttattatttgggtatgtgtatagagggttttgttagtgcgatatatgaggaattagaagatgtgtgggttttgattaaatggagttttaattaaagtggttaggttgggggaggtgaggaggaaggtaggaagtagtagtagttttgagtttgatcgcgtggaattttataaggtggtttttttaagaggtattatgtatatttcgtagtatgtgttttttgtttgtatggggtagtatttgttttttgatttgtttttaataaggggtaattatagagaagtattatattattaatatttaatttttttttttggttagtaatagatgatttaaggagtaattagatgtatagagttaatagagagggataggaaattgttagattttggtttcgtttttttttcggggtttttgatttttttgttattttgggaggtttttgagggaggggagttggaggtttaggagtttttttgttgttgtgttttttgtgcgtacggtcgtagttttatattattttttagtgtttttggtgaggttgagagaggtcgtttcgtgtttttgggttttagtttttttatttgtaaaatgggttttttgggattagtaagattatagatgatagttattttttaagtttttaagtaggttgtataagttgtgtttgagggtttagtgtagtgtttggtttttaggtaggtgttttttgggacgcgtaaggtttggtagtttagtagtgattggtatcgtggttagttgattttgtgttgttttttagttacggtttacgatatattagtagtttgaaattgggtataaggggagaatttatattatagaaattaggtaaagtttgtaagttagggtgttttcggttaggagttgatttgttagtttacggttgggtagtttttaatttttttttaatgaatgtatttttttttttttgtttgttttaaaggtgtttttgattttattgatttgttttgtttagggtcgagaaaggtatagttgagagtggattttggtttggtaggggtttaggttgtttgtgggttcgggtaagttttattcgggatgtgttggtagtagttgggagagtttgtaggagtgtttaaggaggggttgagggagaggacgggtagcgaggtggtttgtgtggattttgttggtaggagtcgtgggtgtttttagtttcgtgtgaggtcggtttgggtagaggggtttgttgttgttattgaggttggtgggtagtaggaaggtggttttagtatagttaagaaggttatcggtatttagtgttgtttagtatggggatttatagtatagaaggtggggagattttgagaacgggggtatataggtaggtatttagggttgttagggaagttttgttaaatagaggttttggttaggttttttttaaattgggtattttagttggtatggtattagtttagttcgtgaggtaggcgtcgatgatttgattttattagtagggttttgggtgatgggattggggagtttttttttattttggtagacgtgttatgttttattttgtttgtttttagtaaggtttttgaatttggagcgtggtttggggttgtattagttttttagtttgggatggttagattggtagaaggttgtggtattttttaatgtagatgttttagagagggtcgtggtgggaggtaggatttttgggtagaggcggttttttagtggtttattgggttttattggatagtcgtttgttgttgttgttggtggtgttgggtttgggagtttattttggagttataggttaggtatttgggtgggaggtagttcggggttagtattagttttatttgtatttgttgggtaggggttatcgtgagttaggtgggttttggtgagtattgtttagggagagaggttaagagtattagggataattgtgttttttgagtgtggttagggatggtgttaggagagttggtttggtgtatttttgttaacgatatattttgtgaatggttgtttggtaagtgttttatggaaagtaggggtttgggaggattcggttttttttagttgttgtaggtttttcgttgttgtagggtttttggttttgtttttttttttttttttttgtttttgtgttaatgttttatttttaggtttttagtaggggtaaaagggtttgttgggtgtaggagaatttttagttttaggtatggttgtagttcgtgttaattttgttttagttatttgaggtgtcgatagtattggagttggagggaaagttggggtttgtgtgtttgagttttgttatatggataatggggtagaggggagtttggttttttgaatagggtttaggattaggagtgattttttttttaggttgttagttttgttttattttttatgttttggaagagagagagagacgaggtggttgttcgagtttacgtgaaaggtagtttttgattttttgtttttaggtaggtggtggcggttggtaatatatttatagggttttatgagggtttaggattggagggggtagatttgggggttttttagtttttaaagaggggtaatttaacgggtagaggtttatttggatttagattatttataggttcgaaggggatattgggagttggggttgggtttaggtttgttggggaattaaaatttttgtttttgaggggtgttagtaattttattttgattttgggggagttattttaaatttgtttattttttttttatagaattatgggtgagagttggtatggtttttagaggttatttggggtttagttgttttatcgtattaatgaggaaattgaggtttagaaaagaaaagtatttttgtttagagttttttagtgagttttggtttcgtatttgttttttgttagggattaaattttcgttagttatttttggtgttagttaggtagaggagtaggtgggggagagggcgtgggaggagggaggtgaggtagtttttttcgagtggaagtttatagttagttgtagcgtcgtttttgttttgattgtagttgattggtaggggtatttggaggtagcgggttcgggcgtagtatgagagggtttattttttgcggtagtgggagataggattaggtagttttttatatttttttatattcgagttttaggggtttttggtttgtttttttatagggcggttggtgttttttaggtgggtgttggtagtttttgggagagttgacgggatggagtaggttaggggggttgagaagttggtttggcgagagaaggtgggtgggattgggagagtttgggtagggaggggtttttttgggagggagtgttatggggttggtcgagatttaggatttaggagattggttaagttgttataggaggtttgagaggttgagtatgggggggttaatattgatagattttaataagtttttggtttttttaggaaaaaaatagattatatttgatttttggttttgagtttagagtgggaggtatcgtgataataatgcgtagagtagggaatgtagggagttatggatagtgttggggtgagttggagttttggtaggggtttagttagggtagtatttattttgtagagtttgggagaaggggttgtttttttgggaggggtttgtgtgggagttttagcgggaattttattggattaggggaattagttttgtttagtgatttttttgggtgtttttttttaaagtgagggttaaatttttatttttttcgttttttggttatgattatagtagattaggtagggtatggggttaggcggggttaggggttatttttaggttgatatttggtttgtgggtagggtgggatttgaaattatagggtttttagggggttaagtgtggggtaaggggtggtatttttcgtagggttcgttttttgtagatggtttagttttttatcggttgtttttttgtaggtgttttaggaattttgaagttgggttgagttatgatgttgttgttagaatttttgtagagggtttggttttaggagatttagagttttttgtgaaaaagtttttggagagcgttttagtagggttgtatttggtttttgtgaggaaggggtttaggggtttgggttttttcgtttgggtcgggttgggagttaggcgggcggttgggttgtagtaatggatcgtgagttggtttagttcgcgttcgtgttgagtttgtttgtcgtttgtggttatgtttattatgggtttttcggtgtatattacggtggagttggttattgttgtgttggttattttgggtaatgtgttggtgtgttgggtcgtgtggtttaatagtaatttgtagaacgttattaattattttgtggtgttattggcggcggtcgatatcgtagtgggtgtgttcgttattttttttgttattattattagtatcgggttttgcgttgtttgttacggttgtttttttattgtttgtttcgttttggtttttacgtagagttttatttttagttttttggttatcgttattgatcgttatattgttattcgtatttcgtttcggtgagtagggtcggggttatatttgtgtaaaggttgttggtgtttaggttttggtttgtgttcggagttagggtgagtttgggattagggtttggtttgtagtgttagtatggtgagttggcgacggggttttaggtttagtaggggttttttagggttagtacgtggttagtagttatgtcgaattgattgatttttatgggcgtagggtagtttggtttttttaggcggtttgggtttttttaggttgtttgaggttaattgtgttttgttttttggtagatgagtgtggttagggtttggtattgggtttagtagggagttgtggttttagtgatttacgtgttgttagcgggtgtgtttgggttattttttatatataagtaaaatttttcggatgatgttggggtggagtggggagttaggggaaattataggattttagagttaggagtcgttcgttatttgtttttttttagattttttgggttagttttgtagtgtgtatattaggaaaatgatttagagaggggaagtgatttggttgaatgttatagtgagttatttggatttatatgtaaattttgttgttttttaagttattaaggatttatcgttttagaggtagttagtgtgtttaggggttggttgttggaggggatttttatggtgaattttttgtgaagtgattttagttaagtaattgtgtaaatgaagatttttttagaggttgaattattcggtatggattttatttatttaggttatagatgaggttagaaagtgtattttttttttggggacgttagaggttttttgttttattttttggtttttttgttatagagttgggttttatagtttgggtggttgtgggttttgaggttatgtatgaggtttgaggtggtgttttttgagagttagggagtagggtgtattatttttgcggtgaattatttgaaattggtgggtgtttatttaaagaggaagttatagtaggttgagggtgttttagtaggaaggaggatttagttagatgagtaaatggaaatttagagcgttaaagttaaggggtttttagaggttatttttttttattttcgggatggaaaatgagttttagagaagatagttagttgttttcgggttatataacgagttggtagtggagttggggcgagttttggaaagaaatgtggtttgatttttattgtgattttagttattggggagcggttatgagtagtttgtttcgtagagtttgtattaggtggttgtttttgttatttgggttttaagtgggagtaggagttgtattgggttgttttagggaaggggaggaatttggattttatattgttttgttagatgttttttattttaggagagtttagaattttcggtaaaggagaaggggattttggttagttttgagaggggtggaattagggattgtcggattttaagtgtagtttttggtgagtttttatttattgttttgcgacgggtagagtagagtttaggttcgtttagtggtagtttagaatacggaggtttaggaggggttttgtttgtaggtgtttaggtgggttagagaataaagtattggaggggattttagggaattaagttgagtttgtatattgatgggatgttttatggggaagtagaggttaagtttttatttttttttttgatttaaagggtatgattagggttgtcgtttttaatttaaaggagttcgatttttttttttttttgtttttttttttttttttttgttttttgagagttgagagaatgattttttatgtagtaggataggatgtgttgtgtggttatggaaagttagttgtttttttttgggtttatttttttatttataaaataggataagtttttttgtttttttgagtttataaaggtgttttgaaggtttagtgagtggatggggtgatagggattttgaggagggttggaggcgtggggagggtggggatttagatttttgggtttagagttatggatttgttttttattttttatttattttattttaatttttttggagttggattttagttttatttagattttgagttatttgattttgttttatgaggttttgtaaggtttaggttggttttttttgtagggggttttggagaggatgacgacgatgatgtttatttttttttgagggtagagagttttgtagttgttaaaggatgttagtttagtattttttgttatttttttggtttgtattgtggttaggcggatgttttgatttttttgttatttataaatttatggggaggttagagtagggaaggatatacgagtgttttttgatgtggatggattttagggttttttaggttgtttttggttcgtaggttttttcgtttttttgttttttagggtttttgggtttttgggtatgtggaggtgtttatgtgggttttcgagagtaagcggggtatgaaaggaatttggtgatatttttggtcggcgttggagttatagtttgttttaggatttttttttttttttttttagttgggaatttagttttttttacgtgtcgttttttgttttatttagaaaggtttattcggttagttttgggtttagttttaggtttgttttattttttattaattttttttttaaaaaaaagaatttagttttggaaaaatttgttattttttaagtttagggaatttgttgggttagtatagggtttagtcgaggaattttgtgagaaagattttaggttagaggtagagatgtagttttttgtgtttttagaggatagggaatttagggtgagagatataggtttttttttttagtttttaggggatttttgttttattgttttttttttggtttttatagtagtttttggtggatgttttcgttggtttgaggaataggttaaggtgtaggtggtagttggtggtgaggttcgaagttttaatatttttaagagggtaggattgggagagagggttttttggaggaggtgttatttagtgggttttgtaggacgggtaggtagggttttattggtatgagtgtgggggtaggtgtgttaggaggggggtaaagtttgggataagattttgaggaaggaatgagtatgtgagtattgggtagggaagggtggtttggttgtttagtgatagagagagatgaatagagtgggtaggaaaggtggaggttaagttaggtttgttcgtattaggggaaggaatggaggtttttttgtgggtttatggttttttaatttttggattaatgatttttttggataatttaggaaggttttatttattttttaggttgggatatgtgtatataaagttttagttggaattatggggtatatttttggattatagggtgagtttttagtgtgggtaatggagatttttagaaaggggtagtttgtaagtcgggggatatagagttgtagagggtatttttataaagggtgggtagtagttttgggatttatattttttgatatgtttgggtattttagagtggtggtgtgttacgttagatagttttggtattttttttagttggatggttaatgtttggggtttaagacggtaagatgtgagtgtgttggttatagatgtagtttaggatatgttgttgggtttggttgaggtttagttgtgattttatttgggttttgatgttgtttttatttcgtgggtattagggtttagggtttttagtttatggagattttttttgaataaatttagtttatttgtaatttaagaaaaaaaaaagttatgttttgtttattttaaaatattaaaaaggaataaaagagtatagtatagtagaaagttgttttttatattttttgttttttatttttagttttttgtttgtaaggttatgttaagaatttttttagagatattttttgtatatataagtaagtgttattaatgtatgttttgtttttgtttttatacgggattttttttgtagagtacggtggaagattttttttgtgggtttttttttttgtataagttaataattggatagattagggatttttatattgtgtttttagaagttttcgggttggttttggtgtttttattaatttattgatttaataaatatttaataagtttttttttttttttagtagttttatttttgtgattgtttgggaatgtgggcgataaggtttgttgttgagaatagtttgaaaattagtaaagtaggtggtttagggtttaggtagttttgtaatatttttgtggttgtttggttttgttttgttgttttaaatgataggaaatttattattgtttgaggtaggttattttttttgtgaatagtttagttgaaaaatttttaatttattttgagttataatttgtttttttataatttttatttattgattttttattttgtttttagagggtagagtgttgataggtttacgatttggttttattttataaatgaagaaattgaggtttagagagataaagttttaaaatatttttgttaatagggttagaatttaggaagggatatgttttttttaggaataatgttaaaattaatatagttttttagttaatgaggattatataaattattatttgtaaagtattaagaatagtgttcggtatagagttagtgttatgtaatgtagatgtgagaatgagagagtttgagattttatgtttgcgagttttataggaggtagggtaatgttaattttttgttgtttggaagtaatgggtaagtttatgatttttttgttgaggttttgttataggtaattaagtttttacggaatggagttgaggagtttttgagaatgggtttgttcggttattgtttggatttagaattgatttaagagatttagaatagatagattcgttttggtttgagttgtttttgggtttttggaatgtttatagtaagtttatttttttttttgggttttaatttatttatttgtaaaataagaggattggattatataagagatcggaagttattagggttttttttttttttttttatttgaattagttgataaaatttaaattttgggagattttatttagaaaattatttttttagttttatttgagatttggtaatagtaggcgtacgttttgtatggcgttgaagattaggtaaacgttttattagttgttttttgtgtgtgttatttataggcgtttgtttgttattcgtgaatgagatggtttttgtggatgtttttagtttcgtagttaagtagagtatatttttttttttgtatttttttttttttttttttttttttttttttggagattgagttttgttttgttttttaggttggagtgtagtggcgcgattttggtttattgtaagttttgttttttgggtttatattatttttttgtttgttttttaagtagttgggattataggttttcgttattacggtcggttagttttttttatttttagtagagataaggtttttttattttttgatttcgtgattcgtttgtttcggttttttaaagtgttgggattataggtgtgagttattgcgttcggtttttttgtattttttgagtgtttttgtttcggagttggtaatgtagagatggatgtaggaaagttttgttttcgaggggtttagatgtggtggggatttgttgtatttcggtaggaaatttttttgagatttttattttggatttgaaggatgggtagggtttttgttaggtagaggggagtgtagtttggttttgttagaattaaaattgttaaatagaagttattttttagtgattattaaggttgtttttttaaattagggagattttttttttttattgtttatttttttatgaaatttaggttattttttttatagggttgaggtttgtttattggttggtagatttagttatttttcgagtatgagattgggagtcggtaggtttggatttttgtttggtttttatttaggaagattgagtgatttcgggtagattattgtttttttggattttagtatttttttgtaaatgttaagatggttatgtaaatgttaataagtaatttttttatttttttttagagggttgtgggtgggtttggaggggagaaatggtattttttttggtttgggattttttttttttttttattttttatgttgtttttttttaagggtttttggagtttttaagttaaatggtaaatggggaagagaagatagggtatggagtataagaggtttagattttttataggtttgatttggttggtgttgtttttagttagtaaagttattttttagatttttttaagtttgttgtagttttaattaagattaattaatatggaggtgattgattttggttaaggttgcgattaatatggaggtaattgattttggttaaggttacgatacgtttttttttagagaaaaattatgtttttttttttaaaaaattatgcgttaattttttttaattaaattaagttttaggattatttcgaaaattatttaatgattatttgggtatttgtatatgggtttttattttttggatgtttgtttttttgttattttttagaagtttgtgaaaaaggtaaggtatattatttttatttaacggaagaggatgttggggcgaggtggtaggaaatgattggtttaagattttatagttaggaaatgtggaaacgggtgttgttttggggttttgaatttttggttttgtttaattttggttttttagatttttgatgttggttttttttttttagg

SEQ ID NO: 42 - DNA, 12460 bp, Artificial Sequence
  chemically treated genomic DNA (Homo sapiens)
tttggggagaagagattagtattagagatttgagaagttagggttaagtagggttaagagtttagaattttagagtagtattcgtttttatattttttgattgtaaggttttggattagttattttttgttatttcgttttagtattttttttcgttaagtggaagtaatatgttttgttttttttataggtttttgggaggtaataggagagtaggtatttaagaaatggaaatttatgtataaatgtttagatggttattgagtagttttcggagtagttttgggatttagtttggttggaggaaattaacgtatgattttttgagggggaaaatatgatttttttttaaagggaaacgtgtcgtagttttaattaagattaattatttttatgttggtcgtagttttaattaagattagttatttttatgttggttgattttggttaaggttataataggtttgaaggggtttggagggtggttttattggttaggggtagtattagttagattagatttatagaggatttaggttttttgtattttatattttgtttttttttttttatttgttatttgatttggggattttagaagtttttgaggagaggtagtatggagggtaaaagaggggaggaggttttaggttaaaggagatgttattttttttttttaaatttatttatagttttttggagagaaatgagagaattatttgttaatatttatatggttattttaatatttgtaaggaaatattgaggtttagggggatagtaatttgttcgaaattatttagtttttttgagtgagagttagatagaaatttaagtttatcgatttttagttttatattcgggaaatggttggatttgttagttagtaagtagattttagttttgtaggaaaggtggtttagattttatgaaagaatggataataaaaaaaaaaagtttttttaatttaggaaggtaattttgatgattattgagggatgatttttgtttaatagttttgattttggtaagattagattatatttttttttatttggtagaaattttatttattttttaagtttaggatagagattttaaagaagttttttatcgaagtgtagtagatttttattatatttgggtttttcgggggtagggtttttttatatttatttttgtattgttagtttcgagatagggatatttagaaggtgtaaggaggtcgggcgtagtggtttatatttgtaattttagtattttgggaggtcgaggtaggcggattacgaggttaggagatggagaaattttgtttttattaaaaataaaaaaaattagtcggtcgtggtggcgggggtttgtaattttagttatttgggagataggtaggagaatggtgtgaatttaggaggtagagtttgtagtgagttaagatcgcgttattgtattttagtttgggagatagagtaagatttagtttttaaaaaaaaaaaaaaaaaaaaaaaaaaaaaggtgtaaggggaaggatgtgttttatttaattgcggagttgggaatatttatagaaattattttatttacgggtagtaaataggcgtttataggtagtatatataggaggtagttggtggggcgtttatttggtttttagcgttatgtaaaacgtacgtttgttattattagattttaggtggggttggggagatgattttttgggtaaaattttttaagatttaagttttgttaattaatttaaataaaagagaaaaagagaaattttggtggttttcgattttttatgtggtttaatttttttgttttataggtgggtaaattgaggtttaaggagaggaatggatttgttgtggatattttaagagtttagaggtaatttaggttaaggcgagtttgtttgttttgaattttttaggttagttttgaatttaaatagtaatcggataagtttatttttaggagttttttagttttatttcgtgggggtttggttatttgtaatagggttttaataggagggttatagatttgtttattgtttttaagtaatagggagttggtattgttttgttttttgtgggattcgtaaatataaaattttaggtttttttatttttatatttatattatatagtattgattttgtgtcggatattgtttttagtgttttgtaaatagtaatttatatagtttttattgattgggaagttatattaattttgatattatttttgagaaaagtatatttttttttgggttttggttttgttaataggaatgttttaaaattttgtttttttgagttttagtttttttatttgtaaaatgggattaagtcgtggatttgttagtattttgttttttaagggtagaatggagaattagtgggtggaaattatagggaggtagattgtaatttagggtaggttaagagttttttagttgagttgtttataggagagatggtttgttttaggtaatagtgagttttttgttatttgaggtaatagagtagagttaagtagttataggggtgttgtagagttgtttgggttttgggttatttgttttgttggtttttaaattgtttttagtagtaaattttgtcgtttatatttttaggtagttatagaggtgaagttgttggggaagggaaggggtttattaaatgtttattgaattagtgaattggtggggatattagagttaattcgaaggtttttgggaatatagtatggaaatttttggtttgtttaattgttgatttgtatagaaaagggaatttataaggggagttttttatcgtattttgtaaagaaagtttcgtgtggggatagaaataaaatatatattaatagtatttgtttatatatgtaaagaatatttttggaaggatttttaatatggttttgtaggtagggaattgagggtgggggatagggggtatggaggataattttttattatattatatttttttgtttttttttaatgttttagagtgggtaaaatatgattttttttttttttaaattgtaaatagattaagtttatttaaaagaaatttttataggttgagagttttggattttggtgtttacggggtggggatagtattagggtttaaatggaattatagttgagttttagttaggtttagtagtatattttgggttgtatttgtgattaatatatttatattttgtcgttttagattttaaatattgattatttagttggaagggatgttaaggttgtttagcgtgatatattattattttggggtgtttaggtatgttagagaatgtgggttttagagttgttgtttattttttgtggaggtgttttttgtagttttgtgtttttcggtttgtaggttgtttttttttggggatttttattatttatattgggggtttattttatggtttaagaatatgttttatgattttagttggggttttatgtgtatatgttttaatttgaggagtaggtggagtttttttaagttgtttaaaggagttattgatttaagaattgaagagttatggatttatagggaaatttttatttttttttttggtacgaataggtttgatttggtttttattttttttgtttattttgtttatttttttttgttattaggtagttaggttatttttttttatttagtgtttatatgtttattttttttttagggttttgttttaggttttgttttttttttgatatatttgtttttatatttatgttagtgagattttgtttgttcgttttgtaagatttattgggtgatattttttttagggagtttttttttttaattttgtttttttagaagtgttaggatttcgggttttattattagttgttatttgtattttggtttgttttttaaattagcgagaatatttattaagggttgttgtgagagttagggaggggatagtgaggtaaaaattttttgggaattggaaaaagaagtttgtgttttttattttgaattttttattttttgggaatatagagagttatatttttgtttttggtttgaagttttttttatagagtttttcgattaggttttgtgttagtttaataggttttttgaatttggaaaataatagatttttttaaaattgagtttttttttttaaaaaaaaagttaatggagagtggggtaggtttgaggttagatttagggttagtcgaatggatttttttgagtggagtaggaaacggtacgtagaggaggttggatttttagttgagaaaggaggagggaggattttgaggtaggttgtgattttagcgtcggttaggagtgttattaagttttttttatatttcgtttgttttcgggagtttatatggatatttttatatgtttagaggtttaggggttttgaggaataggaaagcgaagggatttgcgggttaggaatagtttgaagggttttggagtttatttatattaggagatattcgtatgtttttttttgttttggtttttttatgagtttgtgagtaataggagggttagaatattcgtttggttataatgtaggttaagaggatgataggagatgttgagttgatattttttggtaattgtaaagttttttgtttttaagggaggatgaatattatcgtcgttattttttttagggttttttgtagaagagattagtttaagttttgtagagttttatggagtagagttaaatggtttaaggtttgggtggaattaaggtttagttttaaggaagttgggatgagatgggtagaggatagggggtaggtttatggttttgaatttaaagatttgaatttttattttttttacgtttttaattttttttagggtttttgttattttatttatttattggatttttagaatatttttgtgagtttagaggggtagagagatttgttttattttatggatgaggaaatgggtttagagagaggtagttaattttttatagttatatagtatattttgttttattatatagggagttatttttttaatttttagaaaatagagaaggaaagggagagataaaagagaaaaaaagtcgagtttttttaaattgagaacggtagttttgattatattttttgaattagagaaaaaagtgagagtttggtttttgtttttttatagagtattttattagtgtgtagatttagtttggttttttgaagttttttttagtgttttgttttttggtttatttgggtatttgtagatagggttttttttgggttttcgtgttttgagttgttattggacgaatttaaattttgttttgttcgtcgtagagtaatggatggaggtttattagagattgtatttggagttcgataatttttaattttattttttttagggttggttagggttttttttttttttgtcgagggttttagatttttttgggatagagagtatttgatagggtagtgtgaggtttagatttttttttttttttggagtagtttagtgtagtttttgtttttatttagagtttaggtgatagggatagttatttggtgtaggttttgcgagataggttgtttatgatcgttttttagtgattgaagttatagtggggattaggttatatttttttttaggattcgttttagttttattattaattcgttgtgtggttcggaaatagttggttgttttttttgaggtttattttttatttcgaagatgagaggaaatgatttttaagggttttttggttttgacgttttaaatttttatttgtttatttagttgggtttttttttttgttggggtatttttaatttgttgtggttttttttttagataggtatttattagttttagataatttatcgtagagatggtgtattttgttttttgatttttaagaggtattattttaagttttatatatggttttagggtttataattatttaggttgtggaatttagttttgtggtagaggggttaggaggtggggtagaaggtttttgacgtttttaagggagggatgtattttttagttttatttatggtttgggtaggtggaatttatgtcgagtaatttagtttttgggaaaatttttatttgtataattatttggttgaagttattttataaaagatttattataaaaattttttttaatagttagtttttgagtatattggttgtttttaagacgatgagtttttggtgatttgaggagtaatagaatttgtatataggtttaagtgatttattgtggtatttaattaagttattttttttttttgggttatttttttaatgtgtatattgtaaggttggtttagaggatttgggggaaggtaggtggcgggcggtttttaattttgaggttttatggttttttttggttttttattttattttagtattattcgggaagttttgtttgtgtgtgaggaatggtttagatatattcgttggtagtacgtgggttattgggattatagttttttgttaagtttaatgttagattttggttatatttatttgttaaaaagtagagtatagttggttttaggtagtttaggggaatttaggtcgtttgggagggttaggttgttttgcgtttataggggttagttagttcggtatgattgttggttacgtgttggttttggggagtttttgttgagtttggggtttcgtcgttagtttattatgttgatattgtagattaggttttgattttaggtttattttggtttcgggtatagattaaagtttgggtattaatagtttttgtatagatgtaatttcggttttgtttatcggagcgggatgcggatggtaatgtagcggttaatggcgatggttaggagattgaagatggagttttgcgtgaggattaggacgaagtaggtaatgaagaggtagtcgtggtaggtagcgtagaattcggtgttgatggtgatggtaaaggggatggcgagtatatttattgcgatgtcggtcgtcgttagtgatattataaagtagttggtgacgttttgtaggttgttgttgagttatacggtttagtatattagtatattgtttaggatggttagtatagtaatggttagttttatcgtgatgtatatcgaggagtttatgatgggtatggttatagacgataggtaggtttagtacggacgcgggttgggttagtttacggtttattgttgtagtttagtcgttcgtttggtttttagttcggtttaggcggaggggtttagatttttgagttttttttttataggagttaagtgtagttttgttggggcgttttttaagggtttttttatagaggattttgagttttttgaaattaggttttttgtaggggttttggtagtagtattatggtttagtttagttttagggtttttgaggtatttgtaaagggatagtcgatgagaagttgaattatttgtagagggcgagttttgcggaaagtgttattttttattttatatttggttttttgaagattttatagttttagattttattttatttataggttaggtgttagtttgaggatggtttttgatttcgtttagttttatgttttgtttggtttgttgtggttatagttaggaggcgagagaggtgggaatttgatttttattttagaggaggatatttagagaagttattgagtaaggttggtttttttggtttaatagaattttcgttgagatttttatataaattttttttaaggaggtagtttttttttttaggttttgtagaatgagtattgttttagttgggtttttgttaggattttagtttattttagtattatttatggttttttgtattttttgttttgcgtattgttgttacggtgttttttattttggatttagggttaaggattagatgtggtttgttttttttttgggggagttagaaatttgttaaagtttgttagtgttggtttttttatgtttagttttttaggttttttgtggtagtttggttagttttttgggttttggatttcggttagttttatgatatttttttttagaaaggtttttttttgtttaggtttttttagttttatttattttttttcgttaggttaattttttagtttttttggtttgttttatttcgttaatttttttaggaattattagtatttatttaagggatattagtcgttttgtgaaaggataagttagagatttttggagttcggatgtggaaggatgtggggagttgtttggttttgttttttattgtcgtagagggtaagtttttttatattgcgttcgaattcgttgtttttaggtgtttttgttagttagttgtagttagggtaggggcggcgttgtagttgattgtgagtttttattcggagggagttgttttatttttttttttttacgtttttttttttatttgtttttttgtttggttgatattaggaatgattaacgggagtttggtttttggtagaaagtaggtacggaattaggatttattgagggattttgggtaaaaatgttttttttttttgggttttagtttttttattgatacggtgaggtagttggattttaaatgatttttaggggttatgttagtttttatttatgattttatgagaaggaaataaatagatttaaaatggtttttttagagttaaaatggaattattgatattttttagaagtagaagttttggttttttagtaggtttgagtttagttttaatttttagtgtttttttcgagtttgtgaatggtttggatttaaatggatttttgttcgttaaattgtttttttttgagagttaagaggtttttaaatttattttttttaattttgaatttttatggggttttatgagtgtgttgttagtcgttattatttgtttggggataagaggttagaggttgttttttacgtggattcgggtagttatttcgttttttttttttttttaggatatgagggatggagtaggattggtaatttggagaggaagttatttttggttttgagttttgtttaaagggttaggtttttttttattttattgtttatgtgatagagtttaaatatatagattttaattttttttttaattttaatgttgtcggtattttaagtggttggaataggattggtacgggttgtagttatatttgggattggaggtttttttgtatttagtaggtttttttgtttttattaggagtttgggaatggagtattgatatagaagtaggaggaggaaggagagagtagagttagaaattttgtagtaacggagggtttgtagtagttggagagggtcgagtttttttaagtttttgttttttatggagtatttgttaggtagttatttataaagtgtgtcgttggtagggatgtattagattagtttttttggtattatttttggttatatttaaggaatatagttatttttgatgtttttggtttttttttttgagtagtatttattagggtttatttgatttacgatagtttttgtttaataggtataagtggagttggtgttggtttcgggttgttttttatttaggtgtttggtttgtggttttaaggtggatttttaggtttagtattattagtagtagtaataggcgattgtttagtgaggtttagtgggttattgaggagtcgtttttatttagggattttgttttttattacggttttttttagggtatttgtattgaaggatgttatagttttttgttaatttgattattttaggttagaaggttgatgtagttttagattacgttttagatttaagggttttgttgggggtaaataaggtggaatataatacgtttgttaaagtgaaggaggattttttagttttattatttagagttttgttggtggggttaaattatcggcgtttgttttacgggttggattggtgttatgttagttgggatgtttagtttgggagaagtttgattagggtttttgtttggtaaggtttttttggtagttttgggtatttgtttgtgtattttcgtttttagggtttttttattttttgtgttgtgggtttttatgttaaatagtattagatatcgataatttttttgattatattgaagttatttttttgttgtttattagttttagtgatagtaatagatttttttgtttaggtcggttttatacggggttaaagatatttacggtttttgttagtagggtttatataggttatttcgttgttcgtttttttttttagtttttttttaagtatttttgtaggtttttttagttgttgttagtatatttcgggtgaggtttgttcggatttataggtaatttgggtttttgttaagttagaatttatttttagttgtgtttttttcggttttgagtaaagtagattagtggagttagaggtatttttggggtagataggggaagaggagtgtatttattggggaaaggttgggagttatttagtcgtaggttggtaaattagtttttggtcgggggtattttgatttataggttttgtttgatttttgtggtgtaaattttttttttgtgtttagttttaagttattaatgtgtcgtggatcgtaattggggagtaatatagagttagttggttacgatgttagttattgttgagttgttaaattttacgcgttttagggggtatttgtttagaggttaggtattgtattggatttttagatatagtttgtgtagtttgtttaggagtttgggaaatgattgttatttgtgattttgttggttttaggaagtttattttatagatgaggaaattgaggtttaaaggtacgaagcgattttttttagttttattaagagtattggaaggtggtgtagggttgcggtcgtgcgtatagagagtatagtagtaggaaggtttttgggtttttagttttttttttttagaagttttttagagtgataggaaggttagaggtttcggggagggggcggggttaggatttggtaattttttatttttttttgttggttttgtgtatttaattattttttgagttatttgttgttaattaggaggggaaattaaatattaataatgtaatatttttttgtgattattttttgttggggatagattagagggtagatgttgttttatatagataggggatatatgttgcggaatgtgtataatgttttttgaaagaattattttataggattttacgcggttagatttaaaattgttgttgttttttgtttttttttttattttttttaatttggttattttaattaaaattttatttaattaaaatttatatattttttggttttttatatgtcgtattagtaaggttttttgtatatatgtttagatggtggttatattttttagagtttgttgtacggaggtgtttattagtttttaggtagtgatttgtatatttgtttttgagtgcggttaagagtaatatataggatatagtgtacggattcggattcgttttagttatgtttggtttgtttttgggttttagaattttagttttagaatttttttgttgtttttttataataaatgtttattaagtatttttattaggtttggtagtattttaattgttgggttaaagggaggtgtgttttcgttgttgtgtttggttttatttgagtatatggtaggggattttaaaggaggaaaggatttaggatatttttgggaggcggttgttgttttgtagttttaggtattgtaggttattttttgtttttataatattggtttagttaagaggagtcgtaaattaattttaaagcgtaagaggtatatgaaggttaagaaaggtaagtaatagaataaaaaatatggaggtgaatttattttagtaggaaggaaggtaatatagtaatttaataatgattttagagatttttagaatttttaaagaggtaaagaaaggaatggtattcgtagataagaatgagaatttttgaatcgattggcggaaatgaaataaggataggtggatatgaataagaaataatataaaatttagggattgaaaaatagaaggattgaagtaagggatgtggtgagttttaggtatacgtatagtggaagagacgattggggatttgaagttagtattgaggaatttttttagaaacgttatgaagagatttagtttaggaggaaacggttgagaggtatggggtggattgagaagtattaataagtggtttgcgggagttcggtagggtacggtaggttgtgggttttattatgattggtttttgggatggtttaggggggtttgggtatgaattttttagaatttagggttttaggatttttatattttttttaaatttattagcgtaggtgttttttttatt

SEQ ID NO: 43 - DNA, 10619 bp, Artificial Sequence
  chemically treated genomic DNA (Homo sapiens)
gttttatttgtttaataggaaatttttggtgtggggttttagatattttttttattttattattatatatatatatattagtagttagaattgtgtgtttttttttttttttttttttttttttgatatagagttttggtttgtcgattaggttggagtgtagtggtgtaatttcggtttattgtaatttttgttttttaagattaagggatttttttgttttagttttttgagtagtttggattataggtatgtattattatgtttagttaattgttttgtatttttagtagagatagggttttatcgtgttagttaggttggttttaaatttttgattttgtgattcgtttgttttggttttttaaagtgttgggattataggtacgagttattattttttttttttatttttgattaattttgataaaatataaaattaaattaagataaattaattttgtaaaataaagataaagttggaggttttatattttttgattttaaaatttattatgatgtggcgttggaataaagataaatatatagattaatggaatagaatagagagtttaaaaataaatttttaatatatatggttaaatgattttaataagggtgttaagattatttagtgggaaaaggatagttttttttatagatggtggatttttatatgtagaagaatgtagttggatttatattttatattaaatgtttgttgtgagtttatttatttttttgtgtgtgtggagatagggtcgtgttatgttgtttaggttgatttagaattttttatttagagatattgttaaggtaagtgagggttaagtggatattgagtgattttgtgttttattgagtaaaaataattaaatatgggcgaaggagagtttaatgattttagggataaaatgttattacgggtattttgcgtacgtttgttaggatataggagaagtaattagatattttatttatttttttagaatgtttattaatatgtttagaaaggtggaaaattttatttgttaaagagaaggaaattggaggtatggttaaaagtatttaaggttttttatgaaaaagaaatgaaaattgatattttttttaaaagagaagtaaaatagaaatttagagattttaatgtattcgaaaggttttttttgggtttttattttgtgttttgagtattgtttttaaattaaaggagatttcggtttgtttattggtagtgatgttaagaatttgggagggatatgagtgattatgttgtagatggtaagtagtttaaaaagaaggttttttaattgaaggaaaagtattaagagtagaatgttgtatatttagttaaaggaaagttgatgtggtaaaaatgatgttgttaaggtcgaaaaaggtaagaaaaaaaaataaagcggagaaagatagagaaggtaaggaaaataaaaaatgaagtcgatgataatgataaataaggtggttttatggtagtttttttttttttttttttgtttataaagtatttaatttatttggatatagtttattttttttaaagaaaaaaattgaaatgtaaagttatttaagatttatttgtaaattgtatgatggcgttttttttttgtttttgtattattaataagaattattaagtaattttttagataattttgttttggtggtattttgtatagttattaattttgtttggtatattataggggttataaattagtatgggaattttaaatttaaggtatagtataagttagttatatataaatgtgaagtaatattattaattaaattgttggtttgtgcgaagggagggttaattgtgggatttagttatttatttaataaatattggtgagtgtttgatattgttttaggtattgaggttattgtaataaaatagatataagtttttgtttttatggagtttatattttggtgagggatatagagttattaaaaaggatggtagttgggttatgagaaaggattaaagttaggaagttagaattcggggatggattgaatatgggataaaagagaagagttaagttgattataaagtatttggtttaagtaatgtaaagaatggtgggttattttttgagatgggaagtattagggtagttttggatataaatggagatgtatataagttatttaaattgaaatattgagaaggtagtaggtgatagttggttttttttaggttttagggtaggaatttttaattttttgtgtgtgtgtttaggatttttttggtggtttatgaagttttttttagaataaatattgtggaggaatttattttaatgtaatagtagtttttaggtatattattaggtaaattattttataagttataaaatagaaagttttatagattaaattatgatgtttgaattgtaggtttattgaattagtttaaaattatttatagtaagaattcgatggggtgtatgatatatataggatagggtataggcgaggtagatggattatattattagaatttagaattagggaattttttttttttttttttttttttttttttttgagattgttttattatgttgtttaggttggagtgtaatggcgtgatttcggtttattgtaatttttattttttgggtttaagcgatttttatgttttagtttttcgagtagttgggattataggtacgtattataatgtttagttaatttttgtatttttagtagagacggggttttattatgttgattaggttggttttgaatttttgattttaggtgatttattcgttttagatttttaaagcgttgggattataggtatgagttattgtatttggttaatattgatatgttttttttttttttgtcgtattagtttgttttattgatagagttgaggatgtttaaggcggtttaatagagggtatttggagtaatttatattgtattattagagagatataagtgtaagtatatttagttatagttgtagtttattaattagtttgttgaatagatttgaattttagttgtatttttggggtagagtatatgggtgttaggatgggattataattttattattaatgagtggttatttagggatgatatagttgttaatttagagatggtatgattatgttttttgatttggttattttttaagtaaaatttttatttgttttattatattttttatttattttgtttatttttaaaatattttttttttttttttgagatagggttatattgttatttaggttagagtttagtggtattattatggtttattatagttttaatttttagggtttaggtgatttttttattttagtttttcgagtagatgggattataggtatttgttattatttttagttaatttttgtagagataaggttttgttatgttgtttaggttggttttgaatttttgggtttaagggattcggttattttagttttttaaagtgttaggattataggtatgagttattgtgtttagtttatttttaacgtatttaattggttattaatttttaggattcggtttatgttttataatttttttgtttatttaatatttttgttttttaagttattagttttttttttatggttaatattttttatgagttttatttatttgtttattttttttattttttatattagaattgaatatttttaaataaagtatatttatgttataatttttgaaatgaaaaaaaaaatgtataggattagaaaagaaattaattttaataaattatattttgaagtatagttttatattaaataataagatttaggttaggtgtagtggtttatgtttgtaattttagtaatttgggaagtcgaggtgggaggattgtttgaggttaggggtttaagattagtttgggtaatatggagagattttttatttttttttttatatatatatatatatatatatatatatataaaatatttgatagtaataggtgttgttattattataatttcgagtagtgatgagtttaataatatttcgagttattattaataattgtaaagtaatatgaaaacgtttgtgatgattattgtttataaagttataggtattgttaatatttttggtatttgtagttaaatttataataaaggaaatgttaggttttagttggtattttgtttcgacggtttgtggacggtaggttagaacgttcgtttaagttaggagggtggatttagtattgtagggtttatttcgggttaattaattatattttcgaggcgggggttcggtttttcggatttagttgtttttaggggagagaggatatatttaagagtttggggtcggcgtggtagtatatgtttttgattttagtatttcgggaggttgaggcgtgaagattatttgtagtaggagtttgagattagtttagttaatttggcgagattttgtttttaaaaaaaatttttttttaattagttagttgtggtgagcgtttgtagttttagttattcgggaggttgaggtgggaggatcgttgggtttaggagttttagattgtagtgagttatgatggcggtattgtattttagcgcggtgagatttagttttaaaaataaaagggggaggggttgggggtaaaattagttgtgaaattaagtaagattttttgggatagaataattaaaggggtggcgtcgggttttttaaagagttattagtttagtttaagtttcgtttcggtttttaggtagcggtcgtagagttttattcggtaggcgttcgggaaatttcgtttttcggtcggtagggggcgcgcgtcgtcggtttcgtttcgtggacgcgggtttcgtgggcgttttcgcggttaggtattagtaatttattagggaacggcggtggtcggtgcggcgtgttcggtggcggttttggtcgtttaagagttgcggttgggtgagcgtacgcgaggcggcgaggcggtagcgtgtttttaggtcgtggcgtcgggttttcggagttttggcggtagttaggggaggatggcggagttttcggataagttttatcgagtcgagtacgttaagagcgggcgcgttttttgtaagaaatgtagcgagagtatttttaaggattcgtttcggatggttattatggtgtaggtgcgggttttgtgcgggcggcggggcggggacgcggcgtttcgggttaattgtgttcgggaaggttgggggagggcggttttagggagcgagcgggttcgggttcgggttttcggagcggtatttggggtttatgggttcgcggtcgttttttttttcgagcggttcggtcgattttttcggaaggttttgttgatgttgtaggaaaagttcgggaaataaagtttgtagttggtgttgtttttcgttttgtgaaaacgaggagttttttttttttttttttttgggtggcggtgttttattattgtcgttcgttttaggggttgggggggaattgtatatggtttttttaagttaatttgattttgatttattttgttttggagggtttttgttttatatggatggtggcgattgatatgtgggtttttttttttttttgttaaatttatttttggtagttattttaatacgttatttaaacgtttatttttattttttattttaattaggtagaattatgtagaaaggtgttatttttgtatagtatatttattttgagtttaatttgtgttttaaagtaatattttttttaaattttttagatttatagacgcgtttttttggtgtatttgtagttgtttggtttgagtaagagtggttttaggggggttttttatgtgggttttttgatagattgaatttttttttgaggttttttgagttttttgtgaggtggtgggtttgaaggtttttgttattttttaggggtttttgtttttagtttttagtttgtcgatgtttatttttgtattaataattttggtttttatttgttttgttttttttcgtttttaatatattatttaagtttagtgtttatggttaaggtagtttgattttttttttttttatgagttgtaatgtgttttaggaatgattagatattttttagtggatttttagtatttagtataagggagggcgatatttatcgagtggatatttaagtgttaggtgtattttcgttattttattttataatatgtttgttattttggtgttttcggggtatatttaagttagtacgtggtatatagtgtttatttggtaggtattttttaagttttaagtattttgttaggttttaaggatatagaatttatttttgggaatttttagtttggttaaacgggaaatgattggtaaataaatattatcgtaagagaggatggatgttatttgatggagttgtgttttaggtattgtgtgtttaggagttcgagatgatttagttaagggtggaagtttgattaggagtcgttaatttatagaagtggagtagaaagatgagaatagggaagtagatagggtttataatttgaagagttttgttgtttattaaggaatttagaatttattttgaatatataaggtagtttgttatgaagtttttatttttggtgtaggagtttttattttagggtttgtgggatggtaggtagaaggtaagaggtttatgagtttagataagaaaaaattgatatttttatttttattaatttttagataaaattattttttttaattataaatgtaagtagtaaagtaaaggtatattagtagtttttattttttttttattagtgataattatagatatttttatattattttatagttggaagttttttaaaatataatttatttttattgttataaaaattatagttattagaggttgtattagattttgttatttaatgtttaaaagtttacgggttattgtatttaaattattttttaaatgttttgataattattttagtgtttttttttcgagtttttttgtttgttttgttttttgagatggggttttattatgttgtttaggttggttttaaatttttgagtttaagcgatttatgtatttcggttttataaagtgttagggttataggtatgagttatcgtgattggttatttgcgagtttttttattacgtatttttaaatgttattttgagaaagggatatttaggcgttttaataggtgggtagagtatcgtgttttggtggaaagataaataaaatttaagtttagattgtgttgaggttagaataatatcgttgtggaggaagttagaggaggtttagttgtgggggaggtcggatggaggaaattgaatttgattaagtttagtattttggggtcgggtttggtggcgtatgtttgtaattttagtattttgggaggttggggtgggtagattatttaagtttagtagtttgagattagtttggttaatatggtgaaatttgtttttataaaaaaatgtaatgattagcgggtcgtggtggtgcgtgtttgttaaggtttagttatttcggaggttgaagttggaagattgtttgagtttgggaggtggaggttgtagtgagttgagatagtgttattgtattttagtttgggcgatagatttagatttagatttagattttgtttgaaaaaaaaaatagtaataataatattttgggtttttttttggtatatttgatagtgaaagaaattttttattattaaaagtaattgtgatttttatgtaatggtgattaagggtggatttagagttttaatttagaatttaaagttggtttggtagattgagttggtgaaggttaaaaagaaagaagtttttttatttgtttgaatttaaatatttttttttatatttatatgggagtattgttttttgagtatttgatatttgatattttagtttttatgtttggggtattttgggagggatgagttgggttttttagtattttggtgggaggaggatggcggtagatttttgagttgttttgttttgggagggtttgagtattcggaggtatgtagtgaggttagtttattttttttgtggtttaggtggataggtagtatggtttgttttgtatagaagggaatttagtttattagttgttggttgggtgaggattttggtatgttaggtgtttagtttttgtttgggtgtatagttaaagattttgtgttttgttttagttgtgtagttaataaatggagtcgatagttttgtgattttggtttggtgtttttttgttatattatttttagttttgagtttagggtaaagtattgttttggttaggggtgtttttgttgaggtttttgttttttaagtttgtgttgtgattgtattattgggtagtatttttagggtgtttagtattgtgtcggtggttgggggagatagtatttagattaaagggtagtaggtttggggtttttggtagagttaggaagaagtgttatagttattatttgtgttttttatataagggtaattggaatattgtataggaagggtagataaggggtagataagtaggtagagttaggtcgaggttattgtaaatattttatgatagttagatgtttagggatttgtattagtagtttaattgagatttggtggaacgtttgagagttggaatatgagtatgtttttagaaatgttatttgttgttttttttatagtaggaatttttttatttttttttttttgttttatttgatttggagttttaagtaaatattgcgtgttttttgtgatagatgttgttagagaatagtaagataggtttttatgaaataattattaaatgtatagtttttagtgaggggagttgtggaaggagtattgggagatttgagggagtgttttgaatagggttggagagtattttagatttaggggaaagttgatgttgaggagtttttgtgttgttatagttttagttgtgtattttaatatattatatttagaaagaggttatttatagtggagagagatagtggggtattttattattgtttttttagagtattttttttgttttcgtaattttattttaaaaatttagtatatttatttttaatgttgttttaatagttttattgtatttgtgtgatatttagttttatgttttataaaagtagatgtttgggattttttttattttagttagattatagttggtgtatttttaagtagttttttttgtcgggtagtggagtgtggtgggaggaattatagtgttaaattatttatttgttgtttttgtgatttttaattttttaggtaaggatttttagttttattgtttttatttgtgaatgaaagggttggtttttatttagaggtagattgtgggattatataggatggtttatgaaaggagtagggatttatattatatattgtgttttttttttttttttaatcgttgttatcgtttattttgtaaagttaggattgggtgtagtggtttatgtttgtaattttagtatttcgggaagtcgaggcgggcgggttacgaggttagaagttcgagattagtttggttaatatggtgaagttttattgttattaataatataaaaattagttaggtatgggtggtacgtgtttgtagttttagttatttaggaggtcgaggtaggagaatcgtttgaattcgggagatagaggttgtagtgagttgagatcgtattattgtatttagtgtaagattcggttttaaaaataaagttagatagtgttcgaggtttgggagtagaatttgattttgttataatgaaaggtttagtgggaagtaaattatttggagaggggaattgtgttttttgtggttagattttttaggttttacgtttgggaaattgcgttttagaaggttagtgagtagttgattttagttttaggtatgttgtttcgaattattcgttgttatagttgttttaaagatttttatttattttatttttatttgtgtggttgttgtaagtttgatatttttttttgatatattttttttgttttgtttattatttgggatttgttttttgttatttttaattgtagaggtatttaaagagtttttttttggggtatataggttttttgagtttaggtaagtttggagtagttgtttggttatttttagtagatgttgtaggattgtgattttgtataagtgttttttgtgtattttattaggttatgaggtagtttattattaaatgtagtagtgtgtggttaaaagggacgtggggtagagtttagtggtaaaaggttatttttttcgtggttgtgtttggtgttttaagagaatgagtttaagaatagtgggttatagttttttgatttttggggaagatcgtgagaaggatgttgtagttttttatgtgagagcggaggttgttttttttttatagataggagaataaaagttttatgtgttattttattgttggggttgggattggggtcgaggttaaggttaaggtttagtgggtttaagttaaaagttaattgtttatttatttttttttgttttttttttttttagt

SEQ ID NO: 44 - DNA, 10619 bp, Artificial Sequence
  chemically treated genomic DNA (Homo sapiens)
attagaaggaagagaaatagagggaagtaagtaagtagttaatttttgatttagatttattagattttgattttgatttcgattttagttttagttttagtagtgggatagtatatgaaatttttgtttttttatttgtgaaaggaggatagttttcgtttttatatgaagagttgtagtattttttttacgattttttttaagggttagaagattgtagtttattgtttttgagtttatttttttaggatattaaatatagttacgagaaaggtggttttttattattgagttttgttttacgttttttttgattatatattgttatatttagtggtgagttgttttatggtttagtgaaatgtatagaagatatttgtgtagagttataattttgtagtatttgttgggaatggttagataattgttttaggtttgtttggatttaaagggtttgtgtgttttagaaaagggttttttaagtgtttttgtagttaagaataataaggaataagttttagataatgagtaaagtagagaaagtgtgttagaaaaaagtgttaagtttgtagtagttatatagatgggagtggaatgaatggaggtttttgaggtaattgtgatagcggatggttcggggtagtatgtttagagttggagttagttgtttattggttttttggggcgtagttttttaggcgtaggatttgagaagtttggttatagggaatatagtttttttttttaggtggtttgttttttattaggttttttattgtgatagggttaggttttgtttttaggtttcgagtattgtttggttttgtttttgagatcgagttttgtattgagtgtagtggtgcgattttagtttattgtaatttttgtttttcgggtttaagcgatttttttgtttcggttttttgagtagttgggattataggtacgtgttatttatgtttggttaatttttgtattgttagtagtaatggggttttattatgttggttaggttggtttcgaatttttgatttcgtgattcgttcgtttcggtttttcgaagtgttgggattataggtatgaattattgtatttagttttggttttatagagtggacggtgatagcgattgggaagaaggggaagatatagtatgtagtgtgggtttttgttttttttataagttattttgtgtaattttataatttgtttttgggtgggaattagtttttttatttatagatggagatagtggggttggaaatttttgtttggggggttgggagttatagaggtagtaaatgaatgatttgatattatgattttttttattatattttattgttcggtaggaagagttatttaaaaatatattaattgtgatttgattaaagtaagggaagttttaaatatttgtttttatagaatataaagttaaatgttatatagatgtaataagattattaaaatagtattaaaagtaaatgtgttgaatttttaggatggagttgcggggatagggaaaatattttggaaaagtaatgataaggtattttattatttttttttattgtgagtggtttttttttggatgtgatgtattaaaatgtatagttaagattatggtagtataaggattttttaatattagtttttttttgggtttggaatgttttttagttttgtttagagtatttttttagattttttaatgttttttttatagttttttttattaagaattatgtatttggtgattattttataagggtttattttgttattttttagtaatatttgttatagagggtacgtagtgtttgtttagggttttaagttagatggaataaaaaaggaaggatggggaaatttttgttgtagaagagataataaatggtatttttgagagtatatttatgttttaatttttaaacgttttattagattttaattaggttgttgatatagatttttaagtatttggttattatggaatatttgtaatggtttcgatttggttttgtttgtttgtttattttttgtttattttttttgtgtaatgttttagttatttttgtataaagagtataggtaatggttatggtatttttttttggttttgttaggggttttagatttgttgttttttggtttgggtgttgttttttttaattatcggtatagtgttggatattttggaggtgttgtttaatggtgtaattatagtataagtttagaggataagagttttagtagaagtatttttgattaaagtaatgttttgttttaaatttaggattgagaatgatgtggtagaaaggtattaaattaaggttataagattatcgattttatttgttagttgtatagttgaggtaaggtatagaatttttggttgtgtatttaagtaaaaattgagtatttaatatattagggtttttatttaattagtagttggtgaattgggtttttttttgtgtagaataggttatgttatttgtttatttaggttatagagagaatgaattgattttattgtatgttttcgggtgtttaaatttttttaggatagagtaatttaaaggtttatcgttattttttttttattaaaatgttggagggtttagtttattttttttaagatgttttaggtatgagggttaaagtgttaggtattagatatttagagaataatatttttatgtaaatgtaaaagaaggtatttaaatttaagtaagtgaaaaggtttttttttttttggtttttattagtttagtttattagattaattttaaattttgaattaaaattttgaatttatttttaattattattatataaaaattatagttatttttaataataaagagttttttttattattaagtatattaaaggaaagtttagaatgttgttattattatttttttttttagatagggtttgggtttgggtttgggtttgtcgtttaggttggagtgtagtggtattattttagtttattgtaatttttattttttaggtttaagtaattttttagttttagttttcggagtagttgggttttaataggtacgtattattacgattcgttaattattgtatttttttgtagagataggttttattatgttggttaggttggttttaaattgttgagtttaagtaatttgtttattttagttttttaaagtgttgagattataagtatgcgttattaagttcggttttagaatgttaaatttgattaggtttagttttttttattcggttttttttatagttaagttttttttaattttttttatagcggtgttgttttagttttaatatagtttggatttgggttttgtttgtttttttattagaatacggtattttgtttatttgttaaggcgtttggatgttttttttttagaataatatttaaaaatgcgtaataaaaaggttcgtaaatggttagttacggtggtttatgtttgtaattttagtattttgtggggtcgaggtgtatggatcgtttgagtttaggagtttgagattagtttgggtaatatagtgagattttattttaaaaaataaaataaataaaaaggttcgaaaaggaaatattgagataattattaaaatatttgaaaggtaatttgggtatagtaattcgtgagtttttaagtattaaataataagatttagtatagtttttaataattgtgatttttgtagtaatgagagtaaattatattttgaaaaatttttaattgtaaagtgatatgaaaatatttgtaattattattggtgaaaaaaaaatagggattgttaatatgtttttgttttgttgtttatatttatgattagaggaaataattttatttagaggttagtggagatggagatattaatttttttttatttaaatttatggattttttgttttttatttattattttatagattttggggtaagagtttttgtattaggagtgagaattttataataggttgttttgtatatttaaagtaagttttaggttttttagtgggtaataaggttttttaaattgtaggttttgtttatttttttatttttatttttttgttttatttttgtgaattaacgatttttaattaagtttttatttttagttgggttatttcggatttttaggtatataatgtttagagtatagttttattaggtggtatttatttttttttacggtaatgtttgtttattagttatttttcgtttaattaaattggaaatttttaaaggtggattttgtgtttttaaaatttaatagagtgtttagaatttaaaaaatgtttattaaataagtattgtgtgttacgtattgatttaggtatgtttcgaggatattaagatgataggtatattgtgaaataagataacggaagtatatttggtatttgggtatttattcggtaaatgtcgtttttttttgtattaagtattgaaaatttattgagggatatttggttatttttaaaatatattatagtttatggaagggaggaaaattaagttattttgattatgagtattaagtttgggtaatatgttggaagcgaggaggaatagggtagatgagaattagaattattaatataaaggtagatatcggtaaattggaagttggaggtaggagtttttgggaaatgataggggtttttaagtttattattttatagaaggtttaggaaattttagaaggggatttaatttattaaaaagtttatatgagaaatttttttggagttatttttatttaaattagatagttgtaaatgtattaagagaacgcgtttgtgaatttggaaaatttggggaaaatgttattttaaagtataaattaggtttaaagtgaatgtattgtatagaaatgatatttttttgtatagttttgtttaattaaaataaaaaatgagagtgagcgtttaaatgacgtgttgaaatgattgttaaaaataggtttaataaaaaaagaaaaaaatttatatgttagtcgttattatttatgtagaataaaaattttttagaataagataggttaaaattagattagtttaaagagattatgtataatttttttttaatttttgaggcgaacggtagtaataaaatatcgttatttagaaaggagaagagaagaggtttttcgtttttataaagcgaaaggtaatattagttgtagattttatttttcgggttttttttgtaatattagtaaaatttttcggaagggtcggtcgggtcgttcgggaggaggggcggtcgcgggtttataggttttaagtgtcgtttcgagggttcgggttcgggttcgttcgttttttggggtcgtttttttttagttttttcggatatagttaattcggggcgtcgcgttttcgtttcgtcgttcgtatagggttcgtatttgtattatgatggttattcggagcgagtttttggggatgttttcgttgtattttttgtaagaggcgcgttcgtttttggcgtattcgattcgatagagtttattcgaagatttcgttatttttttttagttgtcgttaaagtttcggaagttcgacgttacgatttagaaatacgttgtcgtttcgtcgtttcgcgtgcgtttatttagtcgtagtttttgagcggttagagtcgttatcgaatacgtcgtatcggttatcgtcgttttttgatagattgttgatgtttggtcgcgggaacgtttacggaattcgcgtttacggggcggggtcggcggcgcgcgttttttgtcggtcggggggcggagtttttcgggcgtttgtcgggtggagttttgcggtcgttgtttgggggtcgaggcggggtttgggttgagttagtagttttttggaggattcggcgttatttttttgattgttttgttttaggaagttttatttgattttataattaattttatttttaattttttttttttttatttttgagattgagttttatcgcgttggagtgtagtgtcgttattatggtttattgtagtttggaatttttgagtttagcgatttttttattttagtttttcgagtagttgggattataggcgtttattataattggttaattaaaaaaaaattttttttagggatagggtttcgttaagttggttagattggttttaaatttttgttataagtgatttttacgttttagtttttcgaagtgttgggattaggggtatgtgttattacgtcggttttaaatttttaagtgtgtttttttttttttgagggtagttgggttcgggaagtcgggttttcgtttcgggaatatagttgattggttcgaggtggattttgtagtgttaggtttatttttttggtttggacgggcgttttaatttgtcgtttatagatcgtcgggataaaatattaattgaaatttagtattttttttattatgaatttgattataaatattaggagtattagtagtatttgtgattttgtgggtaatagttattatagacgtttttatgttattttatagttgttggtgataattcgaaatattattaagtttattattattcgaaattgtggtaatgatagtatttgttgttattagatattttgtgtgtgtgtgtgtgtgtgtgtgtgtgtgtaaagaaagagatggggaatttttttatgttgtttaggttggttttgaatttttggttttaagtaatttttttatttcgattttttaaattgttgggattataggtatgagttattgtatttggtttagattttgttgtttaatatagaattatattttaaaatatagtttattaaaattggttttttttttaattttatgtatttttttttttattttaaagattgtaatatgagtgtgttttatttgaaaatatttaattttggtatagaggataagaaaaataagtagatgaataaaatttataaaaagtgttaattatagagaagaagttagtggtttaagagataaggatgttgagtaagtaagaaggttgtgagatataggtcgaattttaaaagttagtaattagttagatacgttgaaggtaggttgggtatagtggtttatgtttataattttagtattttgggaggttgaggtggtcggattttttgagtttaggagtttaagattagtttggataatatggtaaaattttgtttttataaaaattagttgggggtggtggtaggtgtttgtagttttatttattcgggaggttgaggtgggaggattatttgagttttgaaggttgaggttgtggtgagttatgatagtgttattggattttagtttgggtgatagtgtgattttgttttaaaaaaaaaaaaaagatattttgaaggtaaatagaataagtggaaaatatgatggaataaataaaagttttatttagagaatgattaagttaaaaggtatgattatgttatttttgggttgataattatattatttttaaatggttatttattggtgataagattatggttttattttggtatttatatgttttgttttaaaaatgtagttaaagtttaggtttgtttagtaggttgattggtgagttgtagttgtggttgagtgtgtttgtatttgtgtttttttgatagtgtagtgtgagttgttttaggtattttttgttgagtcgttttgagtatttttaattttgttagtgggataggttgatgcggtagagagagggaaaatatattaatattagttaggtgtagtggtttatgtttgtaattttagcgttttgggaatttgaggcgggtggattatttaaggttaggagtttaaaattagtttggttaatatggtgaaatttcgtttttattaagaatataaaaattagttgggtattgtggtgcgtgtttgtaattttagttattcgggaggttgaggtatgagaatcgtttgaatttaggaggtggaagttgtagtgagtcgagattacgttattgtattttagtttgggtaatatagtgagatagttttaaaaaaagaaaagaagagaggggaggggaggattttttaattttaggttttggtggtgtggtttatttgtttcgtttgtattttattttgtgtatgttatgtattttatcgagtttttgttgtaagtggttttaaattgatttaataaatttgtaatttaagtattataatttggtttgtgaggttttttgttttgtaatttgtgggatagtttgtttgataatgtatttagaagttattattgtattaaggtaggtttttttataatatttattttggaaagggttttatggattattaaaggggttttaggtatatatataaaaggttaagaatttttgttttagaatttaaggaaagttaattattatttattgtttttttaatattttagtttggatggtttatatgtatttttatttatgtttaaaattgttttagtgttttttattttaggaaatggtttattattttttgtattatttaggttaaatgttttgtagttaatttgattttttttttttgttttatgtttaatttattttcgaattttaattttttgattttgatttttttttatggtttagttgttattttttttggtggttttgtattttttattagaatgtaagttttatgagggtaggagtttgtgtttgttttgttgtaatagttttagtgtttggaatagtgttaggtatttattaatatttgttgaatgaatgattgaattttatagttggtttttttttcgtataggttaatagtttaattaataatgttattttatatttgtatataattaatttatattgtgttttaaatttgaaatttttatgttgatttataatttttatagtatattaggtaaagttggtggttatataaaatattattaggatagggttgtttgaagaattatttgataatttttgttaataatataaaaatagaaaaagaacgttattatgtagtttataaataaattttaggtggttttatattttaatttttttttttaaaaggaatgagttgtgtttaggtaggttaaatgttttatagataagagaaaaaaaaaaaaagttgttatagaattattttatttgttattattatcgattttattttttattttttttattttttttgttttttttcgttttgttttttttttttgtttttttcggttttgatagtattatttttgttatattagtttttttttggttggatatgtagtattttgtttttggtattttttttttagttgagaagttttttttttgggttgtttgttatttgtagtatggttatttatgttttttttaggtttttggtattattgttagtggatagatcgggattttttttgatttgagggtagtatttagaatataaagtgaaagtttaaaggaggtttttcgggtgtattagaatttttgaatttttgttttattttttttttaggagggatattagtttttattttttttttataaagggttttgaatatttttggttatgtttttaatttttttttttttagtaagtaaggttttttatttttttgaatatgttaatgaatattttgagaagatgaatgaagtgtttggttgttttttttgtattttggtaagcgtgcgtagaatgttcgtgatgatattttgtttttgggattattgggttttttttcgtttatgtttagttatttttgtttagtgaggtatagaattatttagtgtttatttggtttttatttattttggtagtgtttttaggtaaggagttttagattagtttggataatatagtacgattttgtttttatatatataaaaaagtaaataaatttataataaatatttggtgtaaggtatgggtttagttatatttttttgtatgtggagatttattatttgtggaagagattgttttttttttattgaatgattttggtatttttgttgaaattatttaattatatatgttgagggtttatttttgggttttttattttgttttattggtttatatgtttgtttttattttaacgttatattatagtaagttttgaaattagaaagtgtgagatttttaattttatttttattttataaagttgatttgttttggtttggttttatattttgttaagattgattaggagtggaaagaagagatggtggttcgtgtttgtaattttagtattttgggaggttaaggtaggcggattataaggttaggagtttgagattagtttgattaatacggtgaaattttgtttttattaaaaatataaaataattagttgggtatggtggtgtatgtttataatttaagttatttaggaggttgaggtaggagaattttttgattttgggaggtagaggttgtagtgagtcgagattgtattattgtattttagtttggtcgatagattaagattttgtattaaaaagaaaaaaaagaaagaagagagatatataattttgattgttggtgtatgtgtgtgtggtggtggggtgggggggatgtttaaagttttatattagggattttttgttaagtaggtgaggt

SEQ ID NO: 45 - DNA, 7353 bp, Artificial Sequence
  chemically treated genomic DNA (Homo sapiens)
tttgatagttttagtgtaagtagaatttatttatttatatatttatttattatatatttattaagtatttatgttttgtgtgttatattttggtatttattgaattatttatgtatttgttaaaaatgtaaatatttaggtttcgtttttattttattgaattagaatttttaaggagtaggtattagaaatatgatttttaaaaagtttgttttagagatgttttaggaatagagatgaaaaggatagttttttttatttgttagattattatataaatgaatagataagttagagtaagaaaagtttatttaagttatgataaaatatgtatggtatttatgagagagagaggttgtttttattaggaggaggaggggttgtttaattagttggtgtagtgtttgttttttattagtttggttgttggggaatggttagttttttagagtgtatgtgacgttgtttttaagagtgggtattagatatagaaagagggaatatattttgttttgtattgttttaatttagtagatattaatggattgaaaggatagggttagaaggaggatgtgttaatttgttaatgtgtttatttttgatgaatattttgtaggtttttttttggtagtgcgattaaggttggagatttatagtaaggaatttagaaagtttattgggtttattattaggaaaaatagagttcggttttgtttttgttatttattagttggatagtttatttagtttgttgtttagttttttttatttataaaggtagataataaaatttatattatgggattgttttgggaattatataatatatagtatataaattgtttggtattgtgtttagtatgtggttggtgttaataggtattatttatttttagtaataatataagtaataatggatttttatttgggtttttagaaatgatttttttttaggttattaaatttaaattttatatttatagtggtttttaattatttgttttgttttagttttttggagggttatgatattgttatagtagttttattggtttagggtagtgatttttaatttggggtttattttttttagtttaagttggttttttatttcgggtaatttggatattgttttttgtttttataagggtatttgtttattatttttgttttttattgagatttattgttttgggtggtaagtttttagtagggtgtgtatatttgtagtttttaaggagttttgttaaaatatatatgttgtattttattttggatttggtgaataatttttttggtggggtattggtaagtgtattttgtttttttaggaaatgttgatttataggtttggttgagaattattatatttgtggatatttttttgtttagtaatgttttatttagtttgtatagtatgaaattttttagtaaaaattaatggtgtttatatagttttttaaagtttagagatattgattttgtgtgataaattgaggaggtagaatttttggtgataaggaatatgtgataggaataagaattttgtgtataaaggggttatgtatattattttatatatggtgtatatattatggtatttaataaaatgtagtatttgttattattggtattcgttgtgtattggttttagggtttttggttttgaaaagatttgtttttattttaggagaaaagattttaaattagggaattaagaaattatttggttgtttgggaagtatttagaaaatatgataagaggtgttatatataggttagtagtagaaattttaagaaagataattattgtaaattttgtttttatttttttttttgattttgaaattaggaagaagagtagtgtgttggaagttggggtgtagatggtaagtgatggttttttaagatttagttttcgagttttataaatagtaatatagtaaattttagattgttacgggttttgatttttgttttttagtatttatatttgaagtgtggggtttttagttgttgtgtaaaaatgattgtagttatgtttttaattgagtttattggcgatgtttaaagtttttgttaagagttttagagtagagattttagtagaagatggaaaatgagtgatttaatagagcgaggaaattgtttttttagttttttttagattgtttagaaagggagattagaaaggttttttagaattaatattggaaagggagtttatattattagggtaaagattgggagataaaggtattgaagttaaatgagatttttgtgaaatattttggaaagtatagattttgagattatatgaatagtagtagtattaataattgtattattggtgcgggttatagatattagttgggaatgaaggtgatttttagggtttttaatttagttattagtttttagttagatttaagtttgtagttggttgtatagagaggtagtttgttttatttttggaattttaatttaggtgattgtataaggtattttggtttagtggttttttaaataagacgatatttttttaagtttaattttttttttgttgaaattttttatttttttgggttttattattaaattgtttgtttttatttgaaaagtgtagttagtagggtgtaagttagtgttttagtgatcgttaaaatttattttaggatagttagtacgtacggaaaaatttgttattcgtcgtatatttattttttttcgtttttatcgttatttttattagagagaatatggaaaatattttatttttttttttttttattgaaggatgttgtgtgtatatttgaatgggggtgggatgcggggcgggagtggagtttagttttcggtttttaataaaaatataatgatttttagtaagttagagttgtgtaattaaggaggtaggattttggtttttttcggatttgtaggaagggtgggttgtgcgggtttagagtgggatgttcgttttggtcggcggtgtttgttgagttttttttgatgtgattttattagataaatttttattttcgttaggggtagatatacgagtatttgttttaggaagatttttgtaatacggtagggtgtaatttaaattttgggttttttttttttgagtttagaaattaatttgttcggagataggagaaggttttgttggtagaagatttaagagacgggaggaggcgtttggcgttagcgggtcgttttttagtcgtgattacgagcggttagtaggtgttagtgcgttttcgttttgttttggcgttcggtttttggatttttttttatttcggtttaagggggcgcggtttagatttcgggttttgcgtttttcgtagatagtatcgcggttgggaggatacgtagtcgttttttttttaagcggaggtttgaatttcggtttgtattattttttcgtgggtgttgtttatttcgttttaggggttttattcgaagtcgcgtttttttttttttttaggatttttttttttttagtttttaggagtatttgcggatcgcgtcggttttggttcggagttgggttgttttagacgtaatttatatcggaggttatttttttcgatttgggcggggatttttttttattttttttttttttttttttttaagatttagttttttgggggtatttacgggtgttcgttgcgttttgtttcgtcggttcggagttgtatggttaatttttagtaggggtcgttttttttttattttttattttcgggttttttttttaagtttttagtttaaggtattcgtttttttaaagggttcgtttcgtttgagggtaacgtttttcgaggtttagcgttaggcgcgggcgttagattggcggaggggtggtgcgaggggcgggggagggtcggttttttacgtgggggttgacgtcggttgtttagtaacgtttgtttgattttggggttataaaacgagtttatcgtgagcgtagcggagtagtagtagttttagttcggtgtagaagtttagtagtcggcgtgtcgtcgttcggttattttagcgttttttttttcgttttgcgtttttgttttaattcgcgttgtcgtcggatttcggtttatttagtagcgttcggcgtttattaggcggacgtttaggagaatttttgttttcgtcgcggtttttggagagttgatcgtttatttgtttcggttcgtttgaggacgggggtgtttttatgcggtttttatattttttatttcgtcgtcgtcgtcgtttcggagtttcgtatagtgtgttttagttttagtagggcgtataattttggaagtttcgcggcgtttcgagaggcggtagagttcgcgttttagtttcgggtcgggtcgggttagaatcgtagcgtttgggggaagttagagagtcggtaatcgtttcggggatgtaaggcgatagatataggattttcgagttcgtattagtatttttcggttgtttttcggggtgggggcgggtttcgtatacggtaagattttttgttttcgtttaggtttaagatttaagatatagatattgatatgtatatatatatttaattttttgttatttttttaagttattaggttatcgatgatttttgttttttttttttgaagaataaatttttttttatttatcggttttttttattttttttcgtcgtttagaaataaaatttggttgtattaggagttcggagtaagaaggcgtttatcgagagcgtttgaagcgcgagttaggcgtagttcgcgggattcgggttatgggtcgttagcggttttttagttcgggttcggtttttttgcggttttttttttatgtgagtcgtagttaggcgagcggggcgtcggaggaagaggaggatttacgggcgtcgggtcggaaggtagttggtagtaggtttaggttagcgggcgttcgcgtttatgtttcgttaggagtagtcgttggtcgagggtagttttgcgtttatgggttttttgtagtcggacgcgggtaacgcgagttggaacgggatcgaggcgtcggggggcggcgttcgggttattttttattttttgtaggtgacgttgacgttggtgtgtttggtcggtttgtttatgttgtttatcgtgttcggtaacgtgttcgttattatcgtcgtgtttacgagtcgcgcgtttaaggcgttttaaaatttttttttggtgtttttggtttcggtcgatattttggtggttacgttcgttatttttttttcgttggttaacgaggttatgggttattggtatttcggtaaggtttggtgcgagatttatttggcgttcgacgtgtttttttgtacgtcgtttatcgtgtatttgtgcgttattagtttggatcgttattggtttattatataggttatcgagtataatttgaagcgtacgtcgcgtcgtattaaggttattattattatcgtgtgggttatttcggtcgttatttttttttcgtcgtttatttttatcgagaagaagggcggcggcggcggttcgtagtcggtcgagtcgcgttgcgagattaacgattagaagtggtacgttatttcgtcgtgtatcggtttttttttcgttttttgttttattatgattttggtttacgtgcgtatttattagatcgttaagcgtcgtattcgcgtgttatttagtcgtcggggttcggacgtcgtcgtcgcgtcgtcggggggtatcgagcgtaggtttaacggtttgggtttcgagcgtagcgcgggttcggggggcgtagaggtcgaatcgttgtttatttagtttaacggcgtttttggcgagttcgcgtcggtcgggtcgcgcgatatcgacgcgttggatttggaggagagttcgtttttcgattacgtcgagcggtttttagggtttcgtagattcgagcgcggttttcggggtaaaggtaaggttcgagcgagttaggtgaagtcgggcgatagtttgtcgcggcgcgggtcgggggcgacggggatcgggacgtcggttgtagggtcgggggaggagcgcgtcggggttgttaaggcgtcgcgttggcgcgggcggtagaatcgcgagaagcgttttacgttcgtgttggtcgtggttatcggagtgttcgtggtgtgttggtttttttttttttttatttatacgtttacggtcgtcgggtgtttcgtgttacgtacgttttttaaattttttttttggttcggttattgtaatagttcgttgaattcggttatttatattatttttaattacgattttcgtcgcgtttttaagaagattttttgtcggggggataggaagcggatcgtgtgaggttttcgttggcgttcgcgtagatttacgttgattgtaggtagcggggggtatcgaggggtgtttagttttagggtatttagaaattcgggcgttgtttgttttgcgttttttcgtttggggtggttttgtagttttttgcgggcgggcgtttgttgtttttataagggaagttttttgttgttaggtttatatatttttagttgttggtttggttatttttgatttggagttatttttttagtgggttatttttaattattattgttttttaaaggtatttttatttttttcgtttggtatagtttttatagttttttagagtaagtattggattataagggtatggtttataaaaggttaatggatgggggttatttagttttggttaattttttttttatttttaattttttttttttttttaaagaaaaatgttaagggtagttttgtttgttttttttatttttcgttgtaaatatatattatttttgatagtatatatggggtttttatattttttggttttggttttgatgttgaaattttggttttgggagagatgttttttaggtagatatagttgtttggtttaggttaagtttttttgtaatgtaagttttttttggtgttatgaagtttttttatgtcgtcgtttttattagtaattggtgattgttttttcgatacggatttgttttgagattttttgatagggaaaagatttttgtttattttttttttgtgtttaatagtataattgtttttttttatgtaaatattatgatggtggattaagatataagtaaatgagtttttttgttttatattagttttgtgtataaagttattattttttgatgtattgtttgttttagtaatttattttaaaatttttttttttagtgttttttttttttttttagggttattgtttgaagaagaatatgtatgtttttattttgtatgtttgtgtgttttttttgtttcgaaagtgttg

SEQ ID NO: 46 - DNA, 7353 bp, Artificial Sequence
  chemically treated genomic DNA (Homo sapiens)
tagtattttcggggtaggaggggtatatagatatataagatagaaatatatatatttttttttaagtagtggttttggagggagagagggaatattggaaagagaggttttaaagtgagttattggggtaaatagtgtattagagaataatggttttatatatagggttgatgtgaggtagaaaggtttatttatttatgttttgatttattattataatatttatataggaaaaggtaattatgttgttaggtataggaaaaaaatggatagaaattttttttttgttaggaaattttaaagtaggttcgtgtcgaagggatagttattagttgttggtgaaaacgacgatatagagggattttataatattagaaagggtttgtattgtaaaggggtttggtttgaattagatagttgtgtttgtttggaaggtattttttttaaggttaggattttaatattaaaattaaggttaagagatatgggggttttatgtgtgttattaaaaatagtgtatatttatagcgggggatggggagggtaggtagggttgtttttagtatttttttttaaaaagagagagagagttgggaatggaaggggaattagttagggttaggtaatttttatttattaattttttgtgagttatgtttttgtagtttagtgtttgttttgaagagttgtgagggttgtattaggcgaagagggtgaaaatatttttaggaagtaatagtgattaggggtggtttattaggaagatggttttaggttaagagtggttaaattaataattggggatgtgtgggtttggtagtaagaagttttttttgtaggagtagtagacgttcgttcgtaggaggttgtagagttattttagacgaggaaacgtagagtaggtagcgttcgggtttttgagtgttttggggttaagtatttttcgatgtttttcgttgtttgtagttagcgtgagtttacgcgggcgttagcggaaattttatacgattcgttttttgttttttcgatagaggatttttttgaaggcgcggcggaaatcgtggttgaagatggtgtagatgatcgggtttaacgagttgttgtagtagtcgaattagaagaagaatttgaagagcgtgcgtggtacggagtattcgacggtcgtgagcgtgtaggtgaagaagaaggggaattagtatattacgaatatttcgatgattacggttagtacgaacgtgaagcgtttttcgcggttttgtcgttcgcgttagcgcgacgttttggtagtttcgacgcgtttttttttcggttttgtagtcggcgtttcgattttcgtcgttttcggttcgcgtcgcggtaggttgtcgttcggttttatttggttcgttcgggttttgtttttgtttcggggatcgcgttcgggtttgcggggttttggaggtcgttcggcgtggtcggaagacgagtttttttttaggtttagcgcgtcggtgtcgcgcggttcggtcggcgcgggttcgttaggggcgtcgttgagttgggtgggtagcggttcggtttttgcgtttttcgggttcgcgttgcgttcggggtttagatcgttgggtttgcgttcggtgtttttcggcggcgcggcgacggcgttcggatttcggcggttgggtggtacgcgggtgcgacgtttggcgatttggtagatgcgtacgtagattaggattatgatgaggtagggagcgaagaaggagtcgatgtacgacgagatgacgtattatttttggtcgttgatttcgtagcgcggttcggtcggttgcgggtcgtcgtcgtcgttttttttttcgatggagatgagcggcgggaaggagatgacggtcgagatgatttatacggtgatgatgatggttttgatgcggcgcggcgtgcgttttaggttgtattcgatggtttgtgtgatggattagtagcggtttaggttgatggcgtataggtgtacgatggacgacgtgtagaagagtacgtcgagcgttaggtagatttcgtattaagttttgtcgaagtattagtagtttatgatttcgttggttagcgagaaagggatgacgagcgtggttattaggatgtcggtcgaggttagagatattaggaagaggttttggggcgttttgagcgcgcggttcgtgaatacggcgatgatgacgagtacgttgtcgaatacggtgagtagtatgagtaggtcggttaggtatattagcgttagcgttatttgtagggagtaaggggtggttcgggcgtcgtttttcggcgtttcggtttcgttttagttcgcgttgttcgcgttcggttgtagggagtttatgggcgtaaagttgttttcggttaacggttgtttttggcggaatatgaacgcgggcgttcgttggtttgggtttgttgttagttgtttttcggttcggcgttcgtgggttttttttttttttcggcgtttcgttcgtttggttgcggtttatatagggagggggtcgtagggaggtcgggttcgaattggaggatcgttagcggtttatggttcgggtttcgcgaattgcgtttggttcgcgttttagacgttttcggtgggcgtttttttgtttcgagtttttaatatagttaagttttatttttaagcggcgggagagagtagggagagtcgatgggtaaagagagatttattttttaagaagggagaataaaaattatcggtggtttgataatttggaaggatgataggaaattaaatatatatatatatattaatatttgtattttgaattttgagtttgagcgaaagtaagaggttttatcgtgtgcggggttcgtttttatttcgggaggtagtcgaagggtgttgatgcgagttcgggggttttatgtttgtcgttttatattttcgaagcgattatcgattttttggttttttttagacgttgcggttttggttcggttcggttcggggttggggcgcggattttgtcgtttttcggagcgtcgcgagatttttaaagttgtgcgttttgttggggttggggtatattgtgcggagtttcgggacggcggcggcggcggggtgaggagtgtgggggtcgtatgaaggtattttcgtttttaggcgggtcggggtaggtgaacgattagttttttaggagtcgcgacggaggtaggggtttttttgggcgttcgtttggtgggcgtcgagcgttgttggatgggtcggggttcgacgatagcgcgagttggggtaggagcgtaaggcggggaagaaggcgttggagtggtcgggcggcggtacgtcggttgttgggtttttgtatcgagttggagttgttgttgtttcgttgcgtttacggtggattcgttttatagttttaggattaagtaagcgttgttgagtagtcggcgttagtttttacgtgggaagtcgattttttttcgtttttcgtattattttttcgttagtttagcgttcgcgtttagcgttggatttcggggagcgttgtttttaggcgggacgagttttttggagaggcgggtattttgagttagagatttaaagagggagttcgggggtggggggtaggggaggagcggtttttgttgggagttggttatgtagtttcgggtcgacggagtagaacgtaacgggtattcgtgagtgtttttaagaagttggattttgggagaaaagggaagaaaaaaatggaagggaattttcgtttaaatcgagggaagtaattttcggtgtgagttacgtttggagtagtttagtttcgggttagagtcgacgcggttcgtaggtgtttttggaggttggggagaaaggggttttggagagggaggaaggcgcggtttcggatggaatttttggggcggaatggatagtatttacggggaagtggtataagtcggagtttagattttcgtttagggaagaagcggttacgtgtttttttagtcgcgatgttgtttgcgggaaacgtaagattcggggtttggatcgcgtttttttagatcgaggtggggaggggtttaggagtcgagcgttagggtaaagcgaggacgtattgatatttgttggtcgttcgtggttacggttgagaagcgattcgttgacgttaggcgttttttttcgttttttaggttttttgttaatagagtttttttttattttcgaataaattggtttttaagtttaggaaaggagaatttagagtttgaattgtattttgtcgtgttgtagaaatttttttaaagtagatattcgtgtgtttatttttggcgggagtgggggtttgtttaataaagttatattaggaagggtttagtaggtatcgtcggttagaacgggtattttattttggattcgtatagtttattttttttgtagattcgagagaggttaggattttgtttttttggttgtatagttttggtttgttgggaattattatgtttttgttgaggatcgaaagttagattttattttcgtttcgtattttatttttatttagatgtatatatagtattttttaataaggggaagagggagtagaatattttttatgttttttttgataagaatagcggtgggggcgggggggagtgggtgtgcggcgaatggtaagttttttcgtgcgtgttagttgttttaggatagattttaacggttattagagtattagtttgtattttgttagttgtattttttagatgagagtaagtagtttaatggtaaaatttaagagggtaggaaattttagtaggagagagattagatttaaaggaatgtcgttttatttaaggaattattaaattaaaatgttttgtgtagttatttaagttggaattttaaggatggaataggttgtttttttgtgtagttagttgtaggtttaggtttggttgggggttgatggttaaattaagggttttgagaattatttttatttttagttgatgtttatagttcgtattagtgatatagttattggtgttgttgttgtttatgtagttttaaaatttgtattttttaaagtattttatagaagttttatttgattttagtatttttgttttttaatttttgttttaatggtataaattttttttttagtgttagttttgaggagtttttttaatttttttttttggataatttaaaggaagttgagaagataattttttcgttttgttgagttatttattttttattttttattaaagtttttgttttgaggtttttggtaggggttttggatatcgttagtaggtttagttggaaatatggttatagttatttttgtatagtaattaggaattttatattttaagtatgaatattaagagataaaaattagagttcgtggtaatttggggtttgttgtgttgttgtttgtagaattcgggaattgagttttaggagattattatttattatttgtattttagtttttaatatattgtttttttttttaattttagaattaaaagaggaaataaaaataaagtttatagtaattattttttttgaaatttttgttgttagtttgtgtatgatattttttgttatattttttaaatgttttttaaatagttaggtggttttttaattttttgatttggagtttttttttttaaaatgggaataggtttttttagagttaggaattttgaggttaatatataacgaatattaataataataagtgttgtattttattaagtattatgatgtatgtattatgtgtagggtgatatatatggtttttttatatatagagtttttatttttgttatatgttttttattattaaaggttttgtttttttagtttgttatatagggttagtatttttgagttttgaaaagttatgtggatattattaatttttgttagaagattttatgttgtgtaagttgagtgagatattgttgagtagaaagatatttataaatataataatttttaattaggtttatagattagtattttttaggaagataaaatatatttattaatgttttattagggaaattatttattaggtttaaggtgggatgtagtatgtgtattttgataaaattttttgagagttgtaggtgtgtatattttgttgaagatttattatttaaagtaataaattttagtgggggataggagtgatgagtaagtgtttttgtggggataggaggtagtgtttaaattattcggggtaggaagttaatttgagttagaaagagtgggttttagattgagaattattgttttgagttagtgagattgttatgatagtgttatagttttttagggagttgggatagagtaaatagttgagagttattgtaaatatggagtttgggtttgatggtttgagaaggagttatttttggggatttaaatgggggtttattattatttatattattattaaaaataaatagtatttattagtattaattatatgttaggtataatgttaagtagtttatgtattatatattatataatttttaaaataattttataatgtagattttattatttgtttttgtagatggaggaaattaggtaatagattaagtaaattgtttagttaataagtggtaaggatagagtcgaattttattttttttggtggtaagtttaatgagttttttaagttttttattgtgaatttttagttttgatcgtattgttaaagagaaatttgtaaaatgtttattagaaatgagtatattgataagttagtatattttttttttagttttgtttttttagtttattgatgtttattagattaggatagtataaggtaagatgtattttttttttttgtatttaatgtttatttttggaggtaacgttatatatattttaggagattgattattttttaatagttaagttgatggagagtaagtattatattaattggttaggtaattttttttttttttagtagaagtaattttttttttttatgggtgttatatatattttattatggtttagatggattttttttgttttagtttatttatttatttgtatgatgatttagtaggtagaaaggattgttttttttatttttatttttagagtatttttaaaataggttttttaaaaattatatttttagtatttattttttggagattttgatttagtaggatgaaggcggggtttgggtgtttgtatttttaataagtgtatgagtaatttaataaatattaaaatataatatatagagtatggatatttgataaatgtgtgatggatgaatgtatgaatgaatgaattttatttatattgaagttattaaa

SEQ ID NO: 47 - DNA, 6904 bp, Artificial Sequence
  chemically treated genomic DNA (Homo sapiens)
  unsure 6084: n is a or g or c or t
agtagggtaggaggtgtttgggggagtgttgtcgaatttggaggggagttatacgtgtagaggaagaggaaggattttcggattgagttgggttgttgtatttagagtagtattttttaattttagcgttgtagtattttgtatttggtaattttttattgtggggacggttttgaattttgtaggatatttggtagtatttttggtttttatttatagatgttaatagcggttttttttttgtattttagatattgtcgaacgttttttagaggaggagaattatttttagtaagaatttttgatttaagagtttgggagaagaaagggttgtagaggagtggtttttaaggcggttatagattttgtgagtgttttaggggaagggttgttgtgttaagtgttgttgagaaagagggtagaataagtttggtgtttggtgatgtggagtagggtatgatttatagaagattttcggtggagggtttgaagatgatttgtcgggggttaaggagagaatgtgaggggttagttatagtgtttggatatagatacggggggaaggtggttatgggaggtagtagaaaggtgatggggtttggggggtagttttaaggggtggggttggttttgtagagtaggggtagtgattataagagggggataattgaagcgggggaattttggggtgagatgagaggggttgggttttagggtataggttgaggatttgttttttaattagtagagagagtttgaggttagatgtaggtgggcggcgggggtgagtttttgtttggattttcgtttttttttaagtattaggtagagttatagtatggtggggcggaggagtggttgggaggttggagagggagggagggatgtcgattttaataagtgggaaagtgagtatattagggaagtttggagatttgtggttatgaatttagagtgaggttagtcgatgtagagagtgttttgtttcggaaagagtagttgtttggttaaaggtaggtagtgggtggatgatttaggtttgattagagttggggttttgttaagatttttatgtagagaggacgattgatttttattatagaggatacgatttaaggatttgggaagtggggaggttggggtatataggatggtttggggttaagagttttagggattgaaaggttggtggggggcggggtatatttggagaaaggtggggtgtgtggtttgatgggggtttgttttagtgggtttttaggggagggaaggtatcgttgtgagttgttggagttttagtttaggagatttggtggtattattttattttttaggtttggagaagtgtttttatggtttttaattaaggttttatagttagtaatgggataatagttttgtttttttttggaaaaggtggatcgtttttatggttaggttttttttttatggtttttttttttaaggatatttttttagggtatttttatttgggttatttgttttagaatgtttatgtgtatgagtgtattgttgtttgttgttattgttttttacggttaatgattttgtgttaggtattggggatagagaagggatgtttattttgatgggtagaggtgatgtaataaatttattagagagtattttagtatagtgtgttgagtgtgaaagtggtgtcgtttggcgtcgaggaatttggagaatggaggttttttttttgtttgagagtttggtgattggtgagtgggttttgaaatgtgagtaggagtttattaaatatagaaggaagggtgatagggtatttttattagagtaaatagttttagggaaggtttagagagtggagatttagggtatatttagaatttaatattggtttggcggggtagggatggagggttgggatttaggttgtgttttgttgtttatttttttgttatgtgtttgggaaagtttcggttgtttttgttgttggttgttgttggtttgggattgaattatgttcgtttttgtggaataggatgatagtggaaggttaggtttagtttgggaagagttgaaggaagttttgttatgttagtaggttttaatttttgtatttggtagttttatggggttggttggagtaggtaaggtttgaaggtgtgtgtgtgcggggggagatggtgagtcgtcgagaggagtaggagttgagttatgttatggtttgcgtggtcgtggagagttggcgtatttacgttgtatttgtttattttggggtggagttaggaggagatagttgtagtagacggtgatagtttggggtagcggtatggatgttaaggtagtttttgttgttcggagggtatatattttttaggtttgttagttgtagattttgtttttggttgtttttatttggtttagtgtttagttggtttaatgaaagatgtttagtaaggtttggtatttagtagatttaaagttgttatttttaggaaggtttaggtaagcgtttttagtggggatttgtagggtggggagggtatacgggtaatttagttttagtttttgtagtattttttgaaggaagatgggttataagataaaggttgatgttggttgtagagtttggggagttgtttattggtttttagtttaagtgtggttggagatagtggaaaggcggtttttttcgatgtttatgtgggtttttagtaggtttagattgtgaaggttttgggagtttttggataggtaggtatttgtttaagtagttgtttttaggtttttatggttattttttgtttttttttagggaaagagttattggtatttttttattattggttatgtatgtttaggcggcgtttaggttttgtttagtttagagggtgggaaagatatatttaggaaattgtgtttagtagagtggtcggttttgagttgaagtttagggttgggggtgggaaggaggttgattgttttgttcgaatttagttttggtagtatttattttatgggttgtgggtatttgtattttattagaagttggggagtttggtagaatgatagggatggggggattaaggaggtatttatttttaatatattttcgtggttgggggtgttggtttgggtatttgagacggggtattttttatttgagtttggggaggcgttagatattgttcgtgggtattgagaggttacgtgttttgtttttatggagggagtagggaggagaggaggtttagtaggttggacggggtttgggggagttttattgttagaggtggattggtgtttatttatatagaggatgttttgtagagtcgtgggttgtgaataagaggtttggttcgaggcggggtttatgatattaggggttttagaatcggggaaatatgtttttagggttgtttaggttggtgttggtggcggtgtggtagggagagtgagttggggttttgagggagaatagttgtttatagcgttttgaaggcgagtggggggttttagtttgaagtttttttttattttaattttttttttattgttatttttagaagggttttagtgtgtatgtggggtaggatcgtagtagggagggagggttaattttttttttcggggttattatagaagcggagggacgtttttttttttacggttgtttttgagatttgttttttttcggagttgtgtgataaagtttttattttttatttttttacggtaaggaagggatttttttttcgtattagttaaggggcggtagttcgttttgtgtttcgtataaatttttggttgaatcgtagttgatgttgtgattcgagtttaagttagtttttttgttattttttttgtttttaatggaggaaattgaggtagttgcggagatataagaagtcgaagttttaatatttagttgcgagcgttggtttcgggattcgggggtggcgttgacgggttgggttcgcgggcggtagtagggggcgttcgtaggtcgggacgcgtttttttcgcgcggcgttggttcgacggagttggttcgcgaggggtagcgtttgggaaagggtcgggatcggtttttcgtttttcgtttttttattttttcgtagggcgtttttacggtcgagtcgggcggggttgtggtgtattgcgattcggcgttttagttttacgttcgttttgttttttttgcgggttttcgagcggcggaaggtagagtagggcgtatcggcgtcgggtttagttcggttttttcgggagaagtgtttcgtttcggtgtcggttcgcgcgttagtttcgcgtttcggttttcggtatttatcgatttttttatagttgcgcgcgttttgtttgggggtcggagatttcggtcgtcgggttttttcgttttttcgaggcgcggtcgtcgggaggaaggtaggtagaggcgttgggcggggttcgggcgcgggaagtttcgggtttacgtttttcgcgaagcgtatttttagtttatttcggttcgtttatcgtttcgtttttcgttcgttttcgcgttcgtttttagttttcgtttttttttagtcgtttttttcgttttttatttttttgtaggcgcggttggggcgaaagtttgcgagttgagcgggcgtaaggtttttcgcgttttttttaagaatcggtttagttcggttcgcgtttttagagcgtacggtattcgcgtggcgggagggcgcgatttttttcggtttcgggcgggacggggacggcggcgggataatttgggaaatttttttggggcggacggtagggatttcgggtatcggtggaggaggatgtaggagggcggttgttggttttgggtgttttcgattttttaggtttcgttcgtttaggttatggggttttagcgttttcggcgtcgttcgaggggcgacgtttttgtttagtcgagtcgggtagcgttgtcgtttacggtgcgtattgggcgggtagcgttttttttgtttatttttcgtttcgttatggattattaggatttttatttcgtgtaggttatagcggttatagcggcggttattattttttttattttttttattattttcggtaacgttttggttattttggttgtgttgattagtcgttcgttgcgcgttttttagaatttgtttttggtgtcgttggtcgtcgtcgatattttggtggttacgtttattatttttttttcgttggttaacgagttgttgggttattggtattttcggcgtacgtggtgcgaggtgtatttggcgttcgacgtgtttttttgtatttcgtttatcgtgtatttgtgcgttattagtttggatcgttattgggtcgtgagtcgcgcgttggagtataattttaagcgtatttcgcgtcgtattaagtgtattatttttattgtgtggtttatcgtcgtcgttatttcgttgtcgttttttatttataagggcgattagggtttttagtcgcgcgggcgtttttagtgtaagtttaattaggaggtttggtatattttggtttttagtatcggatttttttttgttttttgttttattatgatttttgtttatttgcgtatttatttgatcgttaaacgtagtaatcgtagaggttttagggttaagggggggtttgggtagggtgagtttaagtagtttcgattcgattatggtggggttttggttttagttaaattgttagttttggtttttgtggtttttgttagagaggttaacggatattcgaagtttattggggagaaggaggagggggagatttttgaagatattgggattcgggttttgttatttagttgggttgttttttttaatttaggttagggttagaaggagggtgtttgtggggtatttttagaggatgaagttgaagaggaggaggaggaggaggaagattgtgaattttaggtagtgttagtgttttcggttttagtttgtagtttttcgttgtagtagttatagggttttcggggtgttggttattgttatttatattatttttaattaggattttcgtcgtgtttttcggaggattttgtgtcgttcgtggatttagacggtntggtgagttcgtttgcgttgtttttgtggggttggtgcggtggcgtcggggttattttgttttttgttttgttgtgtgtggttgttttttttgggttttttgttttttgtttagattttgtaggttttattttaggaattttttgggaggggtgggtaggggggttgttagtaagggttttagtgaagtttttttttgtcggtttagttgtgggggattttttttttattttttttttgagtataggtcgatggaggtggtttaaattttttggaatatagttaagattaggagaagagagagtattttttttttagagttttatgttttttagattaatgtttgggttttttttttttgaggattttgtgtttttggtaggttatttgtttgtggtgttttcgttttttttttattttttttttatttataaagagtacggagttagttttttattttttttagtggggtttgttgttgagggggaggaagaaacgaagattgattatttacgttaggtattcgcggtttttggtaggcgttgggatgggggtttatggggtggtatcgtttttgggtttttttttttttttttgtttgttttcggatttgtggtttttttgaaagttagaataatggatcggtttttttatttagtattttttcggtaggtgggtggttacgtggatgtttcgttggggcggttttggaggtttggtttttgtttcgacgggagattttcgattattggtatttattttttgtaaaaatcggggcgataatagtttattgtttatttgttgtagggagatgaaaggtt

SEQ ID NO: 48 - DNA, 6904 bp, Artificial Sequence
  chemically treated genomic DNA (Homo sapiens)
  unsure 821: n is a or g or c or t
agttttttatttttttgtagtaagtaggtagtgagttattgtcgtttcgatttttgtagggggtgaatgttagtgatcggggatttttcgtcgaggtagagattaggtttttaagatcgttttagcgaggtatttacgtggttatttatttatcggaggggtgttgggtaaggaagtcgatttattgttttggtttttaaaggaattatagattcgaaaataggtaaagggggaaaggagggtttagagacgatgttattttataagtttttattttagcgtttgttagggatcgcgagtgtttagcgtgggtgattagttttcgttttttttttttttttagtagtaggttttattgggaaaagtggaaggttggtttcgtgttttttgtgggtgggggggagatgaaaaagaaacgaaaatattataagtaagtgatttgttaggaatataaggtttttaagaaagggaagtttagatattggtttggagagtatggggttttgggaagaaagtgttttttttttttttggttttggttatgttttagaggatttgaattatttttatcggtttgtgtttagggagagggtggagaaggggttttttatagttaagtcggtaaggggaagttttattgggatttttgttagtagtttttttgtttattttttttaaggggtttttaagatgaggtttataggatttgggtagggagtagaaagtttaggggaggtagttatatatagtagggtaagaagtagggtgatttcggcgttatcgtattaattttataggggtagcgtaggcgggtttattangtcgtttgggtttacgggcggtataggatttttcggaaggtacggcggaagttttggttgaagatggtgtagataatagtggttagtatttcgggagttttgtggttgttgtagcggggggttgtaagttgaggtcggagatattggtattgtttggggtttataattttttttttttttttttttttttttagttttattttttggagatgttttataaatattttttttttggttttggtttgagttgggaagggtagtttaattgggtggtaaggttcgggttttagtatttttaggggttttttttttttttttttttttagtggatttcgagtgttcgttgatttttttggtagaagttatagaggttagggttggtagtttggttgaggttaaagttttattatggtcgggtcggggttgtttggatttattttgtttaggtttttttttggttttgggatttttgcggttgttgcgtttggcgattaggtagatgcgtaggtagataaggattatgatgaggtaaggagtaaagaaagattcgatgttggaggttaggatgtattaggttttttggttgagtttgtattgggggcgttcgcgcggttgggggttttggtcgtttttgtagatgaggggcggtagcgagatgacggcggcgatgagttatatagtgaggatgatgtatttgatgcggcgcggggtgcgtttggagttgtattttagcgcgcggtttacggtttagtagcggtttaggttgatggcgtataggtgtacgatggacgaggtgtagaagagtacgtcgagcgttaggtatatttcgtattacgtgcgtcggaagtattagtagtttagtagttcgttggttagcgagaaagggatgatgagcgtggttattaggatgtcggcggcggttagcgatattaggaataggttttgaggggcgcgtagcgagcggttggttaatatagttaggatgattagagcgttgtcgaagatggtaaagagaatgaggaaggtgatggtcgtcgttatggtcgttgtggtttgtacggagtaggggttttggtggtttatgacggggcgggaggtgggtagagggagcgttgttcgtttagtgcgtatcgtggacgatagcgttgttcggttcggttagataagagcgtcgtttttcgggcggcgtcgagggcgttggagttttatggtttggacgagcggggtttaggaggtcgggaatatttaggattagtagtcgtttttttatatttttttttatcggtgttcggggtttttgtcgttcgttttagagaagttttttaagttgtttcgtcgtcgttttcgtttcgttcgggatcggagaaagtcgcgttttttcgttacgcggatgtcgtacgttttgggggcgcgggtcgggttgggtcggtttttaaaggaggcgcggaggattttgcgttcgtttagttcgtaggttttcgttttagtcgcgtttgtaggggagtggggagcggggagagcggttggaggaaggcggagattggaggcgggcgcgggagcgggcgggaggcggggcggtgggcggatcgaggtgggttgaaggtgcgtttcgcgggaggcgtgagttcgggatttttcgcgttcggatttcgtttagcgtttttatttgtttttttttcggcggtcgcgtttcgggagagcggaggggttcggcggtcggggttttcggtttttaggtaggacgcgcgtagttgtggaggggtcggtgggtgtcgggagtcgggacgcggagttagcgcgcgggtcggtatcgggacgggatatttttttcgggggaatcgggttgggttcggcgtcggtgcgttttgttttgtttttcgtcgttcgggagttcgtagggagggtagggcgggcgtggggttggggcgtcgggtcgtaatatattataatttcgttcggttcggtcgtggagacgttttgcggagaggtgggggagcggggagcggggagtcggtttcgatttttttttaggcgttgtttttcgcggattagtttcgtcgggttagcgtcgcgcgaggagggcgcgtttcggtttgcgagcgttttttgttgtcgttcgcgggtttagttcgttagcgttattttcgggtttcggagttagcgttcgtagttgggtgttaggatttcggttttttgtgttttcgtagttgttttagttttttttattaagggtaaaggaggtaatagggaaattggtttggattcgaattatagtattaattgcgatttagttaagggtttgtacggggtatagggcgagttgtcgttttttgattaatgcgaaggggaggttttttttttgtcgtgggggagtaaagggtggggattttgttatatagtttcgagaaaaagtaggttttaggggtagtcgtgaagagaggagcgttttttcgtttttgtagtgatttcgggggaaggggttgattttttttttttgttgcggttttgttttatatatatattgaagtttttttgggggtgatagtggaaagagggttggggtaaaaagaaattttagattaaggttttttattcgtttttaaagcgttatgagtaattgtttttttttagggttttaatttattttttttgttatatcgttattagtattagtttgggtagttttgagggtatgttttttcggttttggagtttttaatgttataagtttcgtttcgagttaggttttttatttatagtttacgattttgtaaggtattttttgtataaataagtattaatttatttttgatagtggggtttttttaggtttcgtttaatttgttggatttttttttttttttgttttttttatgggagtagagtacgtggttttttagtgtttacggataatgtttagcgtttttttaggtttaggtgggaggtgtttcgttttaggtatttagattagtatttttagttacgggggtgtgttgggagtaggtgtttttttgatttttttatttttgttattttgttagattttttagtttttggtgaggtgtaagtgtttatagtttatggggtggatgttgttagggttgggttcggatagggtaattagttttttttttatttttaattttaggttttagtttaaaatcgattattttgttagatatagttttttggatgtgttttttttattttttgggttgggtagggtttgggcgtcgtttgggtatatataattagtgatggagagatgttagtagttttttttttgaggaaggatagagggtggttatgagagtttgggagtagttatttaggtaggtgtttgtttatttaggggtttttaaggtttttatagtttgggtttgttagaggtttatatgggtatcgggaggagtcgtttttttattgtttttaattatatttgggttgggggttagtgagtagttttttagattttgtagttagtattagtttttgttttatgatttatttttttttaagggatgttgtaggagttgagattgggttgttcgtgtgttttttttattttgtaagtttttattgaggacgtttatttgggtttttttagaagtgataattttgggtttattgagtgttaagttttgttaggtattttttattgggttagttaggtattaggttaggtggggatagttagggatagagtttatagttggtagatttgggagatgtgtgtttttcgggtagtaggagttgttttggtatttatatcgttgttttaggttgttatcgtttattgtagttgtttttttttggttttattttaggatggataagtgtagcgtgggtgcgttagttttttacggttacgtaggttataatataatttagtttttgtttttttcggcggtttattattttttttcgtatatatatatttttaggttttgtttgttttaattagttttatgaggttgttaggtgtaggaattggagtttattagtatagtaaggttttttttagttttttttaaattagatttgattttttattgttattttgttttataggaacgggtatagtttagttttagattagtaatagttagtagtaggagtagtcggagtttttttagatatatagtaggggagtgggtagtagggtataatttggattttagttttttatttttgtttcgttaggttagtgttggattttgaatgtgttttgggtttttattttttagattttttttggggttgtttgttttgatagagatgttttattatttttttttttgtgtttggtgggtttttatttatattttaaggtttatttattagttattaggtttttaggtagagggaggatttttattttttaggtttttcgacgttaggcggtattatttttatatttagtatattgtattaagatgttttttgatgggtttgttgtattatttttgtttattagagtggatattttttttttgtttttagtatttggtataaggttattggtcgtgagggatagtggtagtaggtaatagtgtatttatatatatgagtattttaagatagatagtttaaatgagggtgttttggagggatgtttttgggaagaggggttatggggaaaggatttagttatggaagcgatttattttttttaaagaagggtaagattgttgttttattgttggttgtgagattttagttggaagttatggagatatttttttaggtttgagaggtgagatggtgttattagattttttgggttggggttttagtagtttataacggtgtttttttttttttaagggtttattgggatagatttttattaggttatatattttatttttttttagatgtatttcgttttttattagttttttagtttttgggatttttaattttagattattttgtatgttttaatttttttattttttagatttttgggtcgtgttttttataatagaagttagtcgttttttttgtataaagattttgataaaattttagttttggttaaatttaaattatttatttattgtttgtttttgattaagtagttgtttttttcggagtaaaatattttttgtatcgattggttttattttaaatttatgattataaatttttaaatttttttagtatgtttatttttttatttgttaaaatcggtatttttttttttttttttaattttttagttattttttcgttttattatgttgtgattttgtttggtatttagggggaaacggaagtttaggtaggaatttattttcgtcgtttatttgtatttggttttaaattttttttgttgattgaagggtaagtttttaatttatgttttagagtttaattttttttattttattttagggttttttcgttttagttattttttttttatggttattgtttttattttataaagttagttttattttttagaattgttttttaagttttattatttttttgttgttttttatagttatttttttttcgtgtttgtatttaggtattgtggttgattttttatattttttttttaattttcggtaggttatttttagattttttatcgagggttttttgtgggttatgttttattttatattattaagtattaggtttattttgtttttttttttagtagtatttggtatagtagttttttttttggaatatttatagggtttgtgatcgttttgaaagttatttttttgtagttttttttttttttaaatttttaagttagaggtttttgttaagagtgattttttttttttaaaggacgttcggtaatgtttggaatatagggagggggtcgttattggtatttgtgggtagaagttaaagatgttgttaaatgttttgtaaggtttagggtcgtttttataataaagaattattaggtataaaatgttgtaacgttgaaattaagaaatgttgttttaaatgtagtaatttagtttagttcggggattttttttttttttttatacgtgtggtttttttttagattcgatagtatttttttaggtattttttgttttgtt

SEQ ID NO: 49 - DNA, 7728 bp, Artificial Sequence
  chemically treated genomic DNA (Homo sapiens)
tattatagtttgattttaaatagttttaggttattattagttttaaggtatattttgttaatagatttcgtatattttttggggttttattaagaaatttttttatatattttttggcgtattttttagtagttgtttagttaggttatttatttttatttttaatttattttttagtaaagttaatttaagaatgtaaatgtttttgttaggtttatggtttgtaattttggatgggttagatgtttatttattattgttttgtagattaatttgatatataatttgaaattatatttaagttattagtaatttttttggggtagaaatggttggatatatagattcggtattataaataatggttaaagaaaaagattttttatttgggttatttatgaagaataggtagtatttttttttttttttttttttttttttttttttttttttttttttttttgagttagggttttattttgttatttaggttggagtgtagtggtataattatattttattgtagttttaatttttgggtttaagtgatttttttgatttagttttttaaagtgttgggattataggtaggagttattgagtttggttaggtagtattttttatggacgtggatttgtatgttttttttggaaaattttttatttatgtttcgttttatttattacgaataggtatgatatatatttattttatgagtttattttgtttttgtaaagtattttgaaatgtttatgtgaaaatgttgaataggtggtaagaatatggattattgttgtaaattataagtaagagtgaagattgtaattattaaaatatttaattatgttttaagtgtataaaaatgagaatattttaataaattaaatattatatatttatgaattaaagttaaatgtttattaatattaagtaaatattagtaaatatgggagatataaaaatgtatgagataattttggtttttagtgagtttataatttataagagaagaaaaggggaaaatataaaaattaaataataatataagaagtattaaaaggtaatttattgtaaattgttatttgaaatgaaattggtagagttattattataggttagaggaaggagagattatttttagaagtagtgggtagagaagataaagagtttagttatatttttaaggttgaattcgttgggaagtaggaggaggttttggtggagggaatttagtgagaaagtatagatgtataaaaggaaggagtatggatttttaaaaggaaaaagaatatagaaatgtaagttatggtgataaggagagttttaatatgaaatagggttggaaaggttatttagaattggatcggggagaattgtgaatgttaaattgaagaggtaaggttgttgaatagaaaagtattttggttaaagtagtattttggaaatatttttttggttatgatatgttagattaaatggagtagggaggattagagatagggagattaaatagaatttatggtaagtttcggtgtggggtgaaggtggggggatgggaaaggaagaagttgagataggaattttgtggaagaagtgtacgattttttaagtgtgttgattagtttttattgttggagttttttgttattttttaaagtattgtgaaatatatgggtttttagaattgattttttttaatagttgttaagtgaagaatgaagaaatgaaggagttttatttaatttataatattcgatatttgtaaaagttgatacgttgaattttttttttttgattttgtatttttatttaagaataaaaagtgttaggttaaaaaaaaagttaaaaaaaaaaaatattaattataaaatgtaggaattaaaggagttttgagaatattttatttttattagataattaattttagttgaatatgtattattttaaatttttttgttagtaaaattgaaggaaattttttagaatttttgagatttttgtattggtatttttgttagaataattttttggtttcgagggtttataatttaatgtattatatagaaattcggagaaatttgatgtatttttgaatgagtagagaaaaaaagttttaggaaagttttttaataattttaatgttacgatgtgtttatatatataatgatgatacggtaaagttattggtaatttggtttttgttttgaatttttacgattaagttttggttttatcgtatatagaaaagtaatgttttttatttttcgggggtatttaaggttgatatattttatttcggtaatattatttgatagaaagatggtaaggaaaagttttttttttatattttttatgttttattttgtagtttagtatttagaattttttttttgggtagcgttaattttaattttttttaattttttggttattttgagattgttttttgtgggtttagaaggaagttaggaggtcggggatagtggtttatgtttttaattttagtattttgggaggttaaggtgggtggattatttgaggttaggagttcgagattagtttgattaatatggtaaaacgttatttttattaaaaatataaaattagtcgtgtgtggcggtatacgtttgtaattttagttatttgataggttgaggtaggagaattatttgaattcgggaggtagaggttgtagtgggttaagattacgttattgaattttagtttgggtaataaaagtgaaattttgttttaaaaaaataaaaagaaagaagttaggagttttaggtttttagtgatttggataatttggggtgtagtttttttttttttttttttaacgttttttgttttttggttatttttttttaatttttttaagttggaaaattagttgataaattatgggtagggggtgaataaataaattattttttagttttaatatattgatgttgaggtttgggtttaaagtaaatttatatgtttgtatttatgtaagagaaagtggttaaaattgtttgattttatataaatttgaaaaatattattttttgtttttgatttggatagttgtggaagtcggtttttttttgtaaggtaaggatatgagtttggttatattgatgattattaacgaatatgatgttcgttacgggcgttgtttttattttaatgttagaaggatttgtgagtattatataatatttttatgtatttttatataaataattagaagttgtttattttttaaggatttaattagagatttttttaatttttttatttttttttttattttaggtttgagttgaggatattataggagttaaattagagaaggggtttgtagttttgttatattgtatatttatggtttttttgtttttttatttttagtataattttttttgttaggttaataatttattaattttaaagtaatttatttgttaatttaaaaaaaaaaaaaaaaaaaattatagatataattttaaatgtttttggattttaattttttggagtatttatatgtttttttgttttatttttttaaaattaattttagagttttgagaatttgggaatttgggtaaaggagaaaataagtacgtagattaaggaatttgaaatcgtagtttattacgttagtataaattgatagtatttttttgtttgtattgatttagtttaaattataaaattatatgagtaataaaatataaaatataggtgttattattgaaaagtttaaaatgtaattaaacgcgttttttttttttcgcggtggtatcgtttattttgtattttaacgtttttgtttttttaagtttttttttttatattatgagtatatatttttgtattatgtttatacgtttattagttaggattgaggagtgtgtacgattttaaagggtttttagcgttagttgttagatgtataaattttcgttttttttttatatttattgtattcgaggtttaatagaggatttttgtaagaatagcgtttagagagtatttttgatagatgcgcgtttggttttagtaattcgttttgttgggaagttttttttaattattaatatttatttttaattttttaagttgttacgacgtatgttggttgggtttcgttttgacgggggaagggttttatatatattttgttaggttgttttatattataattaagttcgtagggtaaatttttttaagtttggcggataagttgttttaggcgttttggcgttttttgaatattaaggtttttttttcgtttaagggagttagcgttttgtttcgtagagaatttcggaattgtaggtcgaggggatgcggggggagcgggggcgtaggagggagtcgagtgttggaggtaaacggggcgtaggagcgggtgcgggaggtaaacggggcgtaggagcgggtgcgggaggtaaacggggcgtaggagtgggtgcgggagcgagtgggggttgagggaggggacggggtttcggggggagttaggcgcggaagggggcgcgggggaatagggattaggaattagcgggcgtaggaaggggtgcgttcgtaggaattcgcgggcgtacgggaggtattagttacgcgattagttcgggatttttaggagtcgtttaattgttaacgggaggggggtgcggggagttggaggtgggggtgtagattagacgggggcgtgtttttgttcggattggttgtaggagtttgacgcgaggtttcgggggttggtttggggagtgggagcggggtggggtgggtgttgggtgtcggagttgcgggttcggcgcgtttagaaatatgttgaagtttcggcggattttttagtagcggtagcggttttagtagtagcggcggcggcggcggcggcggtagcggtagcgatagcgttcggtttttgcgggaaaggcgttcggcgtttatgttttcggtttcgcgtcgcggttgttttgattcggtcgcgatttttttttgcgtattacgtcgttcgggtttttggggtgttttttaattacggtttagttttgttatatttttcgttttcggttttcgtagttcggtatgggcgcgggggtgttcgttttgggcgttttcgagttcggtaatttgtcgtcggtcgtatcgtttttcgacggcgcggttatcgcggcgcggttgttggtgttcgcgtcgtcgttcgtttcgttgttgtttttcgttagcgaaagtttcgagtcgttgttttagtagtggatagcgggtatgggtttgttgatggcgtttatcgtgttgtttatcgtggcgggtaatgtgttggtgatcgtggttatcgttaagacgtcgcggttgtagacgtttattaatttttttattatgtttttggttagcgtcgatttggttatggggttgttggtggtgtcgttcggggttattatcgtggtgtggggtcgttgggagtacggtttttttttttgcgagttgtggattttagtggacgtgttgtgcgtgacggttagtatcgagattttgtgtgttattgttttggatcgttatttcgttattatttcgttttttcgttattagagtttgttgacgcgcgcgcgggcgcggggtttcgtgtgtatcgtgtgggttatttcggttttggtgttttttttgtttatttttatgtattggtggcgggcggagagcgacgaggcgcgtcgttgttataacgattttaagtgttgcgatttcgttattaatcgggtttacgttatcgtttcgttcgtagtttttttttacgtgtttttgtgtattatggttttcgtgtatttgcgggtgtttcgcgaggtttaaaagtaggtgaagaagatcgatagttgcgagcgtcgttttttcggcgggttagcgcggtcgatttcgttttcgttttcgttcgttttcgcgttcgcgtcgtcgttcggattttcgcgtttcgtcgtcgtcgtcgttatcgtttcgttggttaacgggcgtgcgggtaagcggcgggttttcgcgtttcgtggttttgagcgagtagaaggcgtttaggacgttgggtattattatgggcgtttttacgttttgcgggcggtttttttttttgattaacgtggtgaaggttttttatcgcgatttggtgttcgatcgttttttcgttttttttaattggttgggttacgttaattcggtttttaattttattatttattgtcgtagttttcgattttcgtaaggttttttagggattgttttgttgcgcgcgtagggttgttcgtttgcgttacgcgatttacggagatcggtcgcgcgtttcgggttgtttggttcggttcggattttcgttatcgttcggggtcgtttcggacgacgacgacgacgatgttgttggggttacgtcgttcgcgcgtttgttggagttttgggtcggttgtaacggcggggcggcggcggatagcgaatcgagtttggacgagtcgtgtcgtttcggtttcgtttcggaatttaaggtgtagggttcggcgcggggcgcggatttcgggtacggttttttaggggaacgaggagatttgtgtttaattaagatcgatagtaggtgaattcgaagtttataattttcgtttgaattattcgaggtaaagagaaaagttacggatcgttgtataaaaaggaaagtttgggaagggatgggagagtggtttgttgatgttttttgttgtttttttttttttttttttttttttttttttttttttttttttttttttttttttgtttgtggttcggtttttttttgtgtgtgcgtgtgatgtatttttagattttttttttttattaggtggtttttgatattttttgagaggatcggagtggaagatgggtgggttaggggaagggagaagtattaggaggggattaaaatcgattatcgtggtttttatttttttttcgggaataggaatatattattagttagagagaggagaatgatagtttgttaagatatatttttttttgttttttagagaaattttattttaatttttaagtaatgatttttgttgttatgaaagtaaagagaaaggatggaggtaaaataaaaaaaaattacgttttaagaaatgttaagttttttttggaataagttttattttgttttttttgtgtagggtaaattcgttgtttttcgcgcgtttgggtggttaggttgagggatttttattttatattgtgtatttgtatagtagatagaaagatttgtttatattaaatagtttatttatgtattaatattagttggaaggattaggcgtagagtttttttttgtgatatgtgattttgttaattgaagataggatattaaaagagagcgagagagagaaatagtttagattattgtatatgtggataaaaataaaaataaaaaaaaggagtggtttaaaatgttatttttgtatagtgttaggaattataaaatttatagaagatgttatttgtataaaaagaaattaaatattttttaaagggagaggggttgggtagattttaaataaaatttaaattttatttttgttgtttagtatgttattgagttaatgatttattgggaaaatatttttttatatttttttattatggtattgtaattgtatttatattataaatataattattttaaggattttttatttttttttatgtttaagtgtttacgtga

SEQ ID NO: 50 - DNA, 7728 bp, Artificial Sequence
  chemically treated genomic DNA (Homo sapiens)
ttacgtgggtatttggatataaaaaaaaataaaaaatttttaagataattatatttataatatggatatagttatagtattatgataaaggagtataaaaaggtatttttttaatgaattattagtttaataatatattagataatagaagtagagtttgaattttatttaagatttgtttagtttttttttttttaaaaaatatttaatttttttttgtgtaagtaatattttttgtggattttgtaatttttaatattgtgtaaaaatggtattttgaattattttttttttttgtttttgtttttatttatatgtgtagtaatttgaattgtttttttttttcgtttttttttaatgttttgtttttaattgatagagttatatgttatagagagaggttttgcgtttggtttttttaattaatattgatatataaataagttgtttaatataaataagtttttttatttgttgtgtaaatgtatagtgtgaggtagaaattttttagtttgattatttaggcgcgcgggggatagcgggtttgttttatataaggaaagtaaggtggggtttgttttaagaagagtttaatattttttgaaacgtgatttttttttattttgtttttattttttttttttgtttttataatagtagaaattattatttagaaattaaaatgaaatttttttggaaagtaaaaggaaatatgttttgataaattgttatttttttttttttggttggtagtgtgtttttgttttcgggaaagggatgggagttacgatgatcgattttaatttttttttaatgtttttttttttttttaatttatttattttttatttcggtttttttagagagtgttaaaaattatttggtgggggaaaaaaatttaaagatgtattatacgtatatataaaagaaggtcggattataaatagaaaaaaaaaaaaaaaaaaaaaagaagaagaaagaaaagaaaagaaaaaaaaaataataaggaatattagtaagttatttttttatttttttttaaatttttttttttgtgtaacggttcgtggtttttttttttgtttcggatgatttagacgaggattgtgggtttcgagtttatttgttatcggttttaattaaatataaattttttcgtttttttgggaagtcgtgttcggagttcgcgtttcgcgtcgggttttatattttggatttcgaggcgaagtcggggcggtacggttcgtttaggttcgattcgttgttcgtcgtcgtttcgtcgttgtagtcggtttagggttttagtaggcgcgcgggcggcgtggttttaataatatcgtcgtcgtcgtcgttcgaggcggtttcgggcgatggcgggggttcgggtcgggttagatagttcgaggcgcgcggtcggttttcgtgggtcgcgtggcgtaggcgggtagttttgcgcgcgtagtagagtagtttttggaaggttttgcggaagtcgggggttgcggtagtagatgatggggttgaaggtcgagttggcgtagtttagttagttgaagaagacgaagaggcggtcgggtattagatcgcggtggaaggtttttattacgttggttaggaagaagggtcgttcgtagagcgtgaagacgtttatgatgatgtttagcgttttgagcgttttttgttcgtttagggttacgaggcgcgagggttcgtcgtttattcgtacgttcgttggttagcggggcggtggcggcggcggcggcggggcgcgggggttcgggcggcggcgcgggcgcggggacgggcgagggcgagggcgaggtcggtcgcgttggttcgtcgaggaaacggcgttcgtagttgtcgattttttttatttgtttttgggtttcgcggaatattcgtaggtatacgaaggttatgatgtataggggtacgtagaaggagattacggacgaggcgatggcgtaggttcggttggtgacgaagtcgtagtatttggggtcgttgtagtagcggcgcgtttcgtcgtttttcgttcgttattagtgtatgaggatgggtaggaaggatattagggtcgagatggtttatacggtgtatacgaggtttcgcgttcgcgcgcgcgttagtaggttttggtagcggaagggcgaggtgatggcgaggtagcggtttagggtaatgatatatagggtttcgatgttggtcgttacgtatagtacgtttattgaggtttatagttcgtagaagaaggagtcgtatttttagcggttttatattacgatggtggtttcgaacggtattattagtagttttatgattaggtcggcgttggttagggatatgatgaagaggttggtgagcgtttgtagtcgcggcgttttggcgatggttacgattattagtatattgttcgttacgatgagtagtacgatgagcgttattagtagatttatgttcgttgtttattgttgagatagcggttcggggttttcgttggcgggaggtagtaacgaggcgggcggcgacgcgggtattagtagtcgcgtcgcggtggtcgcgtcgtcggggagcggtgcggtcgacgataggttatcgggttcggaggcgtttaggacgagtattttcgcgtttatgtcgagttgcggaggtcgggggcggggggtgtggtagggttgggtcgtggttggggaatattttagaagttcgggcggcgtggtgcgtagagggaggtcgcggtcgggttagggtagtcgcggcgcggggtcggaggtatgggcgtcgggcgtttttttcgtaggagtcgagcgttgtcgttgtcgttgtcgtcgtcgtcgtcgtcgtcgttgttgttggagtcgttgtcgttgttggaagattcgtcgggattttagtatgtttttgagcgcgtcgggttcgtagtttcggtatttagtatttattttatttcgtttttattttttaagttaattttcggggtttcgcgttaggtttttgtagttaattcgggtaaaggtacgttttcgtttggtttgtatttttatttttaatttttcgtatttttttttcgttggtaattgagcggtttttgagagtttcgagttgatcgcgtagttagtgtttttcgtgcgttcgcgggtttttgcggacgtatttttttttgcgttcgttggtttttggtttttgttttttcgcgttttttttcgcgtttggtttttttcggggtttcgtttttttttttagtttttattcgttttcgtatttatttttgcgtttcgtttgtttttcgtattcgtttttgcgtttcgtttgtttttcgtattcgtttttgcgtttcgtttgtttttagtattcggtttttttttgcgttttcgtttttttcgtattttttcgatttgtagtttcggggttttttgcggaatagagcgttagtttttttgagcggggaggggattttggtgtttaggaagcgttagagcgtttgggatagtttgttcgttaggtttggaggagtttgttttgcgagtttggttgtgatgtggggtagtttagtagggtgtgtgtaaaatttttttttcgttaagacgggatttagttagtatgcgtcgtgatagtttgggggattggaggtgggtgttagtggttagaagaaattttttagtagagcgggttgttggagttaagcgcgtatttgttaagaatgttttttgggcgttgtttttgtaaggattttttgttgaatttcgagtgtagtagatgtggaaaggaagcgaaggtttgtgtatttaatagttaacgttgagggttttttggaatcgtatatattttttagttttagttaatgaacgtgtgagtatgatgtaaaaatgtatgtttatgatatgaaaggagaggtttagggagatagaaacgttgagatatagagtaaacgatattatcgcgagggggaaaaaacgcgtttaattatattttagattttttaatgataatatttgtattttgtgttttattatttatgtgattttataatttgagttgggttaatataaataaaaaggtattgttagtttatgttgacgtaatgaattgcgattttagattttttggtttgcgtgtttgtttttttttttgtttaagtttttagatttttaaaattttgagattagttttgaagggatgagataagaaaatatataaatattttagaggattaaaatttaaaagtatttaaagttgtatttgtggttttttttttttttttttttgagttggtaaatgaattgttttgaaattagtgagttgttaatttggtaaaaaggattatattgggggtgaggggataagaaagttatgaatatgtaatatggtaggattgtaagttttttttttaatttggtttttgtagtgtttttagtttaggtttgaaataaaaaaaaaaataaaaaaattaaaaaaatttttaattgagtttttgaggagtaaatagtttttaattgtttatgtaagggtgtatgaaaatgttatataatgtttataggtttttttagtattggaataagaatagcgttcgtaacgaatattatgttcgttgatggttattaatatgattaagtttatatttttattttgtaaggagagatcgatttttatagttgtttaggttaaaagtaaaaagtaatgttttttaagtttatataaaattaagtagttttaattatttttttttatataaatgtaaatatatgaatttgttttaggtttaaattttagtattagtatgttaaaattggggagtgatttgtttatttattttttgtttatgatttattagttgattttttaatttggggaggttgaggaggagtggttaggaaataagaggcgttagaaaggggaggaaggagattatattttaagttatttaagttattgaaagtttgagatttttggtttttttttttttatttttttgagatagagttttatttttgttgtttaggttggagtttagtggcgtgattttggtttattgtaatttttgtttttcgggtttaagtgatttttttgttttagtttgttaagtagttgggattataggcgtgtgtcgttatatacggttaattttgtatttttagtggagatggcgttttattatgttggttaggttggtttcgaatttttgattttaggtgatttatttattttggttttttaaagtgttgggattagaggtatgagttattgttttcggttttttggtttttttttggatttataaggggtagttttaaaatagttaagggattggaagaagttgaaattgacgttgtttaggaaaggagttttgagtgttgagttgtagggtgaggtatagggaatgtggggaagaggtttttttttgttatttttttgttaagtggtgttatcggaatagagtgtgttaattttaaatgttttcgaagggtggaaggtattgtttttttgtgtgcgataaggttagaatttggtcgtagaggtttagggtagaagttagattgttagtaattttgtcgtattattattatatatataaatatatcgtgatattggaattgttggaaaatttttttgaaattttttttttttgtttatttagagatatattaagttttttcgaatttttgtataatatattaaattataaattttcgaaattagaaggttattttagtaggagtattagtatagggattttaggaattttgggggattttttttaattttattgatagaagagtttggaatagtatatgtttaattagagttggttgtttaataaaaataaaatgtttttagaatttttttaatttttatattttatgattggtgttttttttttttaattttttttttagtttaatattttttatttttaggtaaggatataagattaagaagaaaaggtttaacgtattaatttttataggtatcggatattgtaagttaaataaaatttttttatttttttattttttatttggtaattgttaaagagagttagttttaaaaatttatatattttataatgttttggaaaatgatagaaagttttaataatgagggttgattagtatatttgagaggtcgtgtattttttttatagagtttttattttaattttttttttttttatttttttatttttattttatatcgggatttgttatgggttttatttgatttttttgtttttggttttttttgttttatttaatttggtatattataattaaaggagtatttttaaaatgttgttttgattaagatgtttttttgtttagtaattttatttttttaatttaatatttatagtttttttcggtttaattttaaatggtttttttagttttattttatattagaattttttttattattataatttgtatttttgtattttttttttttttggggatttatattttttttttttgtatatttatatttttttattgggttttttttattaaaatttttttttgttttttagcgaatttagttttggagatgtggttggattttttattttttttgtttattgtttttgaaaatgattttttttttttttgatttatagtagtgattttgttaattttattttaggtggtaatttataataggttgttttttgatattttttatgttgttatttaatttttatattttttttttttttttttttatagattgtaagtttattgagagttagaattgttttatatatttttatattttttatgtttattgatatttatttgatattaatgaatatttagttttgatttataaatatatgatatttaatttattaaaatatttttatttttatatatttgagatataattgagtgttttagtagttataatttttatttttgtttataatttatagtaataatttatatttttattatttatttaatatttttatataaatattttaaaatattttataaaagtaaggtaggtttatgagataaatgtatattatatttattcgtagtaaataaaacgagatataggtaagagattttttaaaggagatatgtaagtttacgtttataaaaaatattatttggttaggtttagtggtttttgtttgtaattttaatattttgggaggttgagttaggaggattatttgagtttaggagttgaggttgtagtgaaatgtggttgtgttattgtattttagtttgggtgatagagtgagattttaatttaaaaaaaaaaaaaaaagaaaagaaaagaaaagaaaagaaaagaaaaaagtattatttattttttataaatgatttaggtgaagagtttttttttttagttattatttatgatatcgaatttatatatttagttatttttgttttaggagagttgttgatgatttgaatgtggttttaagttgtatattaaattagtttgtagagtagtgatgaataggtatttaatttatttaaggttgtaagttatgagtttggtaaagatatttatatttttgagttgattttattagaaaatgagttaaaaataaaagtgagtagtttaattggataattgttggaagatacgttaagggatatgtgggggaattttttaataaaattttaagaagtgtacgaaatttgttagtaaaatgtgttttgaggttgataatagtttgaagttatttgaaattaagttataata

SEQ ID NO: 51 - DNA, 8011 bp, Artificial Sequence
  chemically treated genomic DNA (Homo sapiens)
taagttaagatttagtataagatttttttaagtatttagttattggtgtgagggtatgttttggtattatggaagtttatttttatttagatatttattaggtaaatttagatatgaggttttatttttgtttgataggttgggaacgataaattagtgttttaagggattgataaaatatgtaattagatgttattaattattataaaagagtttgtttttttttatattagataaaggtgcgtttagtttattaagaattttttagtttaaatgaagtattaattttttaaggttatgtgaatagtaagtagtgttattcgaatttttttgttgggaaataaaataatagtattaggtagggaaaatttgtgaggttatgagtagatttggatttttaattttttttaatattttggtttggatattttttgtttttttattttagtaattttatttgtaaatttgggggaaataaattaattgatatattaagtttttttttagtttaattttttttaaatttaaaattataaaaggaggttaggagaaaagatttttagttagttgattatattttgatatttttattagtttggtgaagtagtagggaaagagcgtgtatttattcgttaaggttggagggtaaaggtttagaattttttaattgatataagtagatttttttttttttattattattatgttttaagttttaggatatatgtgtagaacgtgtaggtttgttatataggtatatatgtgttatggtggtttgttgtatttattaatttgttatttattttaagtattttttttaatgttattttttttttaggtttttatttttaaataggttttggtgtatgatgtttttttttttgtgtttatgtgtttttattgtttaatttttatttatgagtgagaatatgaggtgtttggttttttgtttttgtgttagtttgttgagaatgatggtttttagttttatttatgtttttgtaaaagatatgaagttatttttttttatggttgtatagtattttatggtgtatatgtgttatattttttttattaagtttatttttgatgggtatttgggttggttttaagtttttgttattgtgaatagtgttgtaataaatatatatgtttatgtgtttttatagtagaatgatttataatttttagggtatatattaggtaatgggattgttgggttaaatggtattttttgttttagatttttgagggattgttatattgttttttataatgtttgaattaatttatatttttattaatagtgtaaaagtgtttttatttttttatattttttttagtatttgttgttttttgattttttgttttttttttgagacggagttttattgtgttatttcggatggagtgtagtggtataatttcggtttattgtaatttttattttttaggtttaagcgatttttttgttttagtttttagagtaggttagattataggtatgttataatttttggttaatttttgtatttttattagagacgaagttttattatgttggttaggttgttttcgaagttttgattttaggtgatttatttattttagttttttaaagtgttaggattataggtatgagttattgcgttcggtttgttttttgatgtgttaatgatcgttattgtatttggtgtgagatggtattttattgtggttttgatttgtattttattaataattagtgttgatgattttttttttatatgtttgttggttgtattaatgtttttttttgagaagtgtttgtttatattttttgtttatttttttatggggttgtttgtttttttttgtaaatttgtttaagttttttgtagattttggatattagttttttgttagatggatagattgtaaaatttttttttttttttgtaggttgtttgtttattttgatgatagtttattttgttgtgtagaaattttttagtttaattagattttatttgttaattttggtttttgttgttattgtttttgatgttttagttatgaagtttttgtttatgtttatgttttggatgttattgtttagatttttttttagggtttttatggttttaggttttacgtttaagtttttaatttattttgagttaatttttgtataaggtgtaaggaaggggtttagttttagttttttgtatatggttagttagttttttttgatttagtatttgtgggttttaaaaaaggagttttttaaaatatttagttaaatttttaagtgatttacgtgtatatttaaatatatgattagttaatatttgttttaaaggggttttttttgttttttttttattataggaaggttaaataatatgtttatttatgttatagttttataaataggaaggaggttttaaatggtttagttttataatttgagtagatgtatatttaaagaaacgttgttgtataataaatattgtttttttttaaaatgtattatgttatagttaattttggaaaatataaatatgaggtgagtgtattttgaaaattatgtgaatataatagatttttaatttatatttgtggattttatgggaaatatttgttttttaaggtatttgttttgtaaaaagttagtttttgttatgaaggatgttaaaggggatatgtaggttaaattttgtttttgagttttgtttttagagtaaatatttaatttatttttgttttaaagtattttattgttttagtagagaagattaataatatattttaaattattaagtaatttatgtaaatttcgtttataaattatatttgtgtgatatttatatgagtaaaagtatttttatattttttattatattatttaatttttgtttattttaatggaagtgattttatgtttttttagagataatggaaattaggtatttcgtgattttttttaaaaaaaaaaaaaatgaattagaaagttttaagtttggtgaatttggaatttgggtattttagttttagttgtagttttttttttttatttattatttttgtttgtatgtaattatgtaatatattgaaaagattaaaagatgggttttggatttaggtagatttgggttaaatttagattttggtattgtttagttattgtttttgggtaagttatttttttttttgaattttatttgtgaattaagttaaaaatagtttttatttttatgggattgtgggaaggattaaatagaataatgtatgaaaagtaaatagtagaatggtttataaatgttaattattgttatgttattatgtaatttataaagtacgtttagttatattttatgaaatatttttagttttttaaagatattattaatatatgggaaattaaattttgaaaattaattttattttagtagtaaagttatatgttagatggaaaggatagtattttatgaataaagattttatttttgagatttggttttattttttttttttttttaagggagaattattttgtgttttttgttttgttttgttttgagatggagttttgttttgttatttaggttggagcgtagtgacgtgatttcggtttattgtaatttttatttttcgggtttaagagatttttttgttttagtttttcgagtagttgggattataggtacgtgttattatatttggttaatttttgtatttttagtagagataagagttatattatattggttaggattttttgttttttatagttttaaaatgtttttaatgttaagatatttttaatattttgaattatatgaatttgttattttggtaagttatagacgttagatggtggtaattttatatggtataattcgaaagattaataaattatttagtagatgaaaggattttttttagttttattgggtttattgaagaaattgtttgaatttttattgtatttttagtttaatagataatgagtgagtgatgttatatttttaagagttaaaaataaaataataaaaaaattaaaataaaagtatataattttttttttttgttttaaaatatatatttgtatattttcgttttagataaaatttaaagggtaaaattgtttttatgtttgtaaatttttaaggagggtatttaaagtatttgatagcgagtgtgttgaggaaattagtagttgttgaagttattttttgtgtttttgttaaatgtttgaaagggaatatattgggttatcgggtgtatgttgggaggggagtattattagtgttcgggtgaggtaagttcggagtatttagatggagatattcgtgtttgtgtcgttttggatgtttttaagttagcgtgtgtttattttttgtgtgtgttattatgtttttgtgtttttgggtgtttttgtgtttgtttttggtcgcgtttttgtgttggataggggtgattttgtgtcggatggtttttgtgtgagagcgcgcgcgagtgtgtatgtcggtgagttgggagggtgtgttttagtgtttatggttgtggttcggtataagtttgagtatgtttgttagggtgtatttgtgtttgtatgtgcgtgtttcggtgggtattttcgttttttttcgaatgtggggtagtgtcggtgtgttgttttttgttttgagattttaagtcgcgtaggcgtttagggtaggtaggtagcggttatagaagagttaaaagttttcgggttggttggtaaggatattatttttagttttagttttttggggttagttagggtagtcgggaagtagtggtggttcgttttttagggagtagttgggtttcgttcgggttagttttaggagaaggagggcgaggggaggggagggaaaggggaggagtgtttcgttttttcgcggttgtcggcgtgttattggtcgaaagttttcgtacgttacggcgagggtagtttttttaaagttttgtgtatataacgggtagaacgtattgcgaagcggtttttttagagtacgggttggaattggtaggtatcgcgagtttttagtattcgataagttgagtgtgtaggacgagtttttattatatttatattatagtcgttgaatgaggtttttaggcgttcgttcgcggttcgtagagtttcgtcgtgggttcgttcgttgaggcgtttttagttagtgcgtttatttgttagattgcgcgttatggggtaattcgggaacggtagcgtttttttgttggtatttaatggaagttatgcgtcggattacgacgttacgtaggaaagggacgaggtgtgggtggtgggtatgggtatcgttatgttttttatcgttttggttatcgtgtttggtaatgtgttggttattatagttattgttaagttcgagcgtttgtagacggttattaattattttattattttattggtttgtgttgatttggttatgggtttggtagtggtgttttttggggtcgtttatatttttatgaaaatgtggatttttggtaatttttggtgcgagttttggatttttattgatgtgttgtgcgttacggttagtattgagattttgtgcgtgatcgtagtggatcgttattttgttattattttattttttaagtattagagtttgttgattaagaataaggttcgggtgattattttgatggtgtggattgtgttaggttttattttttttttgtttatttagatgtattggtatcgggttatttattaggaagttattaattgttatgttaatgagatttgttgtgatttttttacgaattaagtttatgttattgttttttttatcgtgtttttttacgtttttttggtgattatggttttcgtttattttagggttttttaggaggttaaaaggtagttttagaagattgataaatttgagggtcgtttttatgtttagaattttagttaggtggagtaggatgggcggacggggtatggatttcgtagattttttaagttttgtttgaaggagtataaagtttttaagacgttaggtattattatgggtatttttattttttgttggttgtttttttttatcgttaatattgtgtatgtgatttaggataattttattcgtaaggaagtttatatttttttaaattggataggttatgttaattttggttttaatttttttatttattgtcggagtttagattttaggattgttttttaggagtttttgtgtttgcgtaggttttttttgaaggtttatgggaatggttattttagtaacggtaatataggggagtagagtggatattacgtggaataggagaaagaaaataaattgttgtgtgaagattttttaggtacggaagattttgtgggttattaaggtattgtgtttagcgataatattgatttataagggaggaattgtagtataaatgatttattgttgtaaagtagtttttttatttttaaagatttttttttttaatagaatattaaatagattatttaatttgagggtaataaatttagaataaaattgtaaaattgtatagagatatgtagaaggaagggtatttttttgttttttttatttttttaagttgtaaaaagagagaaaatttatttgagtgattatttgttatttgtatagtttagtttttttttgtatggaatttgtaagtttatgtttaaagagttttagttttagaggatttgagtttgttatatttttatgatttttttatgtatttattttattatttaagtattaggggtaatatattgttgttggtaatttgtatttgaaggagatttttttttttatatttttggatttgaggattttgagtatttcggattttttagttgtgaatatggattttttttttattttttttatttgtttatacggggtattttaggtagggatttgaggagtagttttagttgttttttcgagtaaagtttaaagtttatagtaaataaattgtttgattatgtttttattgtatttgtttttttaaaattttttgattggagtgttgttgttttttttattggaaatcgtaggtaattatttgtaattattgtttatgatttaatgtagaatgatataagaatgatatgtatagattgtttaatttttttatttgtttttgagtttgttgttgtaaagttgtattttttttgatatttgtgttttaaattagttttgtttgtttttagtatagtttaattttttttatggttattgttttgtgttgttattttagaaatattgatttatagaagcggagttaaggggatatgtttttttttttttacgtgtatttattatttattttttagttttatttgttttaaaattgtttatatttttgttttggttatgtgttatagtggagttttttgtattgtattagggtttggtattttagggataaggaagatgtttttatgaggaagttatttagatatggtttcgtaattttgagggaaaatttaaaaggtattggttatggggagaaaagttggagaatatataattgatggatattttatgaattagaaatagaattttaatttttttttttttttttttttggtttttgttttttttttttattgatttttttcgatttagtgtaaattaaggttttgagttttagtattgttagtattttggattagataattttttgttatgggggttgtattattgtatgtgtagtatttttggtttttgtttattagatgttaatagtattttttgtttataataagtaaaaatgtttttagatattgtaaaagagtttttgaggtgcgaattagtttttggttgagagttattggtagaaattgtaaaaattttagtagatatatatattttttttaatgtaagcgtttgattgtgtagagttttagagagggatttttatagtttatttaggtagtaatagatttttattagtattttttttattttattatgttgttttt

SEQ ID NO: 52 - DNA, 8011 bp, Artificial Sequence
  chemically treated genomic DNA (Homo sapiens)
gaaggtagtatgatggaatggaaagagtgttggtgagggtttgttattgtttaggtgaattgtgaaaatttttttttaaggttttgtataattaagcgtttgtattagaaagaatgtatgtatttgttgagatttttatagtttttattagtgatttttaattaggggttaattcgtattttaggggtttttttgtaatgtttggaaatatttttgtttgttataagtagggggtgttattggtatttaatgaatagaggttagaggtgttatatatataatgatgtagtttttataataaagagttatttggtttaaaatgttaatagtgttaagatttagaattttggtttatattgaatcgaggagagttagtgggagaagaaaatagggattaaaggaaagaaggaaaaggggttaaaattttgtttttagtttatgaggtatttattagttatgtgttttttagtttttttttttatgattaatgttttttgaatttttttttagaattacggggttatgtttgagtagtttttttataagaatattttttttatttttaaaatgttaagttttgatgtagtataaagagttttattgtaatatatggttaagatagaaatataaatagttttgaaataagtagaattggaaggtgggtggtgggtgtacgtggagagaaaaaaatatatttttttaatttcgtttttgtgagttagtgtttttgaggtaataatatagaataataattatagggagagttgagttatattaagagtaggtagaattgatttggggtataagtgttaggagagatgtagttttgtagtagtagatttaaaggtaaatgaaagggttaagtaatttgtgtatgttatttttgtattattttatattaagttatgggtagtaattataagtagttatttgcggtttttagtgggggaggtaatagtattttagttaaggggttttggagaaataggtgtaatgaaggtatggttaaataatttatttattgtaaattttagattttgttcgggaaaataattgaagttgttttttaaatttttgtttaaaatatttcgtgtgagtaaataagaggagtgggggaagagtttatgtttatagttgaaaggttcgagatatttaaaatttttaagtttaagggtgtaggaaggaaaattttttttagatataaattattagtagtaatatattatttttaatatttgaatagtgaggtagatatatggaaaagttatgaaaatatagtagatttaggttttttaggattaaagttttttagatataaatttataaattttatgtaaagaggaattgaattgtataaataataaataattatttaaataagttttttttttttttatagtttaaaaaaataaaaaaggtagaaggatgtttttttttttgtatatttttatataattttataattttattttaagtttattatttttaagttaaatagtttgtttagtgttttgttgggggggggggtttttaaaagtagaaaaattgttttatagtagtgagttatttgtattataattttttttttgtgaattaatgttatcgttaggtatagtattttgatggtttataaagtttttcgtgtttgggaggtttttatatagtagtttatttttttttttttgttttacgtgatatttattttgtttttttgtgttgtcgttgttggagtagttatttttataggtttttaaagaagatttgcgtaggtatagaagtttttggaaggtaattttgaaatttgggtttcggtagtagataaggggattgaaattagaattgatatagtttatttaatttaggaggatgtaaatttttttacggatgaggttattttggattatatgtataatgttaacgatgaagaagggtagttagtagagggtgaaagtgtttatgatgatgtttaacgttttgagggttttgtgtttttttaagtagaatttggaagatttgcggagtttatgtttcgttcgtttattttgttttatttggttaaggttttggatatggaagcggtttttagatttgttaattttttggagttgttttttggttttttgaaagattttggagtagacgaagattatgattattaggggaacgtagaaggatacgatggaagaggtaatggtataggtttggttcgtgaagaagttatagtaggttttattggtatagtagttgatggttttttggtgggtggttcggtattagtgtatttgaatgggtaagaaggaggtaaggtttgatataatttatattattagaatgattattcgggttttatttttggttagtaggttttggtatttgaaaggtgaagtaatggtaaagtagcgatttattgcgattacgtatagggttttaatgttggtcgtgacgtatagtatattaatggaagtttaaaattcgtattagaagttgttaaaagtttatatttttataagaatatgggcggttttaaagggtattattgttaggtttatgattagattagtataggttagtgaagtgatgaagtagttggtgatcgtttgtagacgttcgaatttggtaatggttgtgatgattagtatattgttaaatacgatggttaggacgatgagagatatgacgatgtttatgtttattatttatatttcgttttttttttgcgtgacgtcgtggttcggcgtatggtttttattgggtgttagtaagaaggcgttgtcgttttcgggttgttttatggcgcgtagtttggtaggtgagcgtattggttgggggcgttttagcgggcggatttacggcggggttttgcgggtcgcgagcggacgtttggaagttttatttagcggttgtggtgtgggtgtggtggggattcgttttgtatatttagtttgtcgggtgttaggggttcgcggtgtttgttagttttagttcgtgttttgaagaagtcgtttcgtagtgcgttttgttcgttatgtgtataggattttaggggaattgttttcgtcgtgacgtacgggaattttcggttaatggtacgtcggtagtcgcgaaggggcgaggtattttttttttttttttttttttttttcgtttttttttttttggggttggttcgggcggggtttaattgttttttggagggcgggttattattgtttttcggttattttggttggttttagagggttaaagttggaggtggtgtttttattagttaattcgggagtttttggtttttttgtggtcgttatttgtttgttttgggcgtttgcgcggtttgaggttttaaggtagagggtagtatatcggtattgttttatattcggaaggaaacgagagtgtttatcgaggtacgtatatataggtataaatatattttggtagatatgtttagatttatatcgaattatagttatagatattgagatatatttttttagtttatcgatatgtatattcgcgcgcgtttttatatagaagttattcggtataaagttatttttgtttaatatagaaacgcggttagaaataaatatagaagtatttagaagtataaagatatggtgatatatatagaaagtaaatatacgttggtttggaggtatttagagcgatatagatacggatgtttttatttgggtatttcgaatttgttttattcgagtattgataatgttttttttttaatatatattcggtaatttagtgtatttttttttaaatatttggtaagagtataggaggtgattttaatagttgttgatttttttagtatattcgttgttaagtattttaggtgttttttttaggaatttgtaggtatgaagatagttttattttttggattttatttggagcgggggtatgtaagtatgtattttgggatagagagagaaagttgtgtgtttttgttttaatttttttgttgttttgtttttaatttttgagagtgtggtattatttatttattatttgttgaattggagatgtaatgagaatttaaataatttttttagtaaatttaatgaaattaaaaaaaatttttttatttgttggatagtttgttaatttttcgggttgtgttatgtgaaattgttattatttggcgtttgtgatttattaaaatggtaaatttatatggtttagagtattaagaatgttttaatattaagaatattttgaagttatagaaagtaaaagattttggttaatatggtgtaatttttgtttttattaaaaatataaaaattagttaggtgtggtggtacgtatttgtagttttagttattcgggaggttgagataggagaattttttgaattcgggaggtgaaggttgtagtgagtcgagattacgttattgcgttttagtttgggtgatagaataagattttattttaaaataaaataaaataaaaaatataagataatttttttttaagaaaaagaaaaaagtaagattaaattttaaaagtaagatttttgtttatgaaatattattttttttatttggtatgtgattttattgttaaagtgaaattaatttttagggtttgattttttatgtattagtggtgtttttgaaaaattgaaagtattttatgaagtgtaattaaacgtattttgtagattatataataatataataatggttaatatttatggattattttgttatttgttttttatgtattattttatttaattttttttatagttttatgggggtggggattatttttagtttaatttataaatgaggtttaaagaggaaaatggtttgtttaggggtaatggttgggtagtgttagaatttggatttgatttaggtttgtttgagtttaagatttattttttaatttttttaatgtattgtataattatatgtagataggagtgatggatagggaggaagggttataattggaattggaatatttaggttttagatttattaaatttggagttttttagtttattttttttttttttaagagaaattacgaagtatttgatttttattgtttttaaaggggtataaagttatttttattggggtaagtaagaattgaatgatatagtaagaaatatgaaaatgtttttgtttatataagtgttatataagtgtagtttgtaagcgaagtttatataaattatttagtggtttagaatatgttgttagttttttttattagaataataaaatattttagggtaaaagtaagttgggtgtttattttggaagtaaagtttagaaatagaatttaatttatatattttttttaatattttttatagtagaaattgattttttgtaagatagatgttttagaaaataagtattttttataaaatttataaatatgaattaaagatttattatatttatatagtttttaaaatatatttattttatatttgtgttttttaaaattggttgtggtatgatgtattttaggaagaggtagtatttattatgtaataacgtttttttaaatatgtatttatttaaattgtggaattaaattatttaaaattttttttttgtttgtgaagttatggtataaataagtatattgtttaatttttttataataagaaaagaataaagaaaatttttttaagataaatattaattgattatgtatttagatatatacgtaagttatttaaaagtttaattgaatattttgggaaattttttttttaaaatttataaatattaaattaagaaggattggttagttatatgtagaaaattgaaattggattttttttttatattttatataagaattaatttaagatgaattaaagatttaaacgtaagatttaaaattataaaaattttagaagaaaatttaggtaataatatttaggatataggtatgggtaaagattttatgattaaaatattaaaagtaatggtaataaaagttaaaattgataaatgggatttaattaaattaaagagtttttgtatagtaaaataaattattattagggtgaataggtaatttatagaaagggggaaaaattttgtaatttatttatttgataaagggttaatatttagaatttataaagaatttaaataaatttataagaaaaaataaatagttttatgaaaaagtgggtaaaggatatgaatagatattttttaaaagaagatattaatgtagttaataaatatatgaagaaaagattattagtattggttattagtgaaatgtaaattaaaattataatgaaatattattttatattagatataatggcgattattaatatattaggaaatagatcgggcgtagtggtttatgtttgtaattttagtattttgggaggttgaggtgggtggattatttgaggttaggatttcgagagtagtttgattaatatggtgaaatttcgtttttaataaaaatataaaaattagttagaagttgtggtatgtttgtagtttgatttattttgggggttgaaataggagaatcgtttgaatttgggaggtggaggttgtagtgagtcgagattgtgttattgtattttattcggggtgatatagtgagatttcgttttaaaaaaaaaataggaagttaggaaataatagatgttggaaaggatgtggagaaataggaatatttttatattgttggtaggaatgtaaattagtttaaatattgtggaagatagtgtggtaattttttaaggatttagaataagaaatattatttgatttagtaattttattatttggtatatattttaaggattataaattattttattataaagatatatggatatgtatgtttattgtagtattgtttataatagtaaagatttggaattaatttaaatgtttattaagaatagatttgataaagaaaatgtggtatatatatattatggaatattgtgtagttataaaaaaggatgattttatgttttttgtaggggtatggatgaagttggaaattattatttttagtaaattaatataggaatagaaaattaaatattttatgtttttatttataagtgggagttgaataatgagaatatatggatatagggagaggaatattatatattagggtttgtttgggggtgggggtttaggggagggatagtattaggagaaatatttaaagtagatgataggttgatgggtgtagtaaattattatggtatatgtatatttatgtaatagatttgtacgttttgtatatgtattttagaatttaaagtataataataataaaaaaaggagaatttgtttatattaattaggaagttttgggtttttgttttttagttttgacgaatggatgtacgttttttttttgttgttttattaagttggtagaaatgttaagatgtagttagttaattaagagtttttttttttgatttttttttgtgattttaggtttagagaaagttagattgggaaagagtttaatatattagttaatttattttttttaagtttgtaaatgaggttattgaagtgaaaaaataagaagtgtttaggttaaagtgttaaggaaaattaggagtttaggtttgtttatggttttataagttttttttgtttaatgttgttattttattttttagtagaggagttcgagtagtattgtttattgtttatatgattttagagagttaatgttttatttgaattggaaagtttttagtagattaaacgtatttttatttgatgtaagaaaaagtaggtttttttatggtgattgatagtatttaattatatattttgttaattttttaagatattgatttgtcgtttttagtttgttaaataggaataaaattttatatttggatttatttaatgaatgtttgaataggagtaagtttttatggtgttagagtatgtttttatattaatagttggatgtttaggaaaattttatattgggttttggttta

SEQ ID NO: 53 - DNA, 7431 bp, Artificial Sequence
  chemically treated genomic DNA (Homo sapiens)
tttataaaaatgaatggatggttgttgtgggtaatggagaggagagatagggtaaaggggtagtaaaaatttttatttagtttttgttttattttaagaattttaaagttagaagggtggattatgaatgttagaatagaattgtttgttacgtatgtagttttagatagggtataaggttgcgattatttgaattttttttggtttttttagtttattttatatgaatatatatagatatatatatatatgtatttaattatgatgtttataggagagagtatttttttttgttgttagaatttttgtttattaggcggttgttgttatttttggttttgttagatatatattttaaattatagagttattttttttggtatataattttcgagtattaatatgtaaatagtagtttgagggtttgaatttagtgtatttagaggtttatagacgttgtttgtttttaagggtatagaataaaggttatttgggggttgagggttagcgtagtgttttttttgggtaatgtatatttttatttcgagttggatgattttttcggtttaggtagtattaatttttttcgggttagttattaggacgattttttagaatagtaggttagttgtttttatttttttgttgattattaaaaatgaaggtgagagtataattgggtatatttttagggaagattatttggtagtattttttaaatttgtaaatgtatagattttataatatagtaaaatttatttgtagaatatatttatatataggtgaaatgatatgtgtttaagttatttattgtaatattatttgttagtaaagataagaagtaagttcgatgtttattagtagtagattggttttatagataattatataattatataatgggatattgaaaatgagatgtttttggttgcgtacggtggtttatatttgtaattttagtattttgggaggtttaggtgggtggattattagaggttaggagtttgagattagtttggttaatattgtaaaatttcgtttttattaaaattacgaaaattagtcgggtgtggtggtacgcgtttgtagttttagttatttgggaggttgaggtaggagaatcgtttgaatttgggaagtggaggttgtagtgaatcgagatcgtattattgtattttagtttgggtgataaagattttgttttaaaaaaaaaaaagaaagaaagaaagaaaaagaaaatgagatatttttgtatatttatttggaaggattatagatatatagttaaattaaaataagtaaggtgtagaatagtgggtatatatgattgttatttgtatagaaaagaaaggataaaagaatatatatatttgtattgatttgtatttatataaaatatgagtcgagggataaattagagattaatggtagttatttgttagggagatgaaaattgggatgaaggtaagtttttattatatgtatttgttatattttgatggttgaataatgtgtacgtataatttatttaaaatattaagttataaaatataaaattataaaagagatttaatagtttatagattaaggtggtaaaagagggagtttttttttttgttatttgtttgggcgggggaaaattagattgaggaatgagagtagggatgagttggtagaggaggaagaagttaagtgttttaatattgatggatttgtttataaaattatttttaatcggagttagaaatttttttttttatagtgtcgtttggttattggtttaattattttttaaatttaggtatatttaggtggtttgagaaattttgttttttttgaaaatgttaaatatttttatatattttttttaaattataaggttatttttaaggtattgatattattgaggttgttttatttttcggtattttttttttttttttttttaatgttgatgttttggaaaaaaattgttgaatggtatgtattgattttggagattattttttgggaattttatgatatttttttgagataattggtaataatattttggggtgttgtaaaattttatttgggagtgattgttttgttggttaataggaagttatagttaagattttgtgtttagtggggtttgtattattttgttatgatttgagtgggggtagtaagaggtggaaggggttagaggttgtttttttatttttatttttatggatttttatggatttaaaggtttgtttggggttttttatgggtatagaagttatttgtttgggagtttaagataaattttgtttatgggtgagtagttgggtttttgggagacgaggttggttttttttttttggggataattttaggttttgaatttttttgtaatttttttaatttttagtttttagtttagttttttagagggattgtttatattagtgattataaagtgttttttcgaaatatagagttgtttagagatttgttagggtatagttttggaggtattttttatgataatttttttttttttgttttattgttttagaggaggaagtatgatagtttaagaattaggttttgatagtttttgataaggtgttatatttttttgtttttttatttgaattttggggttttattttttagcgttttttttttcgtacgtaatttgagaggaattggtttagagattgagagagtaggggttggaaaaaggaagttttgtaagttttgagtgagggtagggagaagggaagaggaagagggaagtttttggtggaatcgtttaagagattttagaggttttgaaatattaggtttgttattatatacgtttaaaaatgaacgtatgaattttttaatttaacgttttttagtttttaaaagttaatgaatgaaatttttaaggaagttcggatacggtgatttatatttgtaattttagtattttgggaggtcgaggcgggtggattatttgaggttaggagtttgagattagtttggttaatatggtgaaatttcgtttttattaaaaatataaaaatttgttgggtttggtggtatatgtttattttagttatttgggtggttgggaggtttgggaggttgaggtagaagaattgtttgaatttgggaagtggaggttgtagtgagtagagattgtgttattgtattttagtttgggtaataagagtaaaattttattttaaaaaataaataaataaataaaaaatttaaaggaagtggagcgaatatttattattggggagatggtaatggaagagttgtgtatagtttggggggatggtggatttgttttatatttagttatttatttatttatttttttttttaaaatagggttttgttttttgtcgttttttaagttggagtgtagtagtagtatgattatagattattgtaattttgaatttttgggtttaagcgattttttttttttagttttttgatttatttttttttttttttttttttttttttttttttgatatggagtttcgtttttgttgttaaggttggagtgttatggtgtgatttcggtttattgtaatttttgttttttaggtttaagagatttttttgttttagttttttgagtagttgggattataggtatgcgttattatatttggttaattttttttttttttttttgtatttttagtagagatagggtttttttttgttgtttaggttggttttgaatttttgattttaggtgatttgtttatttcgattttttaaagtgttgggattataggcgtgagttatcgcgtttatttgttgatttatttatttttaatatgtttttatagtagaaagattttaagagaaggggttatttagaaaatttttaggtggaaaggtgtatggaaggggtagtgtagagtggggaagatggagaaattgaaattttttagtattttagattatatagtgttaaatttaaatgtaaatttagagttagtaatgaaaaagatttttggtcgggcgcgatggtttacgtttgtaattttagtattttgggaggtcgaggcgggcggattacgaggttaggagatcgagattattttggttaatatggtgaaatttcgtttttattaaaaatataaaaattagttgggtatgttggcgggtgtttgtagttttagttatttgggaggttgaggtaggagaagcgtttgaattcgggaggtggagattgtagtgagtagatattatattattgtattttagtttttagtttgggtgatagagcgagacgtcgttttaaaaaaaaaaaaaaaaagaaaagaaaaagaaaaagaaaaagaaaaagatttttgagttttttagtggtttacgtttgtaattttaattatttaggaggttgggataggagggtggtttgagttcgggagtttaaagttagtttgggaaaaatagagagagagagagatttgaaatatggtaaatttttttagtatttgaaaatattaaaaaaaataaaaagttagaaggaaagagaaggtaattgaaatagaagggaaaggggatagattttattaagttgaggttttgggagaggagatattggttgagttttattatttaatttaaaatattttaggggaggttatttaagtggatgcggggtttttgtgaattttttgtttgattttagcgggttatttttgtttttgatatataaagggtggggatgggagcgttttttttttttttttttttgttttgttgtgggaatttttgggaaaggaggtgtagggttttaggaagttagtgtttagggagtgttatgttgagtttaggagtttggttacggtaggggtggatagatggtggtagaggaattacggtgtttttttttttagatttagttaaaggaaacgtggagtattttattggttattttttttattttttaattcggttttagaggtttttttagattataggtagttgtttttttaagcgtcgttattttttttttaagagcggtggtatcgagggagttggggtggggggaggttgagcgttttggttgggatagttagagaagatggtttaggttggggaagtcgtttttatgttttgttgtttttttttttgagttaggtgatttgggagattttttttttttttttttttttatcgttttacgcgcgattcggggatggtttcgtggttttacgagaatagtttttttgttttatggtcggatttttttattttggcgtttaatatcgttaatattagtgggttgttaggggtttcgtgggaggcggttttagtcggggttttgttggcgttggcggtgttggttatcgtgggaggtaatttgttggttatcgtggttatcgtttggatttcgagattttagattatgattaacgtgttcgtgatttcgttggtcgtagtcgatttggtgatgggatttttggtggtgtcgtcggcggttattttggcgttgattggttattggtcgttgggcgttattggttgcgagttgtggatttcggtggacgtgttgtgtgtgatcgttagtatcgaaattttgtgcgttttggtcgtggatcgttatttggttgtgattaattcgttgcgttacggcgtattggttattaagcgttgcgttcggatagttgtggttttggtgtgggtcgtgtcggtcgcggtgtcgtttgcgtttattatgagttagtggtggcgcgtaggggtcgacgtcgaggcgtagcgttgttattttaattcgcgttgttgtgttttcgtttttaatatgttttacgtgttgttgttttttttcgtttttttttattttttttttttcgtgatgtttttcgtttacgcgcgggttttcgtggtggttacgcgttagttgcgtttgttgcgcggggagttgggtcgtttttcgttcgaggagttttcgtcggcgtcgtcgcgttttttggtttcggtttcggtggggacgtgcgtttcgttcgaaggggtgttcgtttgcggtcggcggttcgcgcgttttttgttttttcgggaatatcgggttttgtgtattttgggttttattatgggtatttttattttttgttggttgtttttttttttggttaacgtgttgcgcgttttgggggggtttttattttagtttcgggttcggttttttttgttttgaattggttaggttatgttaattttgtttttaattcgtttatttattgtcgtagttcggattttcgtagcgtttttcgtcgttttttgtgtcgttgcggtcgtcgtttgttttcggagttttgcgtcgtcgttcgttcggttttttttttttcgggcgtttttgcggttcggagtagtttagcgtagtttaggttttgttaacggttcgacgggtaggtaatcggggtagagggatcggcggtttagggtcgggaagtatgcgatgtgttcgtgggttaattttttgagtgtggagtttattaagagaaggtgggatggttttgtttggagagaaaagggaacgaggagtagcgaattaaaatgggatttagggttttttttttttcggatttagttattagggtagaagtaaaggagggcgagcgggtcgtcgttttttatttaaggatttaaggtgcgttatcggaaagcgttgcggtgtttcgaggattttcgtttcgtttggtcggttttagggattttttttttttttaaatagagatagggtttcgtttttgtcgtttacgcgggaatgtagtggcgcgattttagtttattgtagttttgaatttttggtttttgggtttaagcgatttttttattttagttttttgagtatttgggattataggcgagttttattaattttagttatttttaaaattttttgtagagatggggttttgttatgttgtttaggtttgttttgaatttttggttttaagtgatttttttgttttagttttttaaagtattaggattataggtcggagttagggcgtcgggtcggttttagttttggttttttagtttagttttttgtttttttttttcgattttttgttattattagatttggttcggatttgaagggtagttagtgtttttttattcgtttttttaagttttcggttttagttttgggtttttttaaaggtttgatagttgtggaggtgagaatttattttcggtatgaagtatagttgtgagtgaggagtttgtgagtgtagatgtgtgttttttcgttttttgggttgggttggagtagggatggggtggggcgtgtgtggttgggtggtgttttggcgttttttgtgtaattaaatatgcgttttagggtttttgatttttgttattttttttagtgtatttgttgttttttttattttagggtttattatttttatttttttttttagg

SEQ ID NO: 54 - DNA, 7431 bp, Artificial Sequence
  chemically treated genomic DNA (Homo sapiens)
tttgggaaaaaaagtggagataatagattttggggtgaaaggagtaataggtgtattgaggggaatgatagagattagagattttggaacgtatatttagttatataaaaaacgttagggtattatttagttatatacgttttattttatttttattttaatttagtttagggagcgggagggtatatatttgtatttataggttttttatttataattgtattttatatcggaagtggatttttatttttatagttgttaaatttttgagaaaatttagaattgaggtcgagggtttgggggggcgggtgggggggtattagttgttttttaagttcgagttaggtttagtgatggtaagaaatcgggggaggggggtaaagaattgagttggaaaattaaaattagagtcgattcggcgttttggtttcggtttgtaattttaatgttttggaaggttgaggtagaaggattatttgaggttagaagtttaagataagtttgggtaatatagtaagattttatttttataagaaattttaaaaatagttgggattggtggggttcgtttgtagttttagatatttaggaggttgaggtgggaggatcgtttgagtttaggagttaggagtttaagattgtagtgagttgagatcgcgttattgtattttcgcgtgggcgatagagacgaaattttgtttttatttaaaaaaaaaaaaaatttttaaagtcgattaggcgaggcgagagttttcgggatatcgtagcgtttttcggtggcgtattttgggtttttgggtgaggaacgacggttcgttcgtttttttttgtttttattttagtgattggattcggaaagaaaaggattttgggttttattttggttcgttatttttcgtttttttttttttttaagtaaagttattttatttttttttaataaattttatatttaaaaagttgatttacggatatatcgtatgtttttcgattttgagtcgtcggtttttttgtttcggttatttattcgtcgagtcgttggtaaagtttgggttgcgttgggttgtttcgggtcgtaggaacgttcgaggggaagagggtcgggcgggcggcggcgtagggtttcggaggtaggcgacggtcgtagcggtatagaagacggcggaaggcgttgcgaaagttcgggttgcggtagtagatgagcgggttgaaggtagaattggtataatttagttagtttagggtaaggaaagtcgggttcgggattagagtaggggtttttttagggcgcgtagtacgttggttagaaagaagggtaattagtagagagtgaaggtgtttatgatgagatttaaggtgtatagggttcggtgttttcggagaggtaggaggcgcgcgggtcgtcggtcgtaggcgggtattttttcgggcggagcgtacgtttttatcggggtcggggttagagagcgcgacggcgtcggcggagatttttcgggcggaaagcggtttagtttttcgcgtagtaagcgtagttggcgcgtagttattacgaaaattcgcgcgtagacgaagagtattacgagaagaggaaggtagaaggagacggaggaggatagtagtacgtagggtatgttggaggcgaaggtatagtagcgcgggttggagtggtagcgttgcgtttcggcgtcggtttttacgcgttattattggtttatgatgggcgtaaacgatatcgcggtcgatacgatttatattaggattatagttgttcgggcgtagcgtttggtgattagtgcgtcgtaacgtagcgggttggttatagttaggtagcggtttacggttagggcgtatagggtttcgatgttggcggttatatatagtacgtttatcgaggtttatagttcgtagttagtggcgtttaacggttagtggttagttagcgttaaggtggtcgtcggcggtattattaggagttttattattaggtcggttgcggttagcgaagttacgaatacgttggttatggtttggagtttcggagtttaggcgatggttacgatgattagtaggttgttttttacggtggttagtatcgttagcgttagtagggtttcggttagggtcgttttttacggaatttttggtagtttattggtgttggcggtattgggcgttagggtggggaggttcggttatggggtaagagagttgttttcgtgaggttacggagttattttcgggtcgcgcgtggggcggtagggaaagaaggaaggagggggttttttaaattatttggtttaggggaggggatagtaaggtatgagagcgatttttttagtttgggttattttttttagttgttttagttagagcgtttagtttttttttattttaattttttcggtgttatcgtttttgggggaggagtagcgacgtttaaaggggtagttgtttatagtttggaggggtttttggagtcgaattggagagtggggaggatggttaatgggatgttttacgttttttttagttaaatttggaggaagggatatcgtggtttttttgttattatttgtttatttttgtcgtggttaggtttttggatttagtatagtattttttgggtattggttttttggagttttgtatttttttttttagaagtttttatagtaaggtaggggaaggagagaggagagcgtttttatttttattttttatgtattagaggtaaaggtaattcgttggagttaagtaaaggatttataggagtttcgtatttatttgggtggttttttttaaggtattttaaattaagtaatagggtttagttagtatttttttttttaagattttagtttggtgagatttgtttttttttttttttgttttagttattttttttttttttttagttttttgttttttttaatatttttaggtattgaggaaatttattatattttaagtttttttttttttttattttttttaggttggttttgaattttcgggtttaagttatttttttgttttagttttttgagtagttggaattgtaggcgtgaattattaggaggtttaggagttttttttttttttttttttttttttttttttttttttttttttttttgagacggcgtttcgttttgttatttaggttggaggttggagtgtaatgatgtgatgtttgtttattgtaatttttatttttcgggtttaagcgttttttttgttttagttttttaagtagttgggattgtaggtattcgttagtatgtttaattaatttttatatttttagtagagacggggttttattatgttggttaggatggtttcgattttttgatttcgtgattcgttcgtttcggttttttaaagtgttgggattataggcgtgagttatcgcgttcggttaggagttttttttattgttagttttggatttgtatttggatttggtattatgtagtttgggatgttgaagaattttaatttttttattttttttattttgtattgttttttttatgtatttttttatttagagattttttagatagtttttttttttaaaatttttttgttataaagatatattaaaaatggatgaattaataggtgggcgcggtggtttacgtttgtaattttagtattttgggaggtcgaggtgggtagattatttgaggttaggagtttaagattagtttgaataataaggagaaattttgtttttattaaaaatataaaaaaaaaaaaaaaaaattagttaggtgtggtggcgtatgtttgtaattttagttatttaagaggttgaggtaggagaattttttgaatttgggaggtagaggttgtagtgagtcgagattatattatggtattttagttttggtaataagagcgaaattttatattagaaaaaaaaaaaaaaaaaaaaaaaagaaaggatgaattaagaggttgagaggagaggatcgtttgagtttaggagtttaaggttatagtgatttgtgattatgttattattgtattttagtttggaagacggtaagaagtaagattttattttaaaaaaaaaaatgggtaaatgggtgattgggtatgaggtaggtttattatttttttaaattatatataatttttttattgttatttttttaatggtaagtgttcgttttattttttttaggttttttgtttgtttatttgttttttgagatgaaattttgtttttgttgtttaggttggagtgtagtggtataatttttgtttattgtaatttttattttttaggtttaagtaatttttttgttttagttttttaagttttttagttatttaagtagttgggatgagtatgtgttattaagtttagtaaatttttgtatttttagtagagacggggttttattatgttggttaggttggttttaaatttttgattttagatgatttattcgtttcggttttttagaatgttgggattataggtgtgagttatcgtgttcggatttttttaaggattttatttattaatttttaaaaattagaaggcgttgagttgaggaatttatgcgtttatttttgagcgtgtgtggtggtaggtttggtgttttaaagtttttgaagttttttaggcggttttattagaggtttttttttttttttttttttttttttgtttttatttaagatttgtaaggttttttttttttagtttttgtttttttaatttttaaattagttttttttagattgcgtacggggaggggggcgttggaaaataaagttttagggtttaagtggagaggtaggaagatgtgatattttattagggattattaggatttgatttttgagttattatgtttttttttttgaaataatgggataaagggggaaaaattattatggaaaatgtttttagggttatgttttggtaggtttttgaatagttttatatttcgagagaatattttatagttattggtatgaataatttttttgggaggttgagttgggggttgggagttaggaaggttgtaggggaatttagaatttaaaattatttttaaggaaaaagaattagtttcgttttttagggatttagttgtttatttatgagtagggtttgttttgggtttttaagtaagtgatttttatgtttatgaagaattttaagtaggtttttggatttatggaaatttatgggggtgaaagtgaagaggtagtttttggttttttttattttttattgtttttatttaagttatgatagagtggtgtaggttttattgggtatagagttttggttgtggttttttgttgattagtaaggtagttatttttaagtagggttttgtagtattttagagtgttgttgttagttattttaaagggatattataagatttttaaaaagtaatttttaaaattaatgtatgttatttagtaatttttttttaggatattagtattggagggggaagggaaaggggtgtcggaaagtgaagtaattttaatgatgttaatgttttaggggtgattttgtaatttggaagaagtgtgtaaaaatgtttaatatttttaaaaaagataggattttttaaattatttgagtgtgtttgagtttggggaatgattaggttaataattaaacgatattgtaagaagagaaatttttgatttcggttagggatggttttatgagtaaatttattaatgttgagatatttggttttttttttttttgttaatttatttttgtttttattttttagtttggttttttttcgtttaagtagatggtagggggaagggtttttttttttgttattttagtttatagattattgggttttttttgtgattttgtgttttataatttaatattttgaatagattatacgtgtatattatttaattattaaaatataataaatgtatataatagagatttgtttttattttagtttttatttttttagtaggtaattattattagtttttggtttatttttcggtttatattttatatagatataagttaatataaatatatatatttttttatttttttttttttatataaatagtagttatatatatttattgttttgtattttgtttattttaatttgattatgtatttgtgatttttttagatagatatataaaagtgttttatttttttttttttttttttttttttttttttttttgagatagagtttttgttatttaggttggagtgtagtggtgcgatttcgatttattgtaatttttattttttaggtttaagcgatttttttgttttagttttttaagtagttgggattataggcgcgtgttattatattcggttaattttcgtagttttagtagagacggggttttgtaatgttggttaggttggttttaaatttttgatttttgatgatttatttatttgggttttttaaagtgttaggattataggtatgagttatcgtgcgtagttaaaagtattttatttttagtattttattgtatggttatatgattgtttatgaaattagtttgttattgatagatatcgagtttattttttatttttattaatagatgatgttgtaatgaataatttaaatatatgttattttatttgtatgtgagtatattttataaatagattttgttatgttataaggtttatgtatttgtaaatttgaaagatattgttaaatggttttttttggggatgtatttaattatatttttatttttatttttgatggttagtagaggggtggagatagttggtttattgttttgggaagtcgttttaatgattggttcgaggggaattagtattgtttgggtcggagaggttatttaattcgggatagaagtgtatattgtttagagagagtattgcgttggtttttagtttttagatgatttttgttttgtgtttttggaagtaggtagcgtttgtgggtttttgaatgtattgagtttaggtttttaggttgttgtttatatgttggtgttcgggggttatgtgttagggagaatagttttgtgatttagaatatgtgtttggtagagttagaagtggtagtagtcgtttgatgagtagaagttttaatagtagggaagagtatttttttttgtgaatattatgattgggtgtatgtatatgtgtgtttgtatatgtttatgtgaggtggattaaagaagttaaaaagagtttaggtgatcgtagttttatattttgtttaagattatatgcgtaataggtagttttattttaatatttataatttatttttttggttttaaagtttttggaatggagtaaaaattaggtggaagtttttgttatttttttattttgttttttttttttattgtttatagtaattatttatttatttttatgaa

SEQ ID NO: 55 - DNA, 6665 bp, Artificial Sequence
  chemically treated genomic DNA (Homo sapiens)
tttattttaatttatattgaattatattaattattttaatgggatttatataattttattttattaagttaatttttgagtgttaaaaatttaattttaatttattatttattgtgatatggagtttatgtttaatacgagatattttaaggtattgagtataataattatgagtaatttaattaagatataaaataaggtatagttatttttaaaaagttatttagttattttttaaaattatatggggtataatgtttaaatttgttggaattttaggtataagtataatttgagtatttattaagtttacgaggttttttaattggtgtattttggtaaatgttaaagttaatttagagtttttagttttggttaggcgtggtggtttacgtttgtaattttagtattttgggaggtcgagataggcggattatttgaggttaggagttcgagattagtttggcgaatatatagtgaaattttatttttattaaaaaatataaaaattagttggatgtggtggtgtgttttcgtagttttagttatttgggaagttgaggtaggagaattatttgaatttgggaggcgggggttgtagtgagttaagatggtattatcgtattttagtttgggtgatagagtaagattttatttttttttaaaaaaagtaaaaaatagaaaataaaaaattttatagttttaaatttaattacgattttagttatttttttgttatataaattttttggtatataaattttcgatttttaattgggtgaaattatggatgtttgttttaatttagatatacgtttgatatttttatttatgtatatgtataatttatttattatgtttatattaatttaaatgtttattaatgatagattagataaagaaaatgtggtatatatatattatgggttattatatagttataaaaaagaataagattatgttttttgtaggaatatggatggaattggaggttattatttttagtaaattaatttaagaatagaaaattaagtttagtatttttttattgataaatgggagttaaacgaaagaatttatgaatataaagaaggaaatagtagatattggggtttatttgagggggggagggtgggaggagggagaggagtagaaaagttaattattgggtatgggtttaatatttgggtgatgaaataatatgtataataaaattttatgatatatgtttatttgtgtaatgagtttttatatgcgtttttaaatttaaaataaaaattaataaaaattttatttatatataatttagttggttattttttttttttttttgtgttatagtttggatgtttggttttttttaaattttatgtcgaaatttgatttttagtgttggagagggagtttaatggaaggtgttggggttatgggggaggatgttttatgaatagattaatgtttttttttgggggtgagttttgattttattagtttttataagagttggttgttaaaaagattttggtatttttttttatttttgtttttttttttgttttgtgatttttgtatatattggtttttttttgttttttgttatgagtggaagtagtttgaggatataatcggatgtagatgtttaattttgaatttttttagatattagaattgtgagttaaatgtattttttttttttataaattatatagttttaggaattttttataatataaaatagatttaggtattttgaatttaggttttttttttttttattttttttttttatgttgttataagaaaaattgggattgtaatatatttttaaattgagaaggagttaagaaattaaagaatggtttagataaatttaggtttgtgagtagatgaatttattaggatttatatataaggtatttttggtgggagtaggatagttttagagatttgttttattatttagttttaagttttttttaagcgaatattttggttttttgtttattgtttgtaatgagattgttttttttggtatgtttttagagatattttgggatgtttgggttgttagggatattttttttttaggtaggtattatggtttttgtttagtgtttagtttttagggtgtaagtagtaaaaataaatttttaagtaatttggtcggggattcgttatattatattttttagttttaggttgttttagtttttatttttgattgataagaggaaagaatggaggagaaagggatatagtgttttttggtagtagtttttttttggataagtttttgtagtttatttttttttatttttttgttaaataaaatattttagagtggtttgtatttttaggttaaaatttttttttttttttttattttttttggttttttttgttttaattatttttttttttttttgtttttttggatatttatttgataatttaggtaaatatagagttaaggagttaagtaaattttaaataagataaatttaaagaaaattgtgttaagataaattttaattaaatatttgaaaattaaggatataaaatatatttaaagtagttagtgaaaatattttttttatagagaataataatttgaatgatagtggaattatggagaatagaagaaagtgttataatattttttaagtattgaataaaaagaatttttaatttagaattttatgtatagagaatgtattttttaggaatgaaaggaaaattaaggtatttttagatgaaggaaaaataagagaatttattgttattattaaaagatttattttaatagaatagttaaaagaagttatttaaatagggaggtaatgaaaaaaaaaaaaggagttatggaatattagaaaggaagaaagaatatagtaagtaaaaatatgggtaaatgtaatatgttttttttttttgtttgagttttttaaattatgtttgatagttggagtaaaaattataatattttttgatgtggttttatatgtttgtagaggaaatatttaatataattttattataaataaagaaaggtggttaaagagatatgattggaggtaaaatttttatattttattagaattagtaaaatgatgatattagtttattgtgaaaaattatgtatatataatgtaatatttatagtaattattataaaagttatataacgagatatattaaaaatataatagataatttagaattttgtttaatatttaatttataggaaggtagggaaaagaaaaaaatattaagaatatagagaagaaatagaaattaaaaaataaaatggtatatttaagtttaaatatattaataattatataatatataaagggtttaaatatattaattaaagaattatttggtagagtggattaaaaattatgatttagtgtatggtgtttataaggaatttattttaaatgtatgaaagttgaaaataaaatgatggaaaaaggtatattatgtagggttaggtatggtggtttatatttgtaattttagtattttgggaggttaaggtggtggattagttgaggttaagagtttaagattagattggttaatatggtgaaatttttttatttttattaaaaatataaaaattaggtggatttggtggtgggtgtttgtaattttagttatttgggaggttgaggtgggaggattatttgaatttgggatgttgagattgtagtgagttaagattgtgttattgtattttagtttgggtgatagagtaaggtttcgtttaaaaaaaaaaaaaaaaaaaaaaaaagatatattatgtaaataaaagagagtaggtgcggttatataaatattagataaagtaaagaaaattattagagacgtatagggatattatattaatgatgaaaagattagttaattaggaagatatggttatttatatgtatgtatattaaataatagagttgtaaaatatgtgatataaaaagtgatagtattgaaaggagaagtagattttataattgtagttagggacgttattatttttgtatttcgtagtataagtagattaaaaaatttataaggtagatttgagagtagtttgtataatatagtaagattttatttttaaaaaaaatttttgggggggtatgttggtgtatgtttgtagttttagttatttgagaggttgaagtgggaggtttgtttgagtttaggaaatgaggttgtagtgaattatgattatgttattgtattttagttttagtgatagagcgagatttcgttttaaagaaaatttgtaagggtatagaagaatttaatattattagttaatatgttatttaataatagtaaaatatatattttttttaaatgtttatggaatatatattaagatagattagaatttgagttataaaataaatttaaataaatgttaaagaattgaaattatatttagagtgtgttttatgattaaaatggaattaaattataaattaatggtagaaaggtaataggaaaatttttaaatatttagaaagttaaaacgtatttttaagtaatttataggataaagaggttgttttagggtaaattttaaaaatgtagtcgagtgaaaatgaaaatatattaaaattcgtgagatatagataatgagagtgaggagatttagtgatgagtaaaatttaagtgtatatattagtgtggtaggttaaattatggtttttttcgagtagcgcgttaggtcgttatttttcgcgggcggtgttgttaaggtaggttatttgcgcggggtagttagagtttttttatttgagcgggttgtggcggagagcggggtagggattggttggagtgtggtagtttagcggggcgggggcgggggcggggtcggtttttggtttttttttttttcgtaggtggttggaggtcgtagagtaatatagttcgtttatttttcgtcggtcgcgttttttttcggtttttttcgcgttatcggagttgcggcgttcgttaagaattatttggaggtattttttttgtttagcggcgattgcggtcgttttagggcgcggtttagaggaaattgggtgacggtggtgttcggtgtgtagtggggcgacgaaggtaaaggggaggtggcggatttattggcgtaggattttatgtgtcgttgttagggaggaaataatgttggttatatagttgttgtgtattttgtggagtatgatttttattttttatttagtggaataattattttaaatgttattgtatttaatggaaatggtgtggtaatttatttatttggattgtttgaagaagtagagaaaaatgtttaaaaaggaaaaggattagaaggttgggaaaaaggtttattttatttgatagagtttatattgtatttgatttttattaagtcgttgatggtgtttaggaataatagagataagaataagtaggaaaaaatttgggtataataaaaaagggtattggtttagtttatttttttaaagttgttcggagtggatttaggatgtgcgattttgtttttgattttgttggtttttttgagatgtttaaagttttagttaaataatataaatttatatattttattttggaaatagatattgaaggtgaattataaaattttaaggaaattggagaattattataaataaagggtagagagtttggtgtaattattggaaggaaaagaagatgtggttggttggatttcgttttgtttaaatatgtttatattattaatggatttattgcgttggaagttattaagttgaatattttggatatgtttatggaaattaaagttggagttgtttataagttagatggttaaattatattttatattttagtaaattaagaagttttaaagttgaagtttaatataagattttatgagaatggaatatagatatattaaatgtaagggtatttaaagaattatttgttaatgtataaaattatgttcgatttattgaagatgagttttaaattttagttaaatggattggtgttggtaaatttagagtttatgatttaatttttcgaatgattgatagtaaagtaagaaatattttttgagagggaggggaaaagatttttttaaatattttaattaagatttataaatttaagaataaataaattgaagtgagttttaggttttacggttgtttttagtttttttagatggatatttattgtggagattaattttggtatattttagtgttagttttttttagttggtataatttgttgtttttgttgtttttatggtgttatttttttttttaatgtttagtaataatataatttatgtttgaaatttaaagtagaattatttttaatgtagtttttttttattattgttattgtgtgtttttaagttttatttttattagatagtaagaataattaatgtagttttgtataaatatttttatattttgattatttaattttgtcgttgtaatttttgttgttagaaataaatgatgaaaatataggggttttgtaaatttttgtaatgttatgagttttgtttaaattgtggattgtttattttttgttgagattattgtaaaatttgaaagtcggtagttttaaagattggtggtagataagtttataaaaat

SEQ ID NO: 56 - DNA, 6665 bp, Artificial Sequence
  chemically treated genomic DNA (Homo sapiens)
atttttgtgggtttatttattattaatttttgaggttgtcgatttttaaattttgtaatggttttagtagaaaataaatagtttataatttaaatagaatttatagtattataaaagtttatagaatttttatgtttttattatttgtttttaataataaagattataacgatagaattgaatgattagaatgtaaaaatatttgtgtaaaattgtattaattgtttttattatttaataggggtaaaatttaagaatatataatgataataatgaagaaaaattatattaaaagtaattttattttagattttaaatatgaattatattattattaaatattaaaaaaaaaagtggtattatgagagtagtaggagtaataaattatgttagttaaggaaagttgatattggaatatgttaaagttaatttttataataggtatttatttgaaaagattggaaataatcgtagggtttaaaatttattttaatttatttatttttgaatttgtaggttttaattgaagtatttaagaaagttttttttttttttttttaaggagtgttttttgttttattgttaattattcgaagagttgaattatagattttggatttattaatattaatttatttaattggaatttgaagtttatttttaataaatcgaatatagttttgtgtattaataggtagttttttaaatgtttttgtatttgatatgtttgtgttttatttttatggagttttatattgaattttaattttaagattttttgatttgttggaatatgaggtatgatttgattatttaatttgtaagtaattttaattttgatttttataaatatgtttaaaatatttaatttggtaatttttagcgtagtaaatttattgataatatgagtatatttgagtaaaacgaggtttaattagttatatttttttttttttttaatagttatattaaattttttattttttgtttgtaataattttttaatttttttgagattttgtaatttatttttaatgtttatttttaaagtgggatgtatagatttgtattgtttagttggaattttaaatattttagagaagttaataaggttagaaataagatcgtatattttaagtttatttcgagtagttttggaagaataaattgggttaatgtttttttttgttgtatttaaatttttttttgtttgtttttgtttttgttgtttttggatattattagcggtttgatgaaaattaaatataatatgagttttgttagataaaataagttttttttttagttttttagttttttttttttttgaatatttttttttgtttttttaaataatttaggtagatgaattattatattatttttattgaatgtagtaatatttggaataattattttattgggtaagagatgaaaattatattttatagaatgtataataattgtatggttagtattattttttttttggtagcggtatatggggttttgcgttagtagattcgttattttttttttgttttcgtcgttttattgtatatcgagtattatcgttatttagttttttttgggtcgcgttttggggcggtcgtaatcgtcgttgggtagggaggatgtttttaggtagtttttggcgaacgtcgtagtttcggtgacgcgaggagagtcggaaggagacgcggtcggcgagaggtgagcgaattgtattgttttgcggtttttagttatttgcggaggaagagggagttagaggtcggtttcgttttcgttttcgtttcgttgggttgttatattttagttaatttttgtttcgtttttcgttataattcgtttaagtagggggattttgattgtttcgcgtaggtggtttgttttggtagtatcgttcgcgggaagtggcggtttggcgcgttattcggagaaggttataatttagtttattatattaatatgtgtatttaaattttatttattattgaatttttttatttttattatttatgttttacgaattttgatatgtttttatttttattcgattgtatttttaaaatttattttgagataatttttttgttttatggattatttagaagtacgttttaattttttaagtgtttggaaatttttttgttatttttttgttattgatttgtagtttggttttattttggttatagaatatattttgagtataattttaattttttaatatttgtttaggtttgttttatggtttaggttttggtttattttggtatatgttttataggtatttgagaagaatatatgttttgttgttgttgagtaatatgttgattggtggtgttaagtttttttatatttttgtagattttttttaagacggggtttcgttttgttattgaggttggagtgtagtggtatgattatagtttattgtaattttattttttggatttaagtaagttttttattttagttttttaagtagttagaattataggtatgtattaatatgtttttttagaaattttttttaagaatggggttttgttgtgttgtgtaggttgtttttaaatttgttttatagattttttggtttatttgtattacgaggtataagggtgatgacgtttttaattataattgtgaagtttatttttttttttagtgttattattttttgtgttatatattttgtagttttgttgtttgatatatatatatgtagatggttatatttttttggttaattgatttttttattattaatataatatttttatgcgtttttggtaattttttttattttatttgatatttgtatagtcgtatttgtttttttttgtttgtataatatgtttttttttttttttttttttttttttagacgaagttttgttttgttatttaggttggagtgtagtggtataattttggtttattgtagttttagtattttaggtttaagtgatttttttattttagttttttaagtagttgagattataggtatttattattaagtttatttaatttttgtatttttagtagagatgggggggttttattatgttggttagtttggttttgaatttttggttttaattgatttattattttggttttttagagtgttggaattataggtgtgagttattatatttggttttatatgatatgtttttttttattattttatttttaatttttatatatttgaagtgagttttttatagatattatatattgggttataatttttaatttattttgttaaatggttttttaattggtatatttagattttttatatattatataattattgatatgtttgggtttaagtatgttattttattttttgatttttattttttttttgtgtttttaatattttttttttttttttgtttttttatgggttgaatattgggtagaattttgagttatttattatgtttttagtgtatttcgttgtatagtttttatagtaattgttgtaggtattatattatatatatataattttttatagtgaattggtgttattattttattagttttagtgaaatatagaaattttatttttagttatgtttttttaattatttttttttgtttataataaaattgtattaaatattttttttataaatatgtagaattatattagagaatgttataatttttattttaattgttaaatataatttagaagatttaagtagagagagaaagtatattgtatttatttatatttttatttattgtgttttttttttttttttgatgttttataatttttttttttttttttattgtttttttgtttagataattttttttagttgttttgttagagtaggttttttggtgatggtaatgaatttttttattttttttttatttgagaatgttttggttttttttttatttttaaagaatatattttttgtgtataggattttgagttgagagttttttttatttagtatttgaaaaatgttatgatatttttttttgttttttatgattttattgttatttaaattgttattttttataaagaaggtgtttttattggttgttttaaatatattttatgtttttagtttttagatatttaattaaaatttgttttggtataattttttttgagtttattttgtttgggatttgtttagttttttgattttgtgtttatttgagttattaggtaaatatttaagagaataaaaaaggaaaaaaatgattgggataaaggagattaaaaggagtgaaagagagaaggaaaattttaatttagagatataagttattttaaaatattttgtttaataaaaaagtgggagaaagtggattgtaggggtttgtttagggaaaggttattgttaagaagtattgtgttttttttttttttattttttttttttattagttagagatagaaattaaaatagtttaaaattggggggtgtagtgtgacggattttcgattaggttatttaagggtttatttttgttgtttgtattttgaaggttgagtattgagtaaaggttatgatgtttatttgaggagaaggtgtttttgataatttaaatattttagaatgtttttgggaatatattaaggaaaatagttttattgtaaatagtaggtaaagagttagaatattcgtttaaaagaagtttagggttgggtgatggggtaggtttttggagttattttgtttttattaggaatattttgtatgtaagttttgataaatttatttatttataaatttagatttgtttgagttattttttggttttttggtttttttttagtttgggagtatgttgtagttttagttttttttgtaatagtatgagggagaggaatagaaaaaaaaaaaatttgaatttagggtgtttaagtttattttgtgttataaggaatttttgaggttgtgtaatttgtaaagaaaaaggatgtatttggtttataattttgatgtttaggaaagtttaagattgggtatttgtattcggttatgtttttaggttgtttttatttatggtaggaggtaaagagaagttagtgtgtgtagagattataaggtaagagaggaaataagagtagagagaggtgttagggtttttttaataattaatttttatgggaattaataaagttagaatttatttttaagaaagggtattaatttatttatgagatatttttttttatgattttaatattttttattgggttttttttttaatattgaggattaaatttcgatatggggtttggaggggattaaatatttaaattatagtatagggagagaaaaaaaataattaattgaattatatgtagataaaatttttgttaatttttattttaggtttgggggcgtatgtgaaggtttattatataggtaaatatgtgttatggggttttgttatatatattattttattatttaggtattaagtttatatttaatagttaatttttttgtttttttttttttttttatttttttttttttaaatagattttagtgtttgttgtttttttttttgtgtttataagttttttcgtttagtttttatttattagtgagaagatgttggatttggttttttgtttttaagttagtttgttaagggtaatggtttttagttttatttatgtttttgtaaaagatatgattttgtttttttttatggttgtgtagtagtttatggtgtatatgtattatattttttttatttaatttgttattgatgagtatttaggttaatatagatataatgaatagattgtatatgtatatagataaagatattaaacgtatatttaaattaaaataaatatttataattttatttaattggaaatcgaaaatttgtatattaaagaatttatataataaaaagatagttaaggtcgtgattgggtttagaattgtaaggttttttgttttttgttttttgttttttttagagagagataaagttttgttttgttatttaggttggagtgcggtggtgttattttggtttattgtaattttcgttttttaggtttaagtgatttttttgttttagttttttaagtagttgggattacgggagtatattattatatttagttaatttttgtattttttagtagagatgaggttttattatatgttcgttaggttggtttcgaatttttggttttaagtgattcgtttgtttcggttttttaaagtgttgggattataggcgtgagttattacgtttggttagaattgaaagttttaaattaattttaatatttgttaaaatgtattaattgagaaatttcgtggatttaataaatatttaaattatatttatgtttgaggttttaataaatttaaatattgtattttatataattttaaaaggtagttaaatagttttttaaaaatagttatgttttattttatattttgattgaattgtttatagttgttgtatttagtgttttaaagtatttcgtattgaatatagattttatgttataataaataataaattaaaattaaatttttggtatttaaaaattggtttgataaaataggattatataaattttattaaaatagttaatatggtttaatgtaagttaaaatagg

SEQ ID NO: 57 - DNA, 5945 bp, Artificial Sequence
  chemically treated genomic DNA (Homo sapiens)
ttttatggggtttgttttaagtttggtaatttgtaatagggtttattgattttttttttaggtttaaggtattgttttttttttatatttgttttggggtttttggggtttgaatatttgagaaaatataaatattttaataatgttttgtggtgagatgagtatgagagatgtgttatttatttgtattaatgaatgaatgaggataattagtgtataaatttttagtataataatttgagggtaggggtggtattatttaatttttatttataaagatatttatttttatttatttatgtttgtgataaatgttttgttcgggattataggaattataaagatgagtttttgaatttaagaagttaatggtttaggaataattatatagtttataaatgattatgatatattattaaataagaggttttatgagaaaataatttgaaaggtttaataagttgttaaaggtgagagggtttttttttagttagagattaattagaaatatatttagggataattatttgaatagattttaagggttgggtatattttgtttaagtattgatggagaaggagagtgaatatttgaaaatatttttaattaattaattatttaatttaataaataaaaaatgaaaagaattttagaaatagtgagataagagaaggaatttttttataatttatacgtatagtttaattgttttgaagaagtatatatttaatatttaatattaatattatgttaataatgataataattattgttattttttaatgtttataagtattaggtatttagaagatattattttatttatatattaaaataaatttgaggggatagattatttttatgatatatgagaaaaattaaaaattagattgaattatttgtttgttatatagttaataattgattataagataattagatttaaattagttttgaatttttttaatattaaagtttagtttattgttttatgttgtttttgagtggttttatagatttatgaaaaagtaaacggaattagaattatattaatgtaaaagtattgttgtgaattttgtatttaggattaaattttgagtaataatatatatagattgaggattgtttgttgttagtatataaattttggtttaaagtttttttttattgtttgttttggaaaatttgttgttttttatggtttttttttttattgttatttattttttttaattatttatatggttataataattgtttgtaagtttatgatttttaaatatttatttttagttttaattttgttttagaagataaaaagtagtatttaaatgtatattaacgtttttatttggagggtttaaagacgttttaatatataaatcggggagttttgtttggaatgttttttaaaatgtgttttgtagtatatagggtttttttgttttttaaaatttaattatttttagtttagtgtttattttatttatggggagatgagagtgaaaagggagtttgattaataattatattaagttaataggtatagagttaggattgtttgggtaaattggttattttattttaaattaaatatatttaaaattgaatatgtatttagttattaagtttttgattttattttatttatattatttagttttatttaggttatttatttgatagtattattgcgaaaattttttaattggtttttttattatagttttatttttttttgaaataaaagagatagttttaaaatataaatatgatttttattagtttttttttgttgtttataatagttttagaaggagttataaattttatttaaaaagtttttgagatgtggtttttgttaattttgttaggaatttttaatatttagtattttttattattaaattttgtgtttttttaaaattgtatttttttttattttttaagtgtgtattgtttttttttatcggttggtttttttattattttttatatttttttggaatattatattttttttttttatttggtttatttttaatttttttttagatttttatgaagatgttattttttttaggaagttttatttgatttttttaaagatgttatgagtttttttttttattttattaattatagtatttattatattatgttgtgattattgatattattgtttgtttttttgattaggtagtaagtttaataagagttatatggtgtttgttttttgttgttgattatttttatttaaaaatagtgtttggaatgtagatttaatattttattgaatgaataaataaaattttatttatcgagtgttattttgtgtaagattcggttttgaggtatttatatttattgatttatttaatttttatttaattatgaaggaggtattattattatttttattttatagttgataaagataaagtttagagaaatgaattaatttatttaaagttatgtagttaagtgatagggtaaaaatttaaattagttttttaattttacgtgattaatattgtgttatattgtttttttgattatatggtatggaatgtagatatttgtttcgtaaggtagaatatggaaggagattggaggatgatataaaattagtataatattagaggaaaagtttaaataggatttgaattgatagaaaagttgttatttttggtgtagtcgtatcgatattttgatgaattggtggttgatataatatatattggtttgatgtgtatatattatttgtagttgtgtgtgtatttttatatatatatttgtaatattgaaatagttataatttattaaaggtttattatttgttaggtatttttatatttgttttttttaattttttgatgagatgattagattggattatttggttttgaagatgatatatttatatttatatttatatttatatttatatttatatttatatttatatatgtatattagaaaagttgaaatatgttttgtaaagttataaagattttagattttatagaatttgggatttgttaaatgtaatttttttttttatattaaatttatgttggaataaatatatttattatttatttattaaatgttgttgagttttggttatgaattagatattgtgaaagtttttgggatattttgtttatgtttgggtaagtttatatagtttgttttataaaattttattttagttttttataattaatattttatgattattgttttttaggtatttttttataataaatattttggtttttatatatttgagtaaagttttttttgaggaagagtagaagaattgtattttgtaaatattattttggaatttaaacggatagataaggatggtgttatttttttttggagagtacgtgagtaaggtttgttttgttaatatgttttttaggagataaaatttaggagagatacgtatagtagaaaatggataaaaattaataaatgaatgggaattgtatttgattagtattgaagattttgtttatattatgataaatgtttgtatttgttggaagtgttattgacggtaaattttttttgtttaaatgtgtgttttagtagtttgtagtatgatttattttttaagtattgtatttagtttatttaaaaattttatgtttaaaattgtatagtgtttttttattgaagaagttttgagagagagatagaattaaatttatttattttattatttagagaaatttaatgttaaaattttgttgtttattatttttgttttttatttaatattttttttagagggtgggaggaatatagaggaggtataatgatatataaatgagagtattttttatgtattgttttgttttgttttttagttaataatatattatgagtatatttttattttattaaatatttttttataaagttattttgatggttgtatattattttattttatgaatgtattatattaatttattttttggtgtgggttatttgattttataattttatttttagaataatgaaatatttgtgaagttttagaaaatattggtgtttgggttttaattttatagattttgatttaattggtttgggttatagattaggtattgggaatttaaaaagtttttttagtgattttaatgtgtagttaagatcgggaatttttgtagatagggatgataggaggtgagttatttttagtatttattatttagtattaatattattattttgagttgttaagtgaatgatgtatttgatttattttataaagatatatgtgtaaataaaattattataggatttggtttattagggtttgtgttttaagttttttatgttaagttatatatcgtatattaaatattttaaaatgtattttattgatatatatattaagtgaaaagtgtttttgagttaaataatgatagtataattattaagtaatgataatttgaaatgaatttattattttgtaatttagggataagttatttttttgaattttttgtattttgagagtatttgttatatttgtaagatgaagagtttgaattggttagataatgttttgtgtgtttggtatatgataggtatttaatagttttaaagaattaatgtatttagatgaattgtatattaaatttgttgttttttttttatggttttattaatttaatttgagagaaattaattattttgtaatttagggataagttatgtttttgaatattttgtagtttgaggagaatatttgttatatttgtaaaataaaataagtttgtaagttttttttttttgttttaaagagttttgtgtttttgaatataaaatataaataatcgttatgttgttaattattggtaaatgttttatttttaatttaaggaaatattataaagtaatagatatattaataaaaggttattagttaataggtattgtttgaaaagagtataaaagaattttagtatgattttttatattgtgtttttattattgttaataataaaataattagtaattatgaagtgggtggaattaatttttttaatttttttattaaattttattgaatttagaatattgtatagaaatgaatatggaataggtgagatattttgtgttttttttgttttttttttatattaaaattttttaaattataaaatttgtattaatttgttttgatttattatttatatttattattttatatggagaaaaaatatttaattgatggatatatttaaatgaaagaaaaatttgtaattttataagaggtttataaagttatagtagtgtttaatggatgaatggtttgtatgttttatgttgaattaatttttatattttaatggtatgtatattaattttgaaaaattatatatatatatatatatgtatatatatatgaatataaataaaattttatatgtgaagaagttagaattatgtttttttatataatttttttagattagtaaaatagataaaatttttgtttttaatatagaaaaatgggttattatttgatggtttgaagaagaaatattgtgattgggatatgaatggtaaatcgtagtataattatgtttaaaagaatgtttgaaatatatttttaattatttgatttttaggatagttatagtattatagtatagggaaaaattaaataattggaagataaaatttggattttagtgataggtttattataaattatgtttgttaattttattttttagttttttagtttttttttttttaagtataaaattaagatgtttaggttatttttaatgtttttttaattttgaaattgtatagttttaattgaaatataaatatttatatgtaataatgattatttttttggttgtagttgaaaatacgttttatgaagtttattttgttttttagt

SEQ ID NO: 58 - DNA, 5945 bp, Artificial Sequence
  chemically treated genomic DNA (Homo sapiens)
gttggaaggtaaaataaattttatgaaacgtgtttttaattgtaattaagaaagtaattattgttatatatgaatgtttgtgttttagttagaattgtatagttttagaattaaaagaatattagggataatttaagtattttaattttatatttgaggaaaagaaaattaggaaattaaggaatgaagttaataagtataatttatagtagatttattattaaaatttagattttgttttttagttgtttggtttttttttgtattgtagtgttgtaattgttttgaaagttaaatggttaaaaatatattttaggtatttttttgaatatagttgtattacggtttgttatttatattttagttataatattttttttttagattattaaataatgatttatttttttgtattaaaaataaagattttatttattttattagtttgagggagttatgtgaaggagtataattttggtttttttatatataaaattttatttatatttatatatatgtatatatatgtgtatatatataattttttaaagttaatatgtatattattgaagtgtaaaaattaatttaatatgaaatatataaattatttatttattaaatattgttataattttgtaaattttttgtaaagttataagttttttttttatttaaatatatttattagttaaatattttttttttatgtggaataataaatatgaataataaattaagataaattaatgtaaattttataatttaaaaaattttgatatagagaaaagataagaaaaatataaaatattttatttattttatatttatttttatgtagtgttttggatttagtaaaatttagtaggaaaattaaaaaaattgattttatttattttatggttgttagttattttgttattggtagtggtggaagtataatatggaaaattatgttgaaatttttttatattttttttaggtaatgtttgttaattagtaattttttgttggtatatttgttattttatggtatttttttaggttgaaaatgggatatttgttaataattaatagtatagcggttatttgtattttatgtttaaggatatagagttttttggggtagaaaaaaaaaatttgtaaatttattttattttgtaaatataataaatattttttttaaattatagaatatttaaagatatgatttgtttttaagttgtagaataattaattttttttaaattaagttaatgaagttataaagaaaagatagtagatttggtatgtaatttatttaaatatattaattttttaaaattattaaatgtttattatatgttaggtatataagatattgtttgattaatttagattttttattttgtaaatataataaatatttttaaagtataaaaaatttagagagatgatttgtttttaagttgtagaataataaatttattttaaattattattgtttgataattatgttgttattgtttagtttagaaatattttttatttaatatgtatgttaataaggtatattttaaagtatttagtatgcgatgtatggtttaatatagaaaatttagagtataagttttaataaattaagttttataataattttatttgtatatgtgtttttataaagtgggttaggtgtattatttatttagtaatttaagatgatgatgttaatattaaatgatggatgttaagagtggtttattttttattatttttgtttataagggttttcgattttggttatatattagaattattgggggaattttttgaatttttaatgtttagtttgtaatttagattagttaaattagaatttgtggagttgagatttaggtattagtattttttaaagttttataggtgttttattattttaaaggtaagattataaaattaaataatttatattaggaaataaattaatatggtatatttataaagtagggtgatatatagttattaaaataattttgtggaagaatatttaatgaaatggaaatatgtttataatatattgttaattgaaaaataggataaaataatatatggagagtgtttttatttgtgtattattgtattttttttgtattttttttattttttaaaaaaaatgttgaataaaagatagaaataatggataataaagttttaatattgggtttttttagatggtaagataagtgaatttaattttattttttttttaaaatttttttaatgaaagagtattatgtaattttaaatataaaatttttaaataagttaagtatagtatttaaaaaatagattatattgtaagttattagggtatatatttaaataaaaagggtttatcgttagtagtatttttagtaaatataaatatttattatagtataaataaggtttttaatgttaattaagtataatttttatttatttgttagtttttgtttattttttgttatgcgtgttttttttaagttttgttttttaaggaatatgttaataaaataggttttgtttacgtattttttagaaagaggtagtattatttttgtttattcgtttggattttaggatagtatttataaagtgtagtttttttatttttttttaagggggattttatttaaatatatgaaagttaaagtatttgttatgaaggaatatttgaaaagtaatagttatgaagtattagttatgaagaattgaaatagagttttatgaagtaaattatataagtttgtttaagtatgggtaaaatattttaaaggtttttatagtgtttggtttatagttaggatttagtaatatttgatgaatgaataataaatgtatttgttttaatatgggtttaatgtagagaaaggggttatatttggtaaattttagattttataaagtttgaaatttttataattttataaaatatattttagtttttttgatatatatatatagatatagatatagatatagatatagatatagatgtagatatagatatattatttttaaggttaagtaatttaatttgattattttattaaaagattagaggggataaatgtaaaaatgtttggtaaatggtaggtttttagtaaattatgattattttaatattataaatatatatataaaaatatatatataattataaataatatgtatatattaagttaatgtatgttgtgttagttattagtttattaagatgtcgatgcgattatattaggagtaataatttttttattagtttaggttttgtttggattttttttttgatattatgttggttttgtgttattttttaatttttttttatattttgttttacggagtagatgtttgtattttatgttatatgattagagaggtagtatagtatagtattaattacgtaaagttggggaattggtttgaatttttgttttgttatttagttatatgattttgggtgagttaatttatttttttgggttttatttttattaattataaaataaggatagtgatagtattttttttatggttaaatgagaattaaataaattaataaatataaatgttttagaatcgggttttgtataaagtagtattcgatagatggggttttatttatttatttaataaaatgttaagtttgtattttaggtattgtttttggatgggaataattagtaataagagataggtattatgtagtttttgttgagtttattgtttaattagagaaatagataatagtattagtaattataatatggtgtgatggatgttgtgattagtagaatgaaaagaggaatttatgatatttttggaggggttagataaggttttttggaggaagtaatatttttatggagatttgaaagaaaattagaggtgggttaaatgaagagggagggtatagtgttttaggaaaatgtaaaaggtggtggaaaaattaatcggtaagggaaaataatgtatatttagggaatgagagaaaatgtagttttgaagaggtataaagtttaatagtagaaaatattagatattgggaatttttggtaaagttggtaagggttatattttaaagattttttaaatggagtttataattttttttgggattattatagataataaaagggagttaataaaaattatatttgtattttgaaattgttttttttgttttaaaaggggataagattatgataaggagattagttaggaagttttcgtaataatattgttaaataagtggtttggataaagttgagtggtatgaatgagataaagttaaagatttagtaattaagtatatgtttagttttggatatatttagtttaagataaagtgattagtttatttaaatagttttggttttatgtttattgatttagtgtaattattaattaggttttttttttatttttatttttttataggtgggatgagtattgggttaaaagtaattagattttaaggaataagaggattttatgtgttataggatatattttaggaaatattttaggtaaaatttttcggtttgtatgttgaaacgtttttaagttttttaagtggagacgttgatgtgtatttgaatattattttttattttttggaataagattgaggttagagatagatatttgggaattataagtttgtagatagttattgtagttatgtgagtggttgagaaaaatagatagtagtgaaaagagaaattatgaagaatagtaaattttttaagataagtaataaagaggagttttgaattagagtttgtatattaatagtaaataatttttaatttatatgtgttattgtttaaagtttagttttaagtatagagtttatagtaatgtttttgtattgatgtaattttgatttcgtttatttttttataagtttgtgaagttatttagaagtaatatggaatagtaaattgaattttggtattagaaagatttaaaattaatttaaatttaattgttttatggttaattattagttgtatgataggtaaataatttaatttgatttttaattttttttatatattatgaaaatgatttatttttttaagtttattttgatatataaatggaataatattttttaaatgtttggtatttatagatattaaaaaatgatagtaattattattattattagtatgatgttagtgttaaatattagatatatatttttttagagtagttgagttatacgtgtgggttgtgagaaaatttttttttttattttattgtttttgagattttttttattttttgtttgttggattgggtggttggttagttgaaaatgtttttaaatatttattttttttttttattaatgtttgaataaaatgtatttaatttttaaggtttatttaaataattatttttgaatgtatttttgattagtttttagttagagaagagtttttttatttttgataatttattaaattttttagattatttttttatggaattttttgtttgatggtatattatagttatttgtaagttatgtaattatttttggattattaattttttaaatttaaagatttatttttgtgatttttgtggtttcgaataaaatatttgttataagtataaataaatagaaataagtatttttataaatagaaattgaatagtattatttttatttttagattgttgtattaaggatttatatattaattgtttttatttatttattgatataaatgaatgatatattttttatatttattttattatagaatattattgaaatgtttatatttttttagatatttaagttttagaggttttaaaatagatatgaaaagaggatagtattttgggtttggggagaaagttagtgaattttgttgtaagttgttaagtttaaaataagttttatagaa

SEQ ID NO: 59 - DNA, 8178 bp, Artificial Sequence
  chemically treated genomic DNA (Homo sapiens)
  unsure 1962, 1973: n is a or g or c or t
tgatagtagataggttttttatttagttatatagtttttttgtttttttttgtatttgtagttatgttttgtagtgtgagagggagagaagtgatttttttagtaggttaatttttggtttttgggggagttttttttattattggtattgtgtttttgtgtttttttttttttgttttttttttttttgagatggagttttattttgttatttaggttggagtgtagtggtataatttcggtttattgtaatttttgttttttaggtttaagcgttttttttgttttagttttttaagtagttgggattataggtacgtattattatgtttagttaattttttgtggttttagtagagatagggttttatatgttggttagattggtatcgaatttttgattttaggtgatttgtttattttggttttttaaagtgttgggattataggtatgagttagtgcgtttagttgtttttgttttttttattagatgttttggattatggggtttttttgggtagatgttgtattatggggataagttatatattttttgaattggttttgttaagggggatataattagtttttgtgttattttattaatttttatttattttgagtgtaggttttttttttgtttgagtaatggttatagattttggttcggtatttttaagttgtatgttgaatttttgggataataagattggttggtggttttattttttagatttttgggttggtttttgggtgttttaggagatttgaaatgtttttaggttattaggaaagtatttaaatgtaagaaagtatttagatattttgagtttttggtgttataattgtaatttatattatttgattgatattattttttttgttatatgtttatgtttttagtaattattatttcgttgtttatttttgtaagtttaattttttaagattttatatataaatgagattttgtaatattagtttttttttgtttgattttttattagggtaatgtaaattaaaattataatgagataatattttatatttgagatgatggttattattaaaaaagataagagatagtataagcgttggtaaagatgtggagaaatagtaaagattgttagaaaattattagaaataatgggaaaagtatgaaataggtttttttttatagtttttagaaggagttaatttcgggttcggcgcggtggtttatttttgtaattttggtattttgggaggttgaggtagatagattacgaggttaggagatcgagattattttggttaatatagtgaaattttatttttattaaaaatataaaaaattagtcgggtttggtggtaggcgtttgaagttttagttattcgggaggttgaggtaggagaattatttaaatttgggaggcgaagttgtagtgagttaagattgcgttattgtattttagtttgggcgatagagtgggatttaatttaaaaaaaaaaagaagaaggagttaattttgttaatatatttattttagatttttattttttagaattaaaagataataaatttttgttattaagtttatttatttcgtgatattttgttatgttagttttagtaagttagtatataagtgatataatttttttatgagtttatgtttattaattaaaaatggatatttatggaggttaggaatttataattgataagtattgtaattatgatttaagtaatatattgatttatttgttttgttttttttagaatatagtttttttaaaatattattagggtgttataaatttttagtttgtgaaattatttgagtttatgaagttgaaagtatgtgtgtgtatgtatgtgtgtattatttttttaatttaaagtatattcgttgatattttgcgggtgagaaatttattatgaaagaagaatttttttaattgatttgggaaaatagttntttttttgggnaataaaaattcggttatttaaattaataatattttagtaaagtaattgtttaaagtatagtttttttttaaaatggagttttttatgttttttttttttatatagatatagtaatagtttgattttttttttttttttttatatattttaatagtatttgtttgattaatatattatgttttgttgattttatatgtggttggttttttggattcgattttgattgatggtatttgtttttacgttgttaataaagatatattagagattgggtaatttataaagaaaaagaggtttaatggatttatgtgttttacgtggttggggaggttttataattatggtggaaggtgaaggaggagtaaaagtatattttatatggtggttggtaaaagagagaaagtatgtttaggggaatttttttttataaaattattagattttatgagatttatgtattattataagaatagtattagaaagatttatttttatgatttaattattttttattgggtttttttcgtgatatatgggaattatgggagttataattggagatttgggtggggatatagttaaattatattagatggtttatttggtttttatgtagaatttttgttttttatttaatagtttttatttagttatagataagttttgtttttaattttcgttgatggaatgtatatataagaaatttttattgatggaatgaatatagaaggtgtttattgggaagaaaattggtttgaatttgagttgggttaaatgtttgtagttagtttgaatggttgttttttatgggaataatttatatttttaataaaattttttagtaattttttgattgattttaatgagttttaaagttttacgtagaagattttttagttgatagttagttttgggtatggattaagggtttttaattaattttgtaataagtttaagtagatattttttattgggtttaatttaattaaaattatttttttatgttttttttagtaacgtgttattattaagagaagtttggtttgtttagaggttaaatttagagggttttgaaattttatttttttttatattattttttagtatgttatttgattagttgtttattatttttgttgttgaatggagtgattattttaagggttcgaggtaggaggtttaggtatagtggaaatttttttaaagattaggatttttgttttgttttttgatatatgttgagtattaggaatagtgaatgaatgaaataaattgtgaggttttaaagagtcgaaatatttaaatattgggtataaggttgttgtttaattagtgttagatttttattttttttttgtgtttaggtcgatttgttattgtagttaaattatttgttgatttttaaataattagttagtggtatagttaggtttaggattttagtttttattgttttaattaatttattcgtaggtaggagtattttgaatggttttttattttaaaaaaattaaattaaaattgtttatttatttagagatagagttttattttgtagtttaggttcgagtgtagtggtgtaattatagtttattgtaatttttattttttggttttaaaaagtgtttgaattatagatgcgaggtattgtatttggttcgaatgttttgtttagataaagttatttttaagtcgttgtggggttttagataagtgatttttgaggagtttttatttataggaataaagtaattaaaaaaatgtattttagaatttataggtttatgtgagatatgatttttttaaatgaagatttagagtaatgggtaaaaaagaggtatttgtgtgtttgttgattgtttagttagtgaatgtatagtttttgttttatatttaggtattatttttttttgttttttgttgttaaatgttttatttttgggtaattttatgtttgttatcgtggatatgtcgtggttttttgaatttgtttgtgttgaagtaggatttttttttttgtttttttagtgttttaatattatgtatttaaggttggatatattattatttttaatttgttttatttattgcgttatttgtgattattggtttttggcgatttttattaaggtttttgttatgttttgttataacgattataaaagtaagttttatttataggaaaataagaattataatttttttattggttatgtgaaatttattatttgtaatttgtatagtataaatatagaatagtatattttttaatgtttgtattttgaaggtattttgtttgtgttttttaatttggttgtgttattgttggtgtttaatagtttttttagttatattggaaatttttagaaggtattttttatttgtttgtgtgttttttttagtgtttattagaggtttttgtatagggtaggttttttggagtagttgaaggttatatattttatgagcgggtagtagggttagaagtggttttcgtgttgtttaagtaagatttttttttgttttttgttttttgtattttcggtttgtatgtttttgtggttttttgggggtatatttttcggggttgggttagaaggtttgggtggttggttttaggttgttatatatttagggagatgttttcgtttttgggaattttggtttcgatttttgtaaatttcggtaaatgtgtaattcgattttgtatcggtttattttgtttagtagtgaaattttgtatcgattattaagattttttggaagaggttttagcgtgagtgtcgtttttggtatttgtttttttggttagtttgtggtttggttaagtgatgtaatttttttttttagtttgtgtataggtagtttgggaatagttttatttttattttttagttataaatagggtatcgtgattcggttaggggaagaagttgtcgttgttttgggtattatagtagaaggtaagtcgggggtttttttagttttttttcggttttgttttttttagatgtaattgagttgtgggttaggaggaaaaggtcgggaggaggtacggtgatgattgaaaaatttttttttttttataagattagttattcggacgcgggtttttttttattcggtgtttatttggggttttataggaggagttgtttttttttagtaataggataagatggttaggtttttttgttttcgttgagaaaagttagggtttttaggaacggagtagattggtataggaatagagttattatggttaagagtttatcgggtttttttgttattaggaggaatagtagggtttgtgtaggaattggggttggagggaagggtcgggttcggttagtttttagttgggatttttagagtggttattttatttttttttcgagatagattgtttgattgtgtgttattaggttggttatcgtttttttgaatttcgatttgtttatttataaaatggaattaataacgatgtttgggttttttgttttaggggttttggtatagttgaagagaattaatataatatgaaagtgttttttaagttttgggataagttaaaaggtagattttaattttattcgagggtagcgtagattggtgttttagttcgtggatgatagagttagggggtttggttttgagttttagttttgtttttttttagttgtgtgacgttgaataagttattggatttttttgtttttttgtaaaatagtatgaattaatttattaattatttttttaggatgtagtaggttttagggattattttaggaatgtgggttgtattagtaaatataatagcgggaattttgtttcggggtttatatttatattagagtaaatagataaagacgttggatagaataagtgtataattatatggtatagagtattggtatagagggttataaggagggaaaagggagttggatgagagagttgagagtgttcggtgtggtggggaaagttgtagggtgaaatattgtattagggaaattttagggaaggtgaggattatggtgaggttagaggggttgatatgagaatagtgttttgtaaatggtaggtattataggagtatgagtcgtcgtttttatttttagtatttagttcgggagaagtagggagatatagaaggggtaggtgttggttaagaggtaggggtaggagaggagaaggcggaggggtatttagggcgagggtgttaggtttattattttagagtattattatttttaggacgcggttgcgtgtagatttggaattagtttagggagtagtcgtagattataattgagaataaacgatagtttttgttttaaaaatggtttatggaattgcgtttttggagacgttgtttgagtaggagtagtatagtgagcgggttgtatcgattagcgttatttaaatttcgaatagttggcgtttgttaggtaggattttttagtagtcggtttttataggttttttttgttgatttgatttgatgtgattgtttagattaggtgtgaattggtggtttaggtttttttgtatagaaaggtttgtaagtagtagagagagttttttgttttatttttttatgttatgtggttttttttgagaatagcggatggagttaaatgtatggggagtggggtgagatggtagttgaggttagaatttggtatttgaatgattgaagtagaataaaatatattaggtattttagtagttgtatcgtgttgagggtaggtgttggttacgggtttgggtgagggaagttagttgttaatgtaagaagaatgattgggtatgtttagatgaagtagaaaaatttaggtattaaggtggttttgagttagtgatgatacgttatagttttaaggaagtttggtttagttttggggggatagaaaaggttaagaagtgacgatattgtagtatatttttttttataagaaatgagtgagatgtggtataaaatgttagaattgaatgaattaatagaataaacgtttatttttttaattaagaagagttagatgaaatgaattagtagggttagtttaagaattttttttgggggttttagggtagtttttatttgtagtagttgaggcggaagtttagttgtaaggtttttgagagaacgtggtgttggattcgtgtttagggtaggggttttaaattttgtttatatattagagttatttgagaattttttattttttttttttttttatacgtggttttagtatagattaaggaatttaattattattgggtaagttatgttaggtatgtatgtttttggggttttgtaggggatagcgttatgtagggatggttgagagttggttttggggttgagatacgtgggaaatatttggattttgggttgagtttgtggtgtttaatttcggttgtatgttgggattatagggagatgataaaattatttttagtttttattttagggttttcgaatgagtattttaggggtttaggaggtttttataaagatttattgattggtatatatttgtttttttaggaagagaatttatagttgtaggtaggagtatgttttaatttgtttgggttgttataagtattatagattgggagggtttaataatagaaatgtgttattttatagttttggaagttaaaagtttgggagttagttattagtagagttggttttttttgggttttttatttttggtttgtagatggtcgttttttttttgtgtttttatatggttttttttttgtgtttttatatggttttttttttgtgtgtgtttatgtttttattttttttttttataaggatataggttatattagattagggtttatttttatggttttattttaatttaattatttttttaaagattttgtttttaaataatggttatattttgaggttttggggttgaggattttaatacgggtattatggtcgttgggggaggtaggatataatttagttgatattggtgtattttgtatttggattatgtagatattttttatggagttttgaatttatttttttttttttttgtagatatgaatggatttattttgggttaaatggtgatagggaatattgagataatgaaagatttggttagatggtatttaaaggttagttaataattattttttattttttgtaaaatgatattttagg

SEQ ID NO: 60 - DNA, 8178 bp, Artificial Sequence
  chemically treated genomic DNA (Homo sapiens)
  unsure 6206, 6217: n is a or g or c or t
tttgaaatattattttgtaaagggtgaaaggtggttattaattgatttttaagtgttatttaattagattttttattgttttaatattttttgttattatttagtttagaataaatttatttatgtttataaaaaaaagaagaaatggatttaaagttttatggaaaatatttatatgatttaagtgtaaaatgtattaatattagttgaattatgttttattttttttaacggttataatgttcgtgttgaagtttttaattttaggattttagaatgtgattattatttggagataggatttttaaagagatgattaagttaaaatgaggttatgagggtgagttttgatttaatatgatttgtgtttttatgagaagaggagatgaggatatggatatatatagagggaagattatgtggggatatagagggaagattatgtggggatatagagagaagacggttatttataagttaaggatagaggatttagaggaaattaattttgttgatggttggtttttaggtttttagtttttagaattgtgagataatatatttttgttgttaaatttttttagtttgtggtatttatggtagtttaagtagattaagatatgtttttgtttgtagttgtaagttttttttttagagaaataagtgtgtgttaattagtaggtttttgtggaggttttttagatttttgagatgtttattcgagggttttagggtgagggttggggatggttttgttatttttttgtggttttaatatgtagtcgggattgagtattataggtttagtttaaagtttaagtattttttacgtgttttaattttaaaattagtttttaattatttttgtatagcgttattttttgtagagttttaaaggtatgtatatttagtatggtttgtttaatgatagttggattttttagtttgtgttgggattacgtataaaaaaaaaaaaaaaatagaaaatttttaggtgattttgatatgtaagtagggtttagaatttttgttttagatacgggtttagtattacgtttttttaaaggttttgtagttgggttttcgttttagttgttataaatgaaagttattttgagatttttagaagaggtttttgggttggttttgttaatttattttatttgattttttttgattgaagggatgaacgtttattttattgatttatttaattttaatattttgtattatattttatttattttttgtggaggggggtgtattgtaatatcgttattttttggttttttttgtttttttagggttaggttaggtttttttggagttgtagcgtgttattattgatttaaggttattttgatgtttagatttttttgttttatttaagtatatttagttattttttttatattggtagttggttttttttatttagattcgtaattagtatttgtttttaatacggtgtagttgttgaagtatttggtgtgttttgttttgttttagttatttaaatgttaaattttgattttagttattattttattttattttttatgtatttgattttattcgttgtttttaggaagagttatatgatatggaaaaatggaatagaaaattttttttgttgtttgtaggtttttttgtgtagagaagtttaagttattagtttatatttaatttagatagttatattaaattaggttaataggggaaatttgtgggaatcgattgttgggaagttttgtttgataagcgttaattgttcggggtttggatggcgttggtcgatgtagttcgtttattgtgttgtttttgtttaagtagcgtttttagagacgtaattttatgggttatttttggggtagagattgtcgtttgtttttagttgtgatttgcggttgttttttaagttggttttaggtttgtacgtagtcgcgttttgggagtaatggtgttttggggtggtgggtttgatattttcgttttgagtgttttttcgttttttttttttttgtttttgttttttggttagtatttgttttttttatgtttttttatttttttcgggttgaatgttaaaggtgaagacgacggtttatgtttttgtggtgtttgttatttgtagggtattgtttttatattaatttttttgattttattatagtttttattttttttgaggtttttttgatgtagtattttattttgtagttttttttattatatcgggtatttttaatttttttatttagtttttttttttttttttataattttttgtattagtattttgtattatgtagttatgtatttattttgtttagcgtttttgtttgtttgttttgatgtgaatgtgagtttcggaatagggttttcgttgttgtgtttattaatatagtttatatttttaggatagtttttgggatttattgtattttggagaagtagttaatgaattggtttatgttgttttgtagaggaatagagaggtttagtggtttgtttaacgttatatagttgggaagagatagaattaggatttagaattaggttttttgattttgttatttacgagttgaagtattaatttacgttgttttcgaataaaattggaatttgttttttagtttattttaaagtttagaaagtatttttatgttatattagttttttttagttatattagagtttttgagatagggagtttaggtatcgttattagttttattttataggtgagtaaatcgaggtttagggagacggtgattagtttgatgatatatagttaggtagtttgtttcgagggaggggtagggtgattattttggggattttagttggagattgatcgagttcggtttttttttttagttttaatttttgtataagttttgttattttttttgatggtaagaggattcggtggatttttggttatgatgattttgtttttgtattagtttgtttcgtttttgaggattttaattttttttagcggaagtaggaagatttgattattttgttttattgttgaggaggagtagttttttttgtaagattttaggtgggtatcgagtgggggaaagttcgcgttcggatgattggttttatgagaggggagaggttttttagttattatcgtgttttttttcggttttttttttttagtttatagtttagttatatttgagagagataaggtcgagaaggagttgagggggttttcggtttattttttgttgtagtatttagaataacggtagtttttttttttggtcgggttacgatgttttatttatagttgaggggtggggatggagttgtttttaggttgtttgtgtataggttggagaggagggttatattatttggttagattataggttggttagaaggatagatgttagaagcgatatttacgttgggattttttttaggaagttttagtgatcgatgtagagttttattgttgaatagagtgagtcggtgtagggtcgagttatatatttatcgaagtttgtaggagtcggggttaaggtttttagaaacgggagtatttttttaggtgtgtgatagtttgaggttaattatttaggttttttgatttagtttcgggagatgtatttttaagaggttatagggatatgtaggtcggaggtgtagagggtagagggtaggggagagttttgtttaggtaatacgggggttatttttgattttgttgttcgtttatgggatgtgtgatttttagttgttttaaagagtttattttgtgtaaaggtttttaatagatattggggaaaatatataagtaagtgaaaagtgttttttggaagtttttagtgtagttggggagattgttaaatattaataatagtatagttagattgaaagatataaataaaatgtttttaggatgtaggtattgaaagatgtgttgttttgtgtttatgttgtataaattgtaaatggtaagttttatatgattagtaaaagggttataatttttatttttttataggtaagatttgtttttgtagtcgttataatagggtatgatagagattttggtgagagtcgttagaagttagtgattataagtgacgtagtgggtgaggtaggttgggagtggtgatgtgtttagttttaaatatatggtattagggtattgaagggataggaaggaagattttgttttaatataagtaggtttaaggagttacggtatatttacgatggtagatatgaaattatttaggaatggaatatttaataataaagagtaggaagagatggtgtttggatatgaggtagaagttgtatatttattgattgaataattaataaatatataaatattttttttttatttattattttaaatttttatttaaaaaaattatattttatatgggtttgtaaattttgaaatatatttttttaattattttgtttttatagatagggattttttaaaaattatttgtttggggttttatagcgatttagaggtggttttgtttgaatagaatattcgggttaggtatagtgtttcgtatttgtaatttaaatattttttgaggttaggagatggaggttatagtgagttatgattgtattattgtattcgagtttgggttatagagtaagattttgtttttaaataaatagataattttaatttaatttttttaaaataagagattatttaaagtgtttttgtttgcgaatgggttagttggaatagtagagattggggttttaggtttggttgtgttattaattagttgtttgaggattagtaagtggtttaattgtagtaataagtcgatttggatataagggggaggtaaggatttagtattgattaagtaataattttgtgtttagtgtttaaatatttcggttttttaaagttttataatttgttttatttatttattatttttggtgtttagtatatgttagggaataaaataaagattttggtttttgggagagtttttattgtgtttgggttttttgtttcgggtttttggaatgattattttatttaatagtaaagataataaataattgattaggtaatatgttggaaagtggtgtaaaagaaaataaaattttaggattttttaaatttggtttttaagtaagttaaattttttttaataatgatacgttattggggagaatataagaaaataattttggttagattggatttaataaagaatatttgtttaaatttgttgtaagattggttaaaagtttttaatttatgtttaaggttgattattagttgggggattttttacgtaaggttttaaagtttattaaaattaattagaaaattgttagagaattttattgagaatgtaaattatttttataaggagtagttatttaaattgattgtagatatttgatttagtttagatttaggttagttttttttttagtaggtattttttgtgtttattttattagtggaagttttttatgtgtatattttattagcggaagttagggatagagtttatttgtggttaaatgaagattgttgaatgaaaagtagaggttttatatagaaattaaataagttatttgatatggtttggttgtgtttttatttaaatttttaattgtagtttttataatttttatgtgttacgggagggatttagtgggaggtaattgaattatgagggtggatttttttggtgttgtttttgtgatagtgtataagttttatgagatttgatggttttataaaggggagtttttttgaatatgtttttttttttttgttagttattatgtaagatgtgtttttgttttttttttattttttattatgattgtgaggtttttttagttacgtggaatatataagtttattaaatttttttttttttataaattatttagtttttgatatgtttttattagtagcgtgagaatagatattattagttagaatcggatttaggaaattagttatatatggagttagtagagtatgatgtattagttaggtaggtgttattgggatatgtagggaaaaaaaagagagattagattgttattgtgtttatatagaaagggaagatataagagattttattttgaaaaagagttgtattttaaataattgttttgttgagatgttgttaatttgggtgatcgagtttttattntttagaaaagnggttgtttttttaagttaattaaaaaaattttttttttatgatagattttttattcgtagggtattagcgaatgtgttttagattggaaagatgatatatatatgtatatatatatatgtttttaattttatagatttaaatgattttataaattgaaaatttgtagtattttaataatgttttaggaaaattgtattttaaagaaaataaaataaataaattaatatgttgtttgggttataattataatgtttgttaattataaatttttgatttttataaatgtttatttttggttaatggatatagatttataaaggaattatgttatttgtgtgttgatttgttaggattggtatgataaagtattacgaagtgagtggatttaataatagaaatttattgttttttagttttagaggatagaagtttaagatgaatgtgttggtagggttgatttttttttttttttttttttaaattgagttttattttgtcgtttaggttggagtgtagtggcgtaattttggtttattgtaatttcgttttttaggtttaagtgatttttttgttttagtttttcgagtagttgggattttaggcgtttgttattaggttcggttaattttttgtatttttaataaagatggggttttattgtgttagttaggatagtttcgattttttgatttcgtgatttgtttgttttagttttttaaagtgttaggattataggagtgagttatcgcgtcgggttcggggttggttttttttaagggttgtgaggaagaatttgttttatgttttttttattgtttttagtggttttttggtaatttttgttgtttttttatatttttgttaacgtttgtgttattttttattttttttgatagtagttattattttaggtatgaagtgttattttattgtggttttgatttgtattattttgatgaggagttagataaaaaaagattaatattgtagaattttatttatatgtggaattttaaaaagttaaatttatagaagtagatagcggaatggtggttattaggggtatggatatataataaagagggtggtgttagttaaatggtataaattgtagttataatattaaaagtttagagtgtttgggtgtttttttgtatttgagtatttttttggtggtttgagagtattttagattttttagggtatttagaagttaatttaaggatttggagaatggagttattagttagttttgttgttttaggaatttagtatgtagtttgggagtgtcgagttaagatttgtggttattatttaagtaggggaggagtttatatttagaataggtggggattgatggggtggtataggaattggttatgttttttttgatagggttagtttaaaaagtgtgtggtttatttttataatatagtatttgtttaaaggagttttatggtttagaatatttaataaaagaaatagaggtagttgggcgtattggtttatgtttgtaattttagtattttgggaggttaaggtgggtagattatttgaggttaggagttcgatattagtttagttaatatgtgaaattttgtttttattaaaattataaaaaattagttgagtatagtggtgcgtgtttgtagttttagttatttgggaggttgaggtaggagaaacgtttgaatttgggaggtagaggttgtagtgagtcgagattgtgttattgtattttagtttgggtgatagagtgagattttattttaaaaaaaaaaaaaatagaaaagaaaagatatagaggtatagtgttaatgatgagaggagtttttttaaggattagaagttgatttgttgagggggttattttttttttttttatattgtagagtatggttgtaaatgtaagaaaagataaaggagttgtgtgattgagtaaagagtttatttattgtta

SEQ ID NO: 61 - DNA, 6283 bp, Artificial Sequence
  chemically treated genomic DNA (Homo sapiens)
tttaattgtgatggtagggtgttaattttggattttttttgtttttttttgtgggtattgagtgttataaatttttttttatatattgttttgaatgtgttttagagattttgttatgttgtgtttttgtttttattggttttaaagaattttttaatttaggaatatagtgaattgataagatagagttttgtcgtagaggtataatttagtggagaagggaatgttaatttttttgggttattatatttaggatttaggaattatgttttttttaggtttgtattttgagaaagtttttttgtagaaatttatgtttattatatgtttgattatatttaagtaaatttgttatttttaatttaatgaaaatttaaaatatgtaagttattttaatatatggtatgttgttaaataaaaatttttattttaaaaataggttttaattattaataatttatattatttttttgatttataatgtggtttagtatagaggtgttagttattgtatgaaagataggaattgagttttttttttttttttagaaatttggaagtaagaaataaaagttagatatttatgtttttatttatttatataaattttatattttatttttttaaaatagttttatttatatatattttatatattatatagtttatttatttaaagaattaagtttattttaaagttgtttttttacgtattttaaatttggtttaaaagttttttagtatgtagtgaattgtaatttaattggatgttgaaaagattgaaatttatttttgtgttaattatagagttttagtatatttaaggtggttagttgtttaaattgtgtttaaataaggtaaatgttaaattataattaattttatttttgtattttatttttgttttttttatattatttttttttttttgtttataaattttttttaattacgaggtagtgttggagtttttttgaatttattgtagtttagtggttgttcgatttgtatattattttttgtttaattaagtattgttaaatttaatttgattaggtttgttttttaataaagatgtatagtttaatgttttttgtatgtttttaaatatataaaagttgtgtaatgattattataattaaatgtataattttttattatcgtttaattagtagatattattatttttttttatttttttatttttagtttaggtaattaaaattttttatagttatgttatttttgaatattttatataaatgaaattatataatatgtttttttttgtgattggttttttttaattagtataaggtttttaaggtatttttatgtgtaatatgtattttatttttttttattgttaaataatattttatggtatggagatattatattttatttatttattagttgatagatatttgatttatttttgttttggggttattatgaataatgttgttatgaatttttacgtttatatttttgtgtggatatatgtttttatttttaatgagtatatatttaggaatggaattgttgagttatatggtaattttatttatgtttagtattttgaagaattgttattgttttttaaaatggttgtattattttatatttttattaataatatatgagggatttaatttttttatattttggataatatttgttattatttgattttttgattatagttattttagtaggtttaaaattataattaattgtttttttgagttgtatttttttgttggttaataatgttgagtttttttatgtgtttgtttattttttttagagaaatgtatattaagattttttgattatttttaatggtgtttttattatttttgtgtgtgttttattatttttatatgttttatatataagtttttattaggtatataatttgtaaatatttttgtatatttttggttttttttttttatttttttgatatttttggaagtatagatgttgttaatattgatgaaattaaattaatttatttatttttttttgtattttttatgtttttggagttgtatttaagatggttttgtataatttaaggtaataaaggtttatttttacgttttttatttagttttataattttttttttaagtttgggtttatgatttattttgatttaatttttatatgtggtattataaggagtttaattttatttttttgtatgtagatatttaattattttagtattatttgtaataaagattatttattttgtatttttttaattttttttaaaatttagtggtttataaatgtaagggtttagtttgtggatataattttgttttattgatttttttatttattgttatgttagtattatattgttttgtttattgtaattttgtagtaaattttgaaattggtaagtttgtttttttttagaattgttttgattattttgggtttttcgtattgtatatgtttttaggataattttatttatttttgtaataaaagtttgttgggttttgatagagattttgtttaatttgtagattatttgaagattaatgttattgtaacgatattaaattttttaatttaagaatatggaatgttattttatttatttaggtttattttattttaataattttttttgtttgtttttagattataagttttagatttttttgttaaatttattttttagggttttttttgttttgttttgttttgttggttggttggtttgttttgagatggagttttattttgttatttaggttggagtgtagtggtataattttagtttatagtaatttttattttttgggtttaagcgatttttttgttttagttttttttttttgagtagttggaattataggtatgtattattacgtttggtttttttttttttttttttttttgtatttttagtagagatagggttttacgatgttggttagtttggtttcgaatttttgattttgtgatttatttatttcggttttttaaagtgttgagattataggagtgagttattatattaggttattttttagtatttttatttttttgatttatagtaagtaaaattgtttttatttttgaatttttaaatttttaatatagtttaaattagtgtgtttgattttatttttttttttaataaattagggtgttagaattgttttagtttttttgttttttttttgtttatgatgattaatgtatgaaggtatttgttgtattaaattttaaattttatattatttttattttttttgattttgatagatttggtatttttttatttggttgtaagtagaaagtttttgatttttttaattttttgaggtatggtagtatgtgaggtagggagaggatatagatttatatagtaagtggtgagaagttaatagtggaattgtttttttaattttatttgttgattgtttattgttagtgtatagaaatataattgatttttgtatattgattttgtattttaaaaatttgtttaatttgttttttagttttaatagttaattaattgattttttagggttttttaatataagattatgttatttataaatagaaattgttttattttttttttaatttggatgttatttattttttttttttgtttaattgtttttattagaatttttagtataaagttaaatagaaatggggagattagatattttgttttgtttttgattttagatataaaaacgttgtttttcgttattatgtgtgatattagttaagttttttataaataaattttatagtttgaggaagtttttatttttagtttgttgagtgttagtatgaaaaagtgttgaattttgtttaatagtttttaaaaatttttttagataattatgtaggttttgtttattttttatttttttaaatttatttttattgatatataatagatgtatattttttaggtatatgtaataatttaatgttttttattataaattcggagttgttttttcgtcgatgattttagcgtttgatagttaggattttaggtagtagcgagtgataggattttttaggtatatgtaataatttaatgtatttatataaagattaaattagtgtaattggtatatttattattttaaatatttgttttttttttatgttagaaatatttaagttatttttttttagttattttgaaatatataatagattattgtaaattatagttattttatttatttatttaatattaattgatttttggtaaattaatttaattttgttttttggtattaattttatttgattatggtgtatagtttttttcgtatgttattggatttaatttgtttatattttgttgagaatttttatttatatttttaagaaatattgatttgtagtttcgtgatgtttttatttggttttgttattagggtgatattggttttatagtatgagttgggagattatttttatttttttattttttggaagagtttgtgaagaattgatattattttttttttaaatatttattgggtttttaaaatatatttttaaaatgtaatttgggtagtatgtttaataggaataaatgagtgtttatttttgaattttataattttggaattaatttagtaatttatgatttataattgtattattaaagttcgagttatttataggaaagagaaagaagttttttaattcgtttttaaaagttttttaagtttagaaaaaaaaaatgttgaagaatacgaattttcgtaggaaatgatatttttgtatttttagttcgtttttttttacgatttttcgttaggcggggttcgggattaggtgaacgttgatttgatagttgatacgggacgattgtggtattatttttgttgtcgttaatatttcgagagggaggaggttgggtcgggagggtttttcggggcggggcggaggaggagggaatgtaaaatagagtttcgttttcggaatttaagaagtagtaacgttttttattataaattcggagttgttttttcgttaatgattttagcgtttgatagttaggattttaggtagtagcgagtgataggacgtttggatcggcgcgtcgttagtagttttgtcgggtcgcggcggtgatcgatggggagcggttggagcggatttagcgagtgagggcgtatagtcgggacgtcgaggcggcgggcgggagattcgtattagcgtagtcggttttcggcgggacgtgacgtagcgttcggggcgcgggtgagttcgcgcggatcgttaggtatgtttgggggattttaagggcggggtgttaagttttatgttacggtgttttaattgttggttttatattgggaagttttcggggattaaggaaagagcgatcgtagttttggttagcgtttgtttttggagttggttatatttttttaaattaggtgaggggtttttggaatgggagggaataaggtaggtttgtttgttacgtgtttcgaaatttttaatttattttaattaaattttttcgagtgtaaggaagaaatttatagaaataagatgtaatttaataaattttttttttgaggtttttagttaatttttgtattttagttattatttgagcgggaagtcggtatgattttgtaaggcgttcgtttaaaagttgtgttatttttgaggtgaagttaagagtgtttttatttacgttttttgttttttagttaatgtttttgtattgtttacgtttttttagttttttttttgtaaattatagcggtgggttttagatacgggatatcgttttaattttggttaaatttttttatttttagggtttttagatgttttttgaataattaaattgaggaaggagaagtaagatgtttttatattttaatttttatagttttagttaatgtatgtgtgtaattgagatagaattttagtaaaaggttttttgtttttaggattaaatagagtttttggtaggttattgttcgatatttaattttattttttaatttttttaaatgtttaggtaaatatttttatagtgttagtttgttatagtttttcgaagattttagtaatttttttttaaagcgtttttttttgtatcgtttttttttttgggtaattatttgtgatttggttattgagtttatttgggttttttttttttgtttgttgatagtttcgttaagtattaaaaatttattttttttttttaggagtttttttttaatgaaagtttgggtat

SEQ ID NO: 62 - DNA, 6283 bp, Artificial Sequence
  chemically treated genomic DNA (Homo sapiens)
gtatttaaatttttattaaaagagggtttttgaagggggggagtaggtttttaatatttaacgaggttattagtaaataaagagaagaggtttaggtgggtttaatagttaggttataaatggttgtttaaaaaaaaaaacggtgtagaaggagacgttttggggaagaattgttgaggttttcgggagattatagtaggttggtattatggagatgtttatttggatatttaagaaaattggaggatggagttgggtgtcgggtagtggtttgttagaggttttgtttagttttggaagtaggagattttttgttaaaattttgttttagttatatatatgtattggttaaggttgtagggattggggtgtggagatattttgtttttttttttttagtttgattatttaaaggatatttgggaattttgagggtgggagagtttggttaaggttggagcgatgtttcgtgtttaggatttatcgttatggtttgtagggagagagttaaagggacgtgagtagtgtagggatattgattgggaagtagagggcgtggatggagatatttttaattttattttaaaagtagtataatttttaaacgaacgttttgtagagttatatcggtttttcgtttagatgatggttaaaatataagagttaattaaaagttttaggaagaaagtttattgaattgtattttatttttgtagattttttttttgtattcggaagagtttggttaaaatggattgagaatttcgaggtacgtggtaaataaatttattttgtttttttttattttagaagttttttatttgatttgggaaagtgtggttagttttaggggtaggcgttgattagaattacggtcgttttttttttggttttcgagagttttttagtatagagttagtagttaggatatcgtgatatgaaatttagtatttcgtttttgaagttttttaagtatgtttggcggttcgcgcggatttattcgcgtttcgggcgttgcgttacgtttcgtcgagggtcggttgcgttggtgcgggtttttcgttcgtcgtttcggcgtttcggttgtgcgtttttattcgttgggttcgttttagtcgttttttatcgattatcgtcgcggttcggtagagttgttagcggcgcgtcggtttagacgttttgttattcgttgttgtttggggttttggttgttaggcgttggaattattggcgaggaggtagtttcgaatttatagtgaggggcgttgttgttttttgggtttcggggacgaggttttgttttgtatttttttttttttcgtttcgtttcgggagattttttcggtttaattttttttttttcgggatattgacggtagtaaggatgatgttatagtcgtttcgtgttaattattagattagcgtttatttggtttcgaatttcgtttagcgaggggtcgtgagggagagcgagttgggggtataggagtattattttttgcggagattcgtgttttttaatattttttttttttgaatttggaaaatttttaaggacgaattagagaattttttttttttttttatgagtaattcgaattttggtaatatagttgtggattatagattattggattaattttagggttatgaaatttaagggtggatatttatttgtttttattggatatgttatttaagttgtattttaaaaatgtattttaaaaatttaataagtatttaaagaagaaataatattaattttttataaatttttttaaaaaatagaagagtaaggatgattttttaatttatgttatgaggttagtattattttgataataaaattagataaagatattacgagattatagattaatattttttaagagtatagataaaaatttttaataaaatgtaggtaaattgaatttaataatatacgaaagggattatatattatggttaagtgaggttgatgttagaaagtaagattagattagtttattaaaaattaattaatgttagataggtgagtagggtgattgtagtttatagtaatttattgtatattttagagtagttaggagaaaataatttgaatgtttttagtatgaagaaaagataaatatttaaggtgatggatatgttaattgtattgatttgatttttatatgaatgtattaaattattgtatgtatttaaaaagttttgttattcgttgttgtttggggttttggttgttaggcgttggaattatcggcgaggaggtagtttcgaatttatagtgaggggtattaaattattgtatgtatttaaaaagtgtatatttattgtgtattaataaaaataaatttaaagaagtaaaaaatggataaagtttatatgattgtttaaaaaaatttttaaaaattattggataaaatttaatatttttttatgttaatatttaataaattaggaataggaatttttttaaattgtgaagtttatttatgaaaaatttaattaatattatatataataacggaagataacgtttttatgtttaagattaggaataagataaaatgtttagtttttttatttttatttaattttgtattaaaggttttagtgagggtaattggataagaaaaaaagataaatggtatttagattagaaagaaagtaaaataatttttatttgtagatgatatgattttgtattaaaaagttttaaggaattaattaattaattattagaattaagaaataagttgagtaagtttttagaatataagattaatatataaaaattagttgtatttttatatattagtaataaataattaataaatggaattaagaaaataattttattgttggttttttattatttgttgtgtgggtttgtgttttttttttgttttatatgttgttatgttttaaaaagttaaggagattaaggattttttgtttatagttaggtgaaaagatgttagatttgttaaggttaagagaaataaggataatgtgaagtttaaagtttgatgtagtagatatttttatatattagttattatagataaagagaaggtagagaaattgaagtagttttggtattttggtttgttagagaaggagatgaaattagatatattgatttgaattgtgttaaaaatttaaaaatttaaagataaaaataattttatttattatagattaaaagagtaaaaatattaagaaatgatttggtgtagtggtttatttttgtaattttagtattttgggaggtcgaggtgggtgaattataaggttagggattcgagattaggttggttaatatcgtgaaattttgtttttattaaaaatgtaaaagaaaaaaaaaaaaaaaaagttaggcgtggtggtgtatgtttgtagttttagttatttaggaggaggaggttgaggtagaagaatcgtttgaatttaggaggtagaggttgttgtgagttgagattgtgttattgtattttagtttgggtgatagagtgagattttattttaaaataaattaattaattaataaaataaaataaaataaaaaaaattttaagaaataaatttaataaaaggatttaaaatttgtagtttgaaaataaataaaaagaattgttgaaataaggtagatttaaataaatggaatgatattttatgtttttggattgaaagatttaatatcgttataatggtattaatttttaaatgatttataggttaaataaaatttttattaaaatttagtaagtttttattgtagaaatgaatggagttattttaaaaatatgtgtagtgcgaggggtttagaatagttaagataattttgaaaaagaataaatttattaattttaaaatttattgtaaaattataataaataagataatgtggtattggtatagtaatagatagaaagattaatggaatagaattgtgtttataaattaaatttttatatttatgagttattagattttgaaaagggttgaaaaaatgtagaatgagtaatttttattataaatggtattggaataattggatatttgtatgtagaagaatgaagttggattttttataatattatatgtaaaaattaagttaaaatggattatagatttaagtttaagagaaaaattataaaattaaatagaaaacgtaggagtaaatttttgttattttgggttatgtaaagttattttagatataattttaaaagtataagaaatataagaaaaagtaggtaaattaatttgattttattaatattaatagtatttatatttttaagggtattaagaaagtgaaaagaaaaagttaagaatgtgtaaagatatttgtaaattatatatttgataaggatttgtgtatagaatatataaagataataaagtatatataaagataataaaaatattattaaaaatggttaaaggattttaatatatatttttttaaagaaggtagataaatatataaaaaaatttaatattattagttagtaggaaaatgtaatttaaaggaataattagttatgattttaggtttattaggatagttataattaaaaagttagatagtaataagtgttgtttagaatgtggagaaattggattttttatatattgttggtgggaatataaaatagtgtagttattttggaaaatagtggtaattttttaaaatgttaagtatagatagagttattatatggtttagtaattttatttttaggtatatatttattagaaatgaaaatatatgtttatataaaaatgtagacgtgaaaatttatagtagtattatttataatagttttaaagtagaaataagttaaatatttattaattgatgaatagataaaatgtgatatttttatattataggatattgtttggtaataaaagggaataaagtatatgttatatatggaagtgttttgaaaattttgtgttaattgaaagaagttagttatagaagaagatatattatatgattttatttatatgaaatatttaggagtgatataattgtagagaattttgattgtttaggttgagagtggaggggtaggagggaatggtagtgtttgttaattggacgatgataaaaaattgtatatttgattatggtgattattatataatttttgtatgtttgaaaatatataaaaaatattgaattgtatatttttgttaaaagataaatttagttaaattaaatttaatagtgtttaattgagtaaagagtgatgtgtaaatcgggtagttattgaattgtaataggtttagagagattttagtattgtttcgtggttgaaaaagatttatgggtagaaaaaggaaagtgatgtaaagaagataaaaatgaggtatagaaatagaattggttataatttggtatttgttttatttgaatatagtttgaataattgattattttagatatgttgaaattttgtgattggtataagagtaggttttagtttttttagtatttagttaggttatagtttattatatgttgagaaatttttaggttaaatttaaaatacgtaaggaagtagttttaggataaatttaattttttaaatgggtgaattgtatagtatgtagagtatatataagtaaagttattttaaaaaggtaaaatatgaaatttgtgtagatgagtaaagatatgaatgtttgatttttgttttttgtttttaagtttttgaagagagaagaggggtttagtttttattttttatgtaatggttaatatttttgtgttagattatattgtggattaggaaagtaatataaattattaataattaaaatttatttttaaaataaaggtttttatttagtaatatattatatgttgaaatgatttatatgttttgaatttttattaaattaaaaatggtaaatttatttaaatataattaagtatgtagtaagtataggtttttgtaggagaatttttttagaatgtaaatttgaggaagatatggtttttgagttttgagtatggtgatttaggagggttagtatttttttttttattggattgtgtttttgcgatagggttttgttttattagtttattgtatttttgggttaagaagttttttgaaattaatgagaataaagatataatataatagaatttttgggatatatttaaagtagtgtgtagagggaaatttatagtatttaatgtttataagagaaagtagggaagatttaaaattgatattttattattataattaaa

SEQ ID NO: 63 - DNA, 12733 bp, Artificial Sequence
  chemically treated genomic DNA (Homo sapiens)
tggttttttaaagtgttgggattataggtttgagttattatatttggttaaattttttaaaatttaataggtattatttataatagtaaagatatagagttaatttaaatttttattaatggtagattggataaagaaaacgtggtatatatatattatggaatattatgtatgtataaaaaagaataagattatgttttttgtaggaatatagatgtaattggaggttattatttttaataaattaatttaggaatagaaaattaaatatagtatgtttttatttataagtggaagttaaataatgaaaatatattaatagagagagggaataatggatatgggttttatttgagggatgagggtgagaaaagggagaggtttagaaaaaaaaaaatttaggtgttgtgtttcgtatttaggtgatgaaataatttgtatattaaatttttaatttattagtttatttatgtattaaattggtataggtatttttgaattaaaataaaagttaaaaaatttttttaatttaatgggtgataaaattttgttatatatttattaataatgaatattattatttgtaattaaattttttattttgagataattgtagatttatgtgtagttgtaagaaaatatagggggttgggtacggtggtttacgtttgtaattttaatattttgggaagttagggcgggcggattattcgaggttaggagttcgagattagtttgattaatatggagaaattttatttttattaaaaatataaaattagttggatacggtggtatgtgtttgtaattttagttgtttaggaggttgaggtatgagaattgtttgaatttgggaggaggaggttgtagtgagttaagattttgttattgtattttagtttgggtaataagagcgaaatttcgataaaaaaaataaaaaataaaaaataaaaaaattttagtatgttgggaggttgaagtaggtggattatttgaggttagaggtttaagattagtttggttaatatggcgaaagtttatttttattaaaaatataaatattagtcgggtggtagcgatatgtatttgtaattttagttatttaggaggttgaggtaggagaatggtttgagtttgggagaggtggaggttgttgtgagtttagatagtagattttgttttaaaaaaaaaaaaaaagaaaaagaaaaaagaaataaagaaaatatagagaaattttaatgttttttgttcgtttttttttaatggtgatattttgtaaaattataataaaatattttaattaggatattgataatgataaagtaagatttagaatattttattattataaagtttttttatgttgtttttttatagttatatttattttttttttgttttcgttttttatttaatatttggtaattattaatttgtggtttatttttataatttggttattttaagaatattatagaaatgaaataatatattatgtaatatattggaattggtttttgttatttagtataattttttaaggatttatttaggttgttgtatttattaaagtttattttttttgttgagtattattttatggtatggttgtattaatttgtttaattgtttatttattaaaagaatttggttgggcgtggtggtttatatttgtaattttagtattttggaaggttaaggcgggaggattatttgatgttagaagtttaagattagtttggttaatatggtgaaatatcgtttttattaaaaatataaaaattattcgggtgtgggagcgtgtgtttgtaattttaggtatttgggaggttaaggtacgagaattattttgaatttgggagatagaggttgtagtgagtcgagattatattattgtattttagtttgggtaatagagagatatttttttttaaaaaaaaaaaaaaagaagttgaaataataggaaattggttatattaattgtaatatatttataggttagaatattttgttgttagagaggttgtataaggttagattaaggtgtttagatttttttttgagattagtagtttttaaagttttgtttatatgaatttaacggtataaatattagtaaatattttattagttgatattttaaagtacgatatatagtgaggatgagagttattattaattaatgagagggtatgtaaatttatatttttttttttttttttttttttttttttttttgaggtagttttgttttgttatttaggttggagtgcggtggcgtaattttggtttaatgtaatattcgttttttgggtttaaataatttttgttttttagttttttgagtagttgagtttatagacgtgtattattacgttcggttaatttttgtatttttagtagatatagggttttattatgttggttaggttggtttggaatttttgattttaagtgatttattcgtttcggtttttaaagtgttgggattataggtgtgagttattgcgtttggttcgtaaatttatattttaaagtgttttttttattgtttttttaaattttattatattttttataatatggttgataaagattagtatttatattagaaagagatttgttagttgtgtttttttttatttgtttgttgtgttggtaatttttatagtatttggaatttgttatttttttgtaggaatattttgaagttatttttttgttttcgtaggataatttagtaatatgattttacgtttagttagattgatacgatttattatatattgtaatgtattgtagaatgttgaaagggatgcgtgaggattttgttgtttattttttaggcgtggattttcgtttttttaggaagtttttgtttgatatcggtttttatgatttttagatagaggttagatgtatagattaagtgagattaatatatttattatgttatagaagattttaatttttatttttattttttattttttgagataagagttttttttcgtcgtttaggtcggagtgtagtggtgcgatttcggtttattgtaagttcggtttttcgggtttacgttatttttttgttttagttttgcgagtagttgggattataggttttcgatattacgtttagttaatttttttttttttttgtatttttagtagagatggggttttattttgttagttaggatggtttcgattttttgatttcgtgattcgttcgtttcggttttttaatgtgttgggattataggcgtgagttacgcgttcggttagaagagtttaattttttttttatttttaggttaaaaaatgagtagaggtcgggtacggtggtttacgttagtaattttagtattttgggaggtagaggttggcggattatttgaggtcgggagttcgagattagtttgattaatatggagaaatttcgtttttattaaaaatataaaattagttaggcgtggtggtttatgtttgtaattttagttattcgggaggttgaggtaagagaatcgtttgaattcgggaggtagaggttggtgtgagttaagattatgttattgtattttagtttgggtaataagcgttaaattttattttaaaaaaagaaaaaataaaattagttaggtgtggtggtgcgtgtttgtaatttaagttattcgggaggttgaggtaggagaattgtttgaattcgggaggtggaggttgtagcgagtttagatggtgttattgtattttagtgtgggcgatagagtgagattttataaaaaaaaaaaaaaatttaggggaaaaaaagtaattaaaaaaatataattataaaaataatataaattataaaataattatttgtatagtatttatattatattagttataagtaatttagagatgattaaagtgtacggaggaatgtgtataggttatatgttaatattgttttattttatatgagggatttgaatatagaagggttttggagtttatagaggttttgaaattaattttttttttttatgtttgggatgattgaattatatagtagtaaaaatgaatatatttaagttatatgtatgagttttataaatataatgtttatagaaaaaagtaagttgtagaagggtaaatacggttgatatataaaggtgttaaatatagaattatttaatgatatacggatgtagtaaaagtataagaaatgtatgtaaatttatttaaatttagggtgttggttatttggagtaaggcgaatgtttgggatgttagtaggtatttgataaatggtaatttaattttgttttggtttttttgagatagggttttgttttttcgtttaggtttaagtgttgtggtgggatgatagtttattgtagtttcgatttttaggtttaaaagattttttttttcgttttcgcgttttaagtagttgggattataagcgcgcgttattacgttcggttaatttttaatttttttttgtagagtttaggttttattgtgttgtttaggatggttttgaatttttgggtttaagcgattttttcgttttggttttttaaagtgttgggattataggtgtgagttatcgcgtttggtttgtaattttatttataataatttgtgtggtagatgttatttggtttattttatagatgaggaaattgaggtatagggaagtgaattggcggaattttagtttcgttgggttttgatattgaattaattggttgaattagcgagaggacggttcggttggtttttaggtttttttcggcgttttttttcggatcggtgagtgagatttttggggttacgttttgtgaaattttgaggtttttttttagggatcgaaatttttttcggtttcgttttgcgcgttgggtttcgttttagcgggttatgaatatgtaagtgcgaggaagatatttaaaggcgtcggcgttacgcgtatatttttgttcggcgttgttcgtttagtttttgtttttagattgaggtttagtttttttcgttcgtttttattacgagtgtcgttagtatgtttgataaattgttttataaagtcggtgagttttaggatttgtagtcggttgcggtcgttcggtattcgttcggggtttgttcgtggcgggggttgtagggtcgattcggggttttttggattttttggaatcgtagtttcggcgcgtttttggtcgcgcgaagttagttggaagttggagttttcgcgcggttatgagcgggtcgtttcgggtggtcgtggattataagttttagtatgtttcgcgacgtcggggtcgtcgcgcggtttgcgagtcgtaaattggcggcgtgtttcgcgggagagtatatttggttacggtttgggacggttggtatttgtcggattttgttcggggggtttgcgttcggttttttaggtttggatcggattttgtttagttgggcggtttcgacgagcgtttatttttttttgggttttttatagggacggcgagggtatttcggagggtgtatgaggagaggtttggaaagcgagttttaggtcggtttcgattttttttttttttgggattttgggttagttatttaatttgtggggttttttatttttttagtaggggtagttttgtagaaatttcgaagaaaatttggagtggtttgaaaaattttgttgttttatcgattgaagtgtaatatagggatagttaacgtttatttagtgttttttgtgggatcggtattgttttttagttttattttagttttatggttttatagggaaattgtttttattttatgatgagaattttgaggtagaggtaatttgtttttagttttatagttggtggtgatggagtaagattggaacgtaggttatttagatttttgagcgtatttttttattattgtgtgtaagcgaatatacgcggaataattttagtgaatttttagtaaaaattagtttagtttggttggtagttttttaagtaattttgatattattggatcgggtgtggtggtttatttttgtagttttagtattttgagaggtcgaggtgggcgaattatttgaggttaagagttcgagattagtttggttaacgtggtgaaacgttatttttattaaaaatataaaaattagttgggcgtggtggcgggcgtttttatttttagttattcgggaggttgaggtaggaggattgtttgagtcggggagacggaggttgtagtgagtcgagattgtattattacgttttaatttgggtaatagagtaagattttgttttaaaaaaaaaaaataaataaaaaaagatattattaagtttggagaatgttatttatatttatggaaatatttgttgtatatttggtgatttacgtgtgtttatataataatttttatagaggtggacgtaatttcgttatatagagtatgaaattgaggtttttgggaggtgatttgtaaagattttgttgaagtagtttattaagttgttattagagtagattgtttttattgtgtggatgttgaaattgaatttagaaaggttatgtgaaggttatattaatagtagagttggaatgggggtttgttatattgtggagagattagtgggttaggattggggttattgggttgtgtgggtggagataaagttggatttggggatggggagtttagttgggtggggttggaggaaggaggttttgttgtatgttagattttgattatatggtattatttttatttaaggcgtatagtaagttagggatgattatttatattttatagatgaagaaattgatgtttataggggtttttgttgttttttttggtttgttttggggataggtgtttttgtgatttttgtaagtttttagttttagagattgtagtatttagttttttttgtgtttttggagttgagggttttagggaaaattgtggggttggtatagtgttttcgagggtattgaaggagttatttttagttggagggatatgtggtggtggaggggtggagtttagtagtatagggtataatttattgttttatatagtcgggttttttttaggaggggttttgagaggggtttttgttttagttttgtttggttgttagttttggttttgcggttaattggttatggaatttgtagtaaatttttttttgggttttttttgggttattagtaaatgttgggatttagattaggtttagatttgtgttgtttttttttgttatttttgttacgtgttagttttttttatggattttttatttagttttgaggatagatatggtcggtaaatagttgttgattttttttttgagttaggttatgttggagatataaaggtgatttagagataggggtggtatagatatgtatatagataaagtagtattgtttttattttatgtgagtagatttgttatttgtttgtttttacggttattattttagtttggtttttttttttgtaggtttttttggattttttgtttcgtagatttatatagtagttaatggggtttttttaaaagataaatttggtttttgaatgttggtttttgaaaattgtaggttttttattttattgggattgaagttttaatttattttatgtttttatttgagttattttggtgtatttttggtttttttagtagggatatattaggtttttttttgtttttaggttttttttagtatttattgtgtgttaggtattgtattaggtgtttgagaggagttttttaggtcgagaattgtttgggttaaagttttgaggtggaaatgagtggagtttgtttgaagttagttaggaagtttgtgtgttgaatagttagtgagtggggaaagtggagagatggaggaggggtaggtagttatgtagatagggttcgaagattgagggaagttattggagggtttgtttgtttagttttgtttattttagtagaatgatggaggtgatgtaatttaaatttttaagagttttttttttttggttgttgtggggagaatggtatgttagagtatgggattagtgaagagagtgtggtagtgtttaattgagaagtggtagtgtatttatttttttattgttttttttggagatagagttttttttttatttaggttggagtgtagtggtgttattttagtttattgttattttcgttttttaggtttaagtaatttttttgttttagttttttgagtaggtgggattataagtgtttattattacgtttaattaatttttgtatttttagtagagatgggattttattatgttggttaggttgttttcgaatttttgatttcgggtgattcgtttattttggttttttaaagtgttgggattataggttgtgagttatcgcgtttagtttgagaagtgatagtttagatgaaggtggtgagatgtagttggattgtttatatattttatttgttgagttaaaaacgtgttgattgaggtgaaagaggaaaagaggaattaaattttaagtttttgggtagagtagttggttgaatggtggttttattttttaaaatgggaagattgggagagtaatcggtagtgggggtaaaggagttatgaggattttaatatgatatataatagatttaattggatatttaagtggaggtgttgtggaggtagttggattatatcgagttttaagtttaggggagtagtttgggttggatataaatacgtgggagttattttcgtagagaaggtatgtaaagttataagattggatgagtttaattggtaaatataagagaattgggagatgatggagttttgagggtttttaaattttaaagtttgttagttaaagaggaattaggaaggtaggtggaaaagtataggatagttatagaagttaagtaaagaaagggttttaggaaggagggtaagttatttatgtaatttgtgttgttggtagaaatatggttttaggtaattttgtattaggtatggagattaggttggtttttggacggaagagtagttttagtggagtatggaagtttttaaggaggagaggggatatggaattaggttttatggagtagggatagtgtagtgattagttttatagggtcggtgggtttttttttgtgtgcggcgacgagagagtgtagaaataaagatataagataaagagataagagaaaaggtagttgggttcgggggattattattattaatgcgcggagatcggtagtggtttcgaatgttgggttgcgttgttatttattgtatataaggtagaaggggtagggtaaagaatgtgagttatttttaaggataggtaaggttatgtgggttacgtgtttattggatagggggtttttttttgtttggtagtcgaggtagggagggagaggagatagagagaaagatagtttacgtaattatttttgtatattagggattattagtatttttattaatttattattgttatttagaaggtatagttaggtgtataggatggaatatgaaggtagattaggagtgtgattattgaagtatagtattatagggagatggttaggtttttggataattgtgggcgagtttggttgatgttaggttttttataagaggtggaggagtagagttttttttaaatttttttggggaaagggagatatttttttttttttcgtcgtcgttattttttagtttgttaagtagcgggtgttgttttttgatattttttgttatcgttggattacgattcgtttggtaacgggcgtttttttagacgttggcgttatcgttagattaaggagttttttggtggttttgttcgggtataatagaaggttcgtatttttgttttttggttatattttattatgtttttttagtttttatttttgtatggtttggttttttttaggttatgattatagagtaaggattattataatattggaataaaaagtaattgttataaattaatgattaatgatatttatatataattatatataagatttatatttagtataattatttttgttttatattttattatattggaatagttcgtgttttttgttttttgtttcggtgtttgggtggtttgtcgtttataggatagtttatttattttattttatttttttgagatcgagttttattttgttatttaggttggagtgtagtggtatgattttagtttattgtagtttttgttttttaggtttaagtgatttttttgttttagttttttgagtagttgggattataggtatttattattatattcggttaatttttgtatttttagtagagacggggttttattatgttggttaggttggttttgaatttttgattttaagtgatttgtttattttggttttttaaagtgttgggattataggtgtgagttatcgcgtttatttaatttatttgtggtaataggaaagagtgtttggtttgaagttgtagatgattgttataggtgattagtggattttataggggaaaagtggtttggttttgaatttattttagtgaattgggaagtgagattgttatttaatggggaaaggtgttggagggttgaggagagtagaaaatgggagtaaatttattaggaaaatgttataggattgttgtaatgtgttatgtgttttttatggttttaataaatatgatattttggttaggtgtggtggtttatatttgtaattttagtattttgggaggttgaagtaggtggattacgaggttaggagtttaagattagtttggttaatatggtgaaatttcgttttttttaaaaatataaaaattagttgggtatggtggcgagtttttgtaattttagttattggggaggttgaggtaggagaattgtttgaatcgggatttgagaggtggaggttgtagtgggtcgagatcgcgttattgtattttagtttggtttatagagttagattatgtttttaaaataattaattaattaattaattaaatatgatgttttggtggggttgtgattgtttttttgttgggtttagtgggttcggtgtagtggagggtcgggtttaattgggttgagagttttgttaagtgagtttttaaagggaaagggggtagaagggatattagaaattggtaggatgaattgaatagaggtttttatttgataggttatagttttgttggagtttggtttttggaaggagaaaattagaaagatgaggcgtggttagagttgggtgtttgaagtttagatttttaaggagagttattattggtgatggtttattagggtaggagggttggggtgggtggtttgagttgaggtatagtcggagtggttttttatgcgggaggcgtgttttatttttgaaattgttaaaatgtattgtaggaagttgattgatagataattttattgattattaaatttttagattattaaattttttatagagttttttgttttttatcgtttatttttttgggtgtttggtaggattttagtttttttaaagataaaaattattaggagttttagatttgttgaattatattttttaggggagatttataagtatgttagaggaatattttttatcggggaagtttgtaaattttgatttagggattgatttagggtatgattttggaagtggattagtgtggtaggggagagtattgagatagtgagttagtttataataatattttttttttttgtttgagaatttgaataaattcgagatattttaggtggtagatagtatttgaaatattttttgttattagtaattatgaagttagaggatgtagattagtattttaggtggtaatatttgaaatattattttttattattaataattttaaagttagaggatatagattaatatgaaatttaaatgattttgtttattgaatttttagatttagtagttatttaattagttgtaggtaaggtgggttagggtaggttggtttttggaaaagtagagaatattagttttttgtaagtgggtaggtgagtgtttgtttgtaaaaagaagggagagttaagttgagtatattattttttttttttagttttattggttagataagtttattttattttttttggggtagagaggttaagagtattcgttatacggatgagtttttttaggtggaaagaaatattaggagtggggaagtatttttatatttaaaaggagattaaggaattgttaaatttaaaatgttagatagtatttataagtgttgaattatcgagagtgatgattgagagaggaagatggagaattagtagttaatatttttagggagtttttagggagtgaggagtggtttggaggttggtaggtgttagtagaaaggtagggtagtgggaagtattatgtgagttattttttaaagggacgtttttttatgttgtaatttttgtgtttttgtgtgattaaatgtgtttttttataagttagaaaggtgtaggtaggtagggatcgtgttttttttgagtattttggttttataaatatttgttgtatgagtgagagaatgcggtgatagagtgttaagttttagtgtgttgagtttatacgtggatcggggtttatgtagtgatcgttttttttggttggtgggatgaggggatttacggaatttttatttgttttttttcgtagt

SEQ ID NO: 64 - DNA, 12733 bp, Artificial Sequence
  chemically treated genomic DNA (Homo sapiens)
gttacgggaggaaataggtgggagtttcgtgagtttttttattttattaattaagaggggcggttattgtatggatttcgatttacgtgtggatttaatatattagggtttagtattttgttatcgtatttttttatttatgtaataagtatttatgaagttagagtatttaagaaagatacggtttttgtttatttgtatttttttgatttgtgggagaatatatttaattatatagggatataaaaattataatataaagaagcgtttttttgaaaaatagtttatatgatattttttattattttgtttttttgttgatatttattaatttttaggttattttttattttttaaagattttttaaagatgttagttgttggttttttattttttttttttagttattattttcggtgatttaatatttataaatattatttaatattttggatttgatagttttttgatttttttttagatgtaaaaatgtttttttatttttgatgtttttttttatttggaggaatttattcgtataacgaatgtttttggtttttttgttttaggggaggtggggtgagtttgtttgattagtaaaattgagaggaaaaaatggtgtgtttagtttagtttttttttttttttgtaagtaagtatttatttgtttatttgtaggaagttggtgttttttgtttttttagagattaatttattttggtttattttgtttgtaattgattgggtaattgttgaatttgggggtttaataagtaggattatttggattttatattaatttatattttttggttttgaggttattagtaataaaaggtaatattttaggtgttgttatttaaaatattaatttatattttttggttttatggttattagtaataaaaagtattttaggtgttatttgttatttaaaatgtttcgaatttgtttaaatttttaggtaggaaagaaggatattattatgagttaatttattattttaatatttttttttattatattggtttatttttaaggttatattttaggttagtttttaggttaaagtttgtagattttttcggtaagggatgtttttttggtatgtttgtaaattttttttggaaaatatgatttagtaggtttaagatttttggtgatttttatttttagggaagttgagattttgttaaatatttaaagaggtaggcggtgggaggtaaaggattttgtagagaatttaataatttaagaatttaataattaataaaattgtttgttagttagttttttatagtgtattttaataattttagagatgaaatacgtttttcgtatgagagattatttcggttgtgttttaatttaagttatttattttagtttttttattttagtaggttattattagtgatagttttttttggaaatttggattttaagtatttaattttagttacgttttatttttttggttttttttttttagaggttaagttttaataaggttgtggtttgttaggtgagaatttttatttaatttattttattaatttttagtgttttttttattttttttttttttgagaatttatttggtaaaatttttagtttaattaaattcgattttttattgtatcggatttattgaatttagtaggaggataattataattttattaagatattatatttaattaattaattaattaattattttagagatatagtttggttttgtagattaggttggggtgtagtggcgcgatttcggtttattgtaatttttattttttaggtttcggtttaagtaatttttttgttttagtttttttaatagttgggattataggaattcgttattatgtttagttaatttttgtatttttagaggagacggggttttattatgttggttaggttgattttgaatttttggtttcgtgatttatttgttttagttttttaaagtgttgggattataggtgtgagttattatatttggttaagatattatatttattaagattataaaagatatatagtatattgtagtaattttatgatatttttttagtaaatttatttttattttttattttttttaattttttaatatttttttttattgaatgataattttattttttaatttattgagatgaatttagaattaggttattttttttttatggaatttattagttatttatagtagttatttatagttttagattaggtatttttttttgttattatagatgagttgaatgggcgcggtggtttatatttgtaattttaatattttgggaggttaaggtgggtagattatttgaggttaggagtttaagattagtttgattaatatggtgaaatttcgtttttattaaaaatataaaaattagtcgggtgtggtggtgggtgtttgtaattttagttatttaggaggttgaggtaggagaattatttgaatttgggaggtagaggttgtaatgagttgagattatgttattgtattttagtttgggtgatagagtgagattcggttttaaaaaaataaaataaaatagatgagttgttttgtgggcggtaagttatttaggtatcgaggtaagagatagaggatacgagttgttttagtataataaaatataaaataagaatagttatattagatatagattttatatatgattatatatgaatattattaattattagtttgtagtaattattttttattttaatattatgataatttttgttttataattatagtttaggaaaaattaggttatatagagataggagttgaggggatatagtgaggtgtgattagaagataagagtgcgagttttttgttatgttcggatagggttattagagggttttttggtttagcggtgacgttagcgtttgggaagacgttcgttattaggcggatcgtggtttagcggtagtaaaaggtgttaaggaataatattcgttatttagtagattgggaagtggcggcggcgggaggggggggggtgtttttttttttttaggggagtttagaaaagattttgtttttttattttttgtagagggtttgatattagttaggttcgtttatagttatttagaggtttaattatttttttgtgatgttgtgttttagtggttatatttttagtttgtttttatgttttattttgtatatttggttatgttttttagatagtagtagtaaattagtaaaaatattaatagtttttgatatgtagaaataattgcgtaagttgtttttttttttgttttttttttttttttgtttcggttgttaggtagggaagggttttttgtttagtggatacgtgatttatatgattttatttatttttggaggtgatttatattttttattttgttttttttgttttatatgtaataaataatagcgtagtttaatattcggggttattatcggttttcgcgtattgatggtagtggtttttcgggtttagttgtttttttttttgtttttttgttttgtatttttatttttatattttttcgtcgtcgtatatagggagagatttatcgattttatggggttggttattatattatttttgttttatggggtttgattttatatttttttttttttttaaggatttttatattttattaaaattgttttttcgtttaaagattagtttgatttttatatttgatgtaaaattatttaagattatgtttttattagtagtatagattgtatgaatgatttgtttttttttttgaaattttttttttatttggtttttgtgattgttttgtgtttttttatttatttttttggtttttttttagttaatagattttagggtttgggggtttttagggttttattattttttagtttttttatgtttattaattaagtttatttagttttatggttttatatattttttttacggggatgatttttacgtatttatatttagtttaaattatttttttgaatttgagattcgatgtgatttaattgtttttatagtatttttatttggatgtttagttggatttattatgtgttatgttggagtttttatggtttttttgtttttattatcggttatttttttaatttttttattttaggaaatgaaattattatttaattagttattttgtttaaaaatttaagatttgattttttttttttttttttattttaattagtacgtttttggtttaataagtgaaatatataagtaatttaattgtattttattatttttatttaaattgttattttttaggttgggcgcggtggtttatagtttgtaattttagtattttgggaggttaaggtgggcggattattcgaggttagaagttcgagagtagtttggttaatatggtgaaattttatttttattaaaaatataaaaattagttgggcgtggtggtgggtatttataattttatttatttaggaggttgaggtaggagaattgtttgaatttgggaggcggaggtggtagtgagttaaaatagtattattgtattttaatttgggtgagagggagattttgtttttaaaaaaaataataaagaaataaatatattgttattttttagttggatattgttatattttttttattggttttatgttttaatatgttattttttttatagtagttagaagagggaggtttttaaaaatttaagttatattatttttattattttattaaagtaaataaaattaaataagtaaattttttaatggttttttttaattttcgggttttatttgtatgattgtttgttttttttttatttttttattttttttatttattagttgtttaatatataggttttttgattgattttaggtaagttttatttatttttattttagggttttaatttaagtagttttcggtttggaaggttttttttaagtatttaatatagtatttggtatatagtaggtgttgaaaaaaatttggaaataggaaagaatttagtatatttttgttagaggaattaagagtgtattagggtgatttaaatagaggtataagatgagttgggattttagttttagtgaagtggggaatttatagtttttaggggttagtatttagagattagatttgttttttgaaaagattttattggttgttgtgtggatttgcggagtaagagatttagggagatttgtaaggagagagattagattggggtggtgatcgtggagatagataagtggtagatttgtttatataaaatggagataatattattttatttgtatgtatgtttgtgttatttttgtttttgggttatttttgtgtttttagtatgatttggtttagagaaggggttagtaattgtttatcgattatatttgtttttagaattgaatgaaagatttatgagaggggttggtacgtgataagggtggtaaagaaaaataatataaatttgaatttagtttgagttttagtatttattaatgatttagagaggatttagagaggagtttgttgtaggttttatagttaattaatcgtagaattagaattggtagttaggtagggttagagtagaggttttttttaaggttttttttgggaggggttcggttgtatgggataatgggttatgttttgtgttgttaagttttatttttttattattatatgtttttttagttaaaaataatttttttagtgttttcgaggatattgtgttagttttatagttttttttgggatttttaattttaaaggtataggagaggttagatgttgtaatttttggagttaaggatttgtaaaagttataggaatatttgtttttaggataagttaagaggaatagtaagagtttttgtaaatattagtttttttatttgtaaagtgtggataattatttttagtttgttatgcgttttaagtaaagataatgttatatgattaagatttggtatatagtagggttttttttttttagttttatttagttaagttttttatttttaaatttagttttatttttatttatataatttaatggttttaattttgatttattaatttttttatagtatgataagtttttattttagttttattattgatgtgatttttatataatttttttgggtttagttttagtatttatataatggagatagtttattttggtagtaatttgatgaattattttaatagaatttttgtaagttattttttaagggttttagttttatgttttatataacgggattacgtttatttttatgaagattattgtgtaaatatacgtaaattattagatatatagtaagtgtttttataaatgtggatggtattttttagatttaatagtgtttttttttgtttgttttttttttttgagatagggttttgttttgttgtttaggttggagcgtggtggtgtaatttcggtttattgtaattttcgttttttcggtttaaatagtttttttgttttagtttttcgagtagttgggaatgaaggcgttcgttattacgtttagttagtttttgtatttttggtagagatagcgttttattacgttggttaggttggtttcgaatttttgattttaagtgattcgtttatttcggttttttaaagtgttgggattataggggtgagttattatattcggtttaatagtgttaaagttatttgaaaagttattagttaaattgaattggtttttgttgaaaatttattaggattgtttcgcgtgtattcgtttgtatatagtggtgaaagggtgcgtttagagatttagatggtttgcgttttaattttgttttattattattagttgtaagattgagggtaagttatttttgttttaggatttttattataaaatgagaatagtttttttatagagttatgagattagaataaagttagaaggtagtgtcgattttataggaaatattaagtaaacgttaattatttttgtattatattttaatcggtgggatagtaggattttttaaattattttaaatttttttcgagatttttgtaaggttgtttttgttggaggggtgggggattttataggttgggtaattggtttaaagttttaggggagaggaggatcggagtcggtttggggttcgttttttaggtttttttttatatatttttcggggtgttttcgtcgtttttgtaggaggtttagagaggggtggacgttcgtcggggtcgtttagttggatagggttcggtttaggtttaggaggtcgggcgtaggtttttcgagtagggttcggtaggtgttagtcgttttaggtcgtggttaggtgtgttttttcgcggagtacgtcgttagtttgcggttcgtagatcgcgcggcggtttcggcgtcgcggggtatgttgggatttgtagtttacggttattcggaacggttcgtttatggtcgcgcgagaattttaatttttagttggtttcgcgcggttagaaacgcgtcgaggttgcgattttagggggtttagagagtttcgagtcggttttgtagttttcgttacgaataagtttcgggcgggtgtcgggcggtcgtaatcggttgtaggttttgggatttatcgattttgtagggtagtttgttagatatgttggcggtattcgtgatggaaacgggcgaagggggttgggttttagtttgggaataggaattgggcgggtagcgtcgagtagggatatgcgcgtggcgtcgacgtttttaaatatttttttcgtatttgtatatttatgattcgttggggcggggtttaacgcgtagggcggagtcggaggggatttcgatttttgaaaagaagttttagaattttataaggcgtggttttaggagttttatttatcggttcggaagggagcgtcgggagaggtttgagagttagtcgggtcgttttttcgttggtttagttagttgatttagtgttaaaatttagcggaattgaaatttcgttagtttatttttttgtgttttaatttttttatttgtaaaatgggttaaatgatatttgttatatagattattataagtaaagttgtaggttaggcgcggtggtttatatttgtaattttagtattttgggaggttaaggcgggaggatcgtttgagtttaggagtttaagattattttgggtaatatagtgagatttgaattttataaaaaaaaattaaaaattagtcgggcgtggtggcgcgcgtttgtggttttagttatttgggacgcggaggcgggagggaggattttttgagtttggagatcgaggttgtagtgagttattattttattatagtatttgagtttgggcgaaagggtaagattttattttaaaaaaattaaaataaagttaagttgttatttgttaggtatttattgatattttaaatattcgttttattttaagtaattaatattttgaatttaagtaagtttgtatatattttttatatttttattgtattcgtatattattaaatagttttgtgtttagtatttttatatattaatcgtatttatttttttgtaatttgtttttttttgtgagtattatatttatgagatttatgtatatagtttgagtatatttatttttgttgttgtataatttagttattttaggtatgggaaggggaaattggttttaggatttttgtggattttaaaatttttttatgtttaagttttttatataaaatgaggtagtattggtatataatttatgtatattttttcgtatattttaattatttttagattatttataattaatataatgtaaatgttatgtaaatggttgttttgtaatttgtattatttttatagttatgtttttttaattgtttttttttttttgaatttttttttttttttatggagttttattttgtcgtttatattggagtgtagtggtattatttaggttcgttgtaatttttatttttcgggtttaagtaatttttttgttttagtttttcgagtggtttggattataggtacgtattattatatttggttaattttgttttttttttttttgagatagagtttggcgtttgttgtttaggttggagtgtaatggtatgattttggtttatattaatttttgtttttcggatttaagcgatttttttgttttagtttttcgagtagttgggattataggtatgagttattacgtttggttaattttgtatttttagtagagacggggtttttttatattggttaggttaatttcgaattttcgattttaggtgattcgttagtttttgttttttaaagtgttgggattattggcgtgagttatcgtgttcggtttttatttattttttaatttaaaaatgagaaaagaattaaatttttttggtcgggcgcgtggtttacgtttgtaattttagtatattgggaggtcgaggcgggcggattacggggttaggaaatcgagattattttggttaatagggtaaaattttatttttattaaaaatataaaaaaaaaaaaaaattagttgggcgtggtgtcgggagtttgtagttttagttattcgtaaggttgaggtaggagaatggcgtgaattcgggaggtcgagtttgtagtgagtcgagatcgtattattgtatttcggtttgggcgacggagggagatttttgttttaaaaaataaaaaataaaaataagaattaaggttttttatgatatagtaaatgtattggttttatttgatttgtatatttgatttttgtttgagagttatgagggtcgatgttaagtagagattttttgagggaacgagggtttacgtttgggaggtgggtagtagggtttttacgtattttttttagtattttgtagtgtattgtagtgtgtagtgagtcgtgttagtttaattaaacgtaggattatgttattaggttgttttacgagaatagaaaaatggttttaaaatatttttgtaaagaaatggtaagttttagatattgtgaaaattattagtatagtaaataagtagaaaaggatatagttgataggtttttttttggtatgaatgttggtttttgttagttatgttgtaaggaatgtaataaaatttgagaaaataatgaaaaagatattttgaaatatgaatttacggattaggcgtagtgatttatatttgtaattttagtattttggaagtcggggcgagtggattatttggggttaggagttttagattagtttggttaatatagtgaaattttgtatttattaaaaatataaaaattagtcgggcgtgatggtgtacgtttgtaaatttagttatttaggaggttgagggataagaattgtttgaatttaggaggcggatgttgtattgagttaagattgcgttatcgtattttagtttgggtgatagaataagattgttttaaaaaaaaaaaaaaaaaaagaaaaaaaaagaaatgtgaatttatatgtttttttattaattaatgatgatttttatttttattgtatatcgtgttttgagatattagttaatgagatatttgttaatatttgtatcgttaagtttatatgaataaaattttggagattgttggttttaggagaaggtttaagtattttagtttggttttatgtaatttttttagtagtagaatgttttagtttatggatatattgtaattgatatagttaattttttattattttagtttttttttttttttttttgagaaagagtgtttttttgttgtttaggttggagtgtaatggtgtgatttcggtttattgtaatttttgttttttaggtttaaagtgattttcgtattttagttttttaagtatttgggattataggtatacgtttttatattcggataatttttgtatttttaatagagacggtgttttattatgttggttagattggttttgaatttttgatattaagtgattttttcgttttggttttttaaagtgttgggattataggtgtaagttattacgtttagttaggtttttttaatggatgaatagttaaataaattggtatagttatattatgaaataatatttagtaaaaggaataaattttgataaatgtagtaatttggatgaatttttagagaattatgttgagtgataaaaattaattttaatatattatatagtatattattttatttttataatatttttgaaatgattaaattatagaaatgaattatagattagtggttgttaggtattaggtaggggacgggagtaagagagaggtaaatgtggttgtaaaagggtaatatgaggaaattttgtggtgatggaatgttttggattttgttttattattgttagtattttagttgagatgttttattatggttttgtaagatgttattattgggagaaagcgagtaaagggtattgggatttttttgtgttttttttgttttttttttttttttttttttttttttttttgagatagggtttgttatttaggtttatagtaatttttattttttttaggtttaagttatttttttgttttagttttttgagtagttgggattataggtgtatgtcgttattattcggttaatatttatatttttagtagagatgggttttcgttatgttggttaggttggttttgaatttttgattttaaatgatttatttgttttagttttttaatatgttgaggtttttttgttttttgttttttgttttttttgtcggagtttcgtttttgttgtttaggttggaatgtaatggtaaaattttggtttattgtaattttttttttttaagtttaagtaatttttatgttttagttttttgagtagttgggattataggtatatgttatcgtgtttagttaattttgtatttttagtagagatggggtttttttatgttggttaggttggtttcgaatttttgatttcgggtgattcgttcgttttggttttttaaagtattgggattataggcgtgagttatcgtgtttagttttttgtgtttttttataattgtatatgaatttataattattttaaaataaaaggtttaattataaatgataatgtttattgttggtgagtgtatggtaaagttttgttatttattaaattaaaaaaattttttaatttttattttagtttaggggtatttgtgttagtttggtatataggtaaattggtgagttgggggtttggtgtatagattattttattatttgggtacgaagtatagtatttaagtttttttttttttaaatttttttttttttttatttttattttttaaatagggtttatgtttattgttttttttttttgttgatgtgtttttattatttagtttttatttataagtgagaatatgttgtatttggttttttgtttttgggttagtttgttaaggataatggtttttagttgtatttatgtttttgtagaggatatgattttgtttttttttatgtatgtatagtattttatggtgtatatgtattacgttttttttatttagtttattattaatgggaatttaggttgattttatgtttttgttattgtgaatagtatttgttaaattttaaaagatttggttaggtgtggtggtttaggtttatagttttagtattttgggaggtta

SEQ ID NO: 65 - DNA, 9876 bp, Artificial Sequence
  chemically treated genomic DNA (Homo sapiens)
tttagttaatagttggtgggttgcggagggggtagagggtagagttttgtttttttagggtttgtttatcgagagggttttagtttattagttgggttttttggtaagatcgtaaggtagatggttaattttgtaaaaaagaagtttgggtgcgtggtttacgtttgtaattttagtattttgggaggtcgaggcgggcggattatgaggttaggagatcgagattattttggttaatatagtgaaattttgtttttattaaaatataaagaaattagtttgttgtggtagcgggcgtttgtagttttagttattcgggaggttgaggtaggagaatggcgtgaattcgggaggcggagtttgtagtgagtcgagatcgcgttattgtattttagtttgggcgatagagcgagattttgttttaaaaaaaagaagaaaaaaatttggtattattttttttagtttattgagaaaagtgacgtcgtttggatatatatttatagtgggacgtagtggagaggttagattagggaaattgaggtttaattagtggggtaggtttgaggtaagagtagtaggaggggagggggtagggggttttttttttaatgtttttggttgagtacgggtttttttgagtttatcggtgttcggagttgtttttttgatttggataattatgtggaatggttatttcgtttttaataagtagaggtaattttttttttatagtgaggaaattgaggtttagtgaggaagtttgtggttaggagggtgttaggggtttttataaagtgttttgaggggatttattttttttttgatgttagattatttggttaggttgtaggagtagggtttagggtttttaggagttaaggtttggttagggttttatgtttttcgaggtttttttgatttaggtttttggtttttgggagtttggtttttttagggagttataggggatggaatttttatttggagtaggggagaaggtatggagtttaggtttgtttgaggggttaaggttgagttttttttagttttttttttgttttgttattaggatttggttttttttaatttttatatatattatatgggtcgcgtttttttattttgtaggttgagaatatttgacgtgatttgggtatttgaggggtattcggtatagtaggagtatggatttggagaatttttgttttttcgtgtattaaggttcgagtcgtggttttgttttttagtagttgcgtgattttggttaagtttttttcggtaataggttttagtttttatatttgtggatggtattaattacgatgatgatttgaggagatcgttttgttgatggagtgagtagaattataaagtttttagggtttagttcggggtatggtaggttcgtaggcgtttaagggtatagtatagatgtgggagaaagggttgcggggttttttcgttttagtcgaggatacggggtttagggatggagtttaatattgttttagagttttgttgtttaggtgttttttggggaaattgaggtttagttttataaaggtattagttttattgaagatagggtcgagtttttagttttttatttttttttaggggtttgtgttatttttagggagtcgtggcggttttatgttatttgcgggtaaggggttggtgtggaaagttttacggtatggtggaaagttcgaaattttataggggtttttttgttaaatttttatgtaagaggttgggtgacgtttgtttataggggttaggttttagtttaatgatataggtgattcgtaaagattgtaggttttttttaaaaagtgaagtgtagatttggatttcgttttgtagtttttaatttttttttaattatttttgggttaaggtatttattgatttatttaattatttggggagggaaaagttatcgggttgtagggggtgattttggggtaggatggtttttgaaggggtgggttgtttttttatatttgtgggtgtttttcgttaggtagaacgagagatttggaaaagagatatagataaagtatagagaaagaaattgggggattaggggatcggcgtttagtatacggaggattttcgttggtttttgagtttttttagtatttattgattatttttgggtgtttttcggagagggggatgtggtaggattataggataatagtggagagaaggttagtaggtaagtacgtgaataaaggtttttgtattataaataaggtaaagaattaagtgttgtgttttagatatgtatatatataaatattttaatgttttaaggagtagtattgttgtttgtttgttttatttttagttttaaggtagtttttttttattttagtagatggaatatataatcgggttttatatcgagatattttattgtttagggacgggtaggagatagatgttttttttttgttttaattgtaacgaggcgttttttttatttttattaattttttttagtatagattttttacggtgtcgggttgggggacggttaggtttttttttttttaggaggttatattttaggttattatatggggagaaattttggataatatttggtttttttaggtaggggtttttgcggtttttcgtagtgttttgtgtttttgggtatttaagattagggagtggtgatgatttttaacgagtatgttgtttttaagtatttgtttaataaagtatattttgtatagtttttaatttatttaattttgagttgatatagtatatgttttagggagtatagggttgggggtagggttatagattaaaatggagttttttatgtttattttttatgtagatatattaataatttgattttttttttttttttttatagttttaaaggagaggaaagttaagttgttgggagtaacggttattggttattttaaagttgtgtgcgttggttttttggtattttaggggtttttatgtatgaattgtgtagttagtgggtttaagggttgttattgaatttgatgttagtgagtttttttttcgtgagatttttgtttatggatgagtaaggagaatgggggtgttttaggagtagatagggattttgtgtaaagttgggtttttgtgtaattttcgtttgtagttatttaaatatttttgttgtaaatatagaattgtaggggagagggtaggaaatttagcgagtagtagttcggtttggttggggataggatgtgtttgttggagcggggatcggtaaggtaggtatgtaggtagggggtttttttttcggggttttcggaaggcgtagtgtagggagtgagagacgtttaggtttgggtagcgagagggttttgtttttcgtttaaggtttttaggatattttatataggagttagtttgttttaattttgtattgtttgatattttatagttattattgagatggatttttttttttttagttttttatgacgtttttagtatttgattttaggttgattatttcggttattatttttggttttatttttttttttaggtttgtttttaaatatttttagagtttttttcggagtaattttagacgtgtagaacgtttagggggattttgggtttgaaggcggtaggagaaatcgagatcgatttttggtttagaggagaggtgtttgtcgttttttattttggattttggttgtttaaaagtaaacggtacgtttgtttacgtgggaattttggtggcgttttttattgtattagttagtttttagtttagtgttgtttggatttaggttttttggtattttcgtttattttttagttttaatttatgttggttaggttatttcgttttttggtttagtgggaatattcgtgtttagagatttttcgtggttttttgtagtttgtatatagggtttgtttttttggtttgatcgtatagataaggggattgttattaaggttttttattgaggttattttttttttaggttatgtttgcggggttattatagttttagtattattgtaggttttaggtttttgtatttggttttgttttattgggggtattgtttttatttacgtttatttgggattttcggtttttgtttattgtagtttttttttcggatatttttttagatgttttcggaagtttttgtttaggttatagtattttttagtttttgttattggttttaggaagattttttgggagtttttatttagggttatatttaggattttcgttgtggggttggtcgttttttttttaaagtatttggaggaaggaaggagggggttaatgcgagttttaatttttaggcgagtgtgttttttttaaagatgagggaatcgaggtttagagaaggaaaggatttgtttggcgttatatagttagtttaagatggtgaggttaggagttttttggtaatatttaggttgtcgtatcgttttttgtattagattgagtttttatcgggttttttttatagttttaggcgggtttttgagtaggggtttttagtttgtgtggaggttttttaggaatattatttcgatttagtttttatggaggtttttgtcggttattgggaggggtcggtgtattttgggtagtttttgttagggttttgagattcgagttttttcgtcgagggtatttgtttcggttttgttttattcgagtagggttttcgtcgaggtaggatagggttatattcggaagtgagagttttttgagtttcgtatagagcgagtttttgtttttagtttttaaggtagttgttttggtgggtgagttaggttaggttcggagatttttcgagagcgagggagggatagtagcgtttttattatagggaagtgtttttgcgggaggttttggttttgattgggcgtcggggcggagcggtttttgttttttgcgtggtcgcgggggtataatagcggcgcgcgtggttcgtagatcggggagacgggcgggcgtatagtcggcgcggaggttttatagtttcgtcgggattcgaggttaagcgaggggttgttagtgtttcgggatttatcgcgttcgttttagtttcgggttttcgcgtttattttatggcgacggacgcggcgttacgtcggtttttgaggttgtatcgtacggagatcgcggtggtcgtggatagcgtttttttattgttgtacgcgttggttgattacgacgtggttttcgaggataagttttaggtgggtttttcgttcgtttttcgttgtttttaggttttgtgagttagggatagttttcggggaagttttaggaggatttcgtttttttagatttttaagtttttttagttttttttaattttttttttataaggagttaggggcgtttttgatgataagttagaagttggttttttttttttagtcgtttttatattttatttttaagttaagggaatggtttttaggtttttttagttttatttttaatatttttatattattatttgattttattataagtcgaggagatgggcgtggagttgtttaggtcgttagcgtttttgtttgggagttttattttttagttatgatggagatgggtaggtcgtagggtgtgggggattatggtagggatttttatgttattttattgtaggagacgttttatttgaaggaaaaggagggttgtttttaggttttttacgtttttttgttttggttgttgatttaggattttatagttattttggatttttggagggtgttgtttaaggattataatttggagcgttatggtcggttgtagtttattttggatagtttttttaaaggtgggttttggtggatttagttatgttgggggtttggggtagttgttgttatttgtttagtttagttggattggaatcggagtggtgtttgaggagttcgtgggtgatgttttaggatcgttttggattttaagaggtaaaggggttaggttttatttgtttggttaaggtgtttagttttggggtttattttatttttggagaaaattttgaggttgggattttgtttttgtttttgagttgtagatgtggattttagttagtttcggaaggggaggaagttttcggtcgtttttaaggttttggtatcgttatttagattttttattaagaggaaggttttagaagaggttcgagttgtcgcgttagtagttttgattttaaggggtatcgttagtttaggtattttttttgtaggggaagttagttagggtttttagttttttcgggttttttcgggagtttacgttttttttttattcgggtttttatttattgggtgtggggttagtttgtttggggttgtgggggttttttttgggtattagatttatatattggattagttttttagtttttttttgtttgaaggttgagtttttcggagttggtgaagtaggcgggcgggttttattttttttttattgatgagaaattagagttcggtaaagggattatttagtattggatcgttttttttacgtttttttatcgcgggtttttgtttatcggtatttatttttattgagaggggaggttaggttgtttttagtttttttatttaggtttttaattgaaggttaagttttttaagaagtcggagagtagcgtagagtagtagcgttttttattcgggaacggtgagcggggtttagtgggagcgttttttttttttttggttaggggtaaggggttaggggttagagtagggtttgttttttgagattttgttttaggggttggggacgtgttggtttggtgtgttattttaagggtttaagttgtattattagatttaggaaggggatattttgggtttaagtatgattttgttagtcgtttttgtttttattgtattttggttttgggattttttttttaggtattttttttgttcgtttattttttattttttaggattagtttagatatagttttttttagaaaattatttttggtttttagttgtatgtaggttgaattttttttgttttttttttttttttttttagggtattggattttagagattttttatttttttgagggtagagtttaggaattttgtgtttttttcggtataatatagggtttatgttatgggggggtgggtttggttattggttatgtttttttatttattgtgttagttttgttgatattgttattttttagtatacgtatatttgggtgtatatacgaatatatatatttttatgtttttgtatttatttgtgggttgtttgtatatggtagggttgggttttttttttggtttgttttggttggaaggaaagggttttgtagtttagtgttgtttgtttttggtatagagtatgtgtttgggaatagttttttttacgggtgattttaatgggtgtttttttttttagggatttagattatgttagttttagtttagagagttgtggttatgtttttcggggacgtttcgggagttcgaggggtcgtggaggggatttttatttagtaggtgtttgagttaggtagacgttgtggcggggagatggggttgatggggagatttaggttttaagatggaaggaggattacgtttttttgtattttggtggttttatagtagatcggattgttgtttaggtagttagagtttttgtttgtggttttgttgattttggaggaggagggtgagtattgaagtttttttgtcgggggattttttgtaaggttagcggtttaggtttatatttttattcgggatgtatagtattttttagttatttttatttatgtgtatgggtttttttgggttatggggttgtatttttagaaagttttgtttgtgttgttgagattttttagggtatcggtattttttaattaggatagtttgtagtatagcgtttttgttttttatattttggttagtttgtagtattttcgttcgttattttttggttagtcgttgattttatgtaattattagtgttatttgattagggtatagtagggtcgttggtggtagatttatcgtgttatcggggtattttattttaagtttttgatacggtgttttttcggtgttggatatgggttgggaatattaagtatagttagggttttggttttgtatttttggatggttttaaggtttattgtgttattttttaaggttgttggttaaattggtataaattgggaggtttgaaatgatagaaatgttaatatcgaggtgtttcggggttatattttttttggaggttttagggaagaatttttttttgtgttttttagttgttggttattatgggggtatttttgtgttttttgtttttgggtttaggatttatcgttttagtttttgtttttgtggttttatagttgttttttacgtgttttttttataaggatattagttattgaatttatggtttagtgtgattttattttaattaattatatttataaagattttgattttaagtaaggttatattttgaggttttgggtggacgtgaatttcgggggacgttgttgaatattttggtgtagatttaggataattttcgggttttagattcgattggggtgggggcgggttggaggaatgtaggttgtgggaattttatttgtttttgttagattttattttggggtttatacgattgttaaggtaggttttgttgggcgggtgagttaggattagtcggtatttttttttaggcggttttaagaagtgtatttaggttggcggggagttttatatttttagtaagttcgaagatttcggtagtgggaagaataaggttcgtagtagtagtggttcgaagtttttggttcgagttaagggagtttagggcgttgttttcgtaagtatttgattttttttggggagtttggtttttgatgtttttcgttttaggaatagcgttgtttttgggggagtggttttgttgggggttgggggttgttgtcgagagacgtttggtgttatagttatgtgtattttcgttgttgaggttgtttttattgttgacgttttttttttttgtagggtggaggtgaggttaggttgggttagtagggtagcgttttcgtttttttggttttttttagtgatttttagttttattaggtaatgttttagattataggagaggtttttgtttgtttttgtttttttcgggtgggttttgttgtttttgtttttatttgggtatttagggatgagtatcggggtttgagtttttatttatagggtatagttttttttttttaatagatagtattttttttttgataatacgtaatggtaatagtttaaatgagttagagaaagtgaggtttttttaggtttttaagagtatggcgtttggtttaggttgtattcgttgtttttagttgggttcgtgggtgggtcgggcgtttttgttatagttaggaggttaaggatttattgggaatgttatgtttatttttcgtttttagtatggttttttaatggggtagaagtagtgtggggggtgtttgtcgtggtgggttatagattttgattatttggtattaggggttttgtggggttttggtatttagtagtgataggagttagttttgttttgtaggagtattcgggttggtgggcgtttgggggattgttagaatgagtgaggttattgtcgtgtaggattagtttagtttggttgtttggggggattttggaggaagtggtatttgggagatttttgaaggtatagtaggtattatttaggtagggtataaggacggtgggggttgtaggtggaggatttagtaggcgttgagg

SEQ ID NO: 66 - DNA, 9876 bp, Artificial Sequence
  chemically treated genomic DNA (Homo sapiens)
ttttagcgtttgttgaattttttatttgtagtttttatcgtttttgtgttttgtttggatggtgtttgttgtgtttttaggggttttttaggtattattttttttagaatttttttagatagttaggttaggttggttttgtacggtaatgattttatttattttaataattttttagacgtttattagttcgggtgtttttgtagggtaggattggtttttgttattgttaagtgttagggttttatagagtttttggtgttaagtggttaagatttgtaatttattacggtaggtattttttatattgtttttattttattaagaaattatgttggggacgaaagatgagtatggtatttttagtggatttttgattttttggttatagtaggggcgttcggtttatttacgggtttagttgagagtagcgggtatagtttggattaaacgttatgtttttaagagtttgagaagattttattttttttgatttatttaaattattattattgcgtattattaggaaaaaaatattgtttattaaagaaaaagagttgtattttgtgggtaggggtttaggtttcggtgtttatttttgagtgtttaggtaaaggtagaggtagtaggatttattcgaggggagtaagggtagataggggttttttttgtggtttagggtattatttggtggagttgggggttattggggagggttagaggggcgggaacgttgttttgttggtttagtttagttttatttttattttgtaaggaagaggggcgttagtaatgggggtagttttagtagcgagggtgtatatggttgtggtattaggcgtttttcggtagtagtttttagtttttagtagagttatttttttagaggtaacgttgtttttggggcggggggtattaagagttaggttttttagggaaggttaggtgtttacgggggtagcgttttgggtttttttggttcgaattagaggtttcgggttattgttgttgcgggttttgttttttttattgtcggagttttcgaatttgttgggagtgtagaatttttcgttaatttggatgtattttttggagtcgtttgggaggagatgtcggttggttttggtttattcgtttagtaggatttgttttggtagtcgtgtaggttttagggtggggtttagtagagataggtggagtttttatagtttgtatttttttagttcgtttttattttagtcgagtttggggttcggggattgttttggatttatattagggtgtttaatagcgtttttcgaagtttacgtttatttagaattttagagtgtgattttatttgaaattagggtttttgtagatgtgattagttaagatgaggttatattggattataagtttaatgattggtgtttttataaagaggatacgtgggagatagttgtgagattatagaagtagaggttggagcggtgggttttgagtttaggaataaggagtataggggtatttttataatgattagtagttgggagatataaggaaggatttttttttggagtttttagagggagtgtggtttcgagatatttcgatgttggtatttttgttattttaagttttttagtttgtgttaatttaattaatagttttaggaagtaatatagtgggttttgggattatttagaggtgtaagattagggttttggttgtgtttggtgtttttagtttatgtttagtatcgaggagatatcgtgttagggatttgagatggaatgtttcgatggtacggtgggtttgttattagcggttttgttgtgttttggttagatggtattggtgattgtatggggttagcggttggttagggaatggcgggcgaggatgttgtaggttggttagggtatggggggtaaggacgttatgttataggttgttttggttgaagaatgtcgatattttggagggttttagtagtataggtagaattttttaaggatgtaattttatggtttaggagggtttatgtatatggatggaggtgattggggagtgttgtatatttcgggtggggatgtgggtttggatcgttggttttgtagaaggtttttcgatagggagattttagtgtttattttttttttttaaagttagtagaattataggtagaaattttggttatttgagtaatagttcggtttgttgtgggattattaggatgtaaaggggcgtggttttttttttattttggagtttgggtttttttattagttttattttttcgttatagcgtttatttgatttaaatatttgttggatgaggattttttttacggtttttcgggttttcgggacgttttcggaggatatggttatagttttttggattgaagttgatatggtttgaatttttgggaaagggaatatttattggggttattcgtggggaagattgtttttaagtatatattttatgttagaagtaggtagtattgggttgtagagttttttttttttagttagggtaggttaaggaggggatttagttttgttatgtgtagatagtttataggtaagtgtagagatatgagaatgtgtgtgttcgtgtgtgtatttaagtgtgcgtgtgttggggggtggtagtgttagtagagttggtataatggataggaaggtatgattaatgattagatttatttttttatgatatgggttttgtattgtgtcgggagggatatagagtttttaggttttgtttttagggagatagggggtttttggagtttagtgttttgggaaggaaggagaaggggataggaagggtttagtttgtatgtagttgggggttagggatgattttttggaggaagttatgtttaggttggttttgaaggatagggagtggacgggtagagaaggtgtttgagaagggggttttagaattagggtgtagtgggggtaggggcgattggtaagattatgtttagatttaaggtgttttttttttgggtttggtggtgtagtttaggtttttggaatgatatattaggttagtacgtttttagtttttaggatagggttttagagggtaggttttgttttgatttttgattttttgtttttggttagggagaagggaggcgtttttattgggtttcgtttatcgttttcgagtggaaggcgttgttgttttgcgttgtttttcggttttttggggggtttggtttttagttgagagtttgaatgggggagttgggggtagtttggtttttttttttagtgggggtgagtgtcggtgggtaggggttcgcggtgggagggcgtggagggggcggtttagtgttgggtagtttttttgtcgggttttggttttttattagtaaaagggaaatgagattcgttcgtttattttattagtttcggggagtttagtttttaggtaggagggagttgagaggttggtttagtgtgtgggtttagtatttagaggagatttttatagttttaggtaggttggttttatatttagtgggtgggagttcgggtggggagggggcgtgggttttcggggaagttcgggaagattggagattttggttggttttttttgtagggagggtatttgggttggcggtgttttttggagttagggttgttggcgcggtagttcgagttttttttgaggttttttttttggtggggagtttgggtggcggtattaaagttttggggacggtcgggggtttttttttttttcggggttggttgaggtttatatttgtagtttaggggtaggagtagggttttaattttagggttttttttaggggtagggtgggttttagaattggatattttggttagataggtgaggtttggtttttttgttttttaggatttaagacggttttggaatattatttacgggttttttaaatattatttcggttttagtttagttgggttgagtaggtgatagtagttgttttaggtttttagtatggttgagtttattaggatttatttttggggaagttgtttaggatgggttgtagtcggttatagcgttttaggttgtagtttttgaatagtattttttagaagtttaggatggttgtggagttttgggttagtagttaggataggagggcgtggaaggtttgggggtagtttttttttttttttagatgaagcgttttttgtagtggggtggtatgagggtttttgttatggttttttatattttgcggtttgtttatttttattatgattagagggtggagtttttaggtagaggcgttggcgatttggatagttttacgtttattttttcggtttgtggtggagttaggtggtggtgtaggggtgttgagggtggggttgggggaatttggaggttatttttttggtttgggggtgaggtgtggggacggttgggggaaggggattaatttttaatttgttattagggacgtttttggttttttgtggggagggagttggggaaggttggaggggtttggggatttggaggggcggggtttttttggaattttttcggggattatttttggtttatagggtttgggggtagcggggggcgggcggggagtttatttgaaatttgttttcggggattacgtcgtggttagttagcgcgtgtagtagtgggaaggcgttgtttacggttatcgcgattttcgtgcggtgtagttttagaagtcggcgtagcgtcgcgttcgtcgttatggggtgggcgcggggattcggggttggggcggacgcggtgggtttcgggatattggtagtttttcgtttggtttcgggtttcggcggggttgtggggttttcgcgtcggttgtgcgttcgttcgttttttcggtttgcgagttacgcgcgtcgttgttatattttcgcgattacgtaaagagtaaaggtcgtttcgtttcggcgtttaattagggttagggtttttcgtagggatatttttttgtgatggaggcgttgttgtttttttttcgttttcgggaagttttcgggtttggtttgatttatttattagggtagttgttttgggggttggggatagagattcgttttgtgcgggatttagagaatttttattttcgaatgtggttttgttttgtttcggcgagggttttgttcgaatggggtaaagtcgagataggtgttttcggcggggaggttcgggttttagggttttggtaggggttgtttagggtgtatcggttttttttagtggtcggtaagagtttttatggaggttggatcggggtggtgtttttgggggatttttatataagttgagagtttttatttaggggttcgtttggggttgtgggaggagttcgatggaggtttagtttgatgtaggagacggtacggtagtttgggtgttgttagggagtttttgattttattattttaggttagttgtgtgacgttaggtaagttttttttttttttgagtttcggtttttttatttttaaaaggggtatattcgtttggggattgaggttcgtattgatttttttttttttttttttaggtgttttagaaggaaggcggttagttttataacgggggttttgagtgtggttttgagtgagagtttttaaagggtttttttaggattagtgatagaggttgagggatgttgtggtttggataggagttttcgggggtatttgggaaggtgttcgggaggggagttgtagtggataggagtcgagggttttaggtggacgtgagtggggatagtgtttttagtaaaataagattaggtgtagaggtttggggtttgtaatgatgttgaggttgtggtggtttcgtaggtatggtttggagggggggtggttttagtgggaggttttggtaatagtttttttgtttgtgcggttaagttagggaagtaggttttgtgtgtaggttgtagagaattacgagaggtttttgggtacgagtgtttttattgagttagagaacgagatgatttggttagtatggattagggttgaagggtggacgaaggtattaggaagtttgaatttaggtagtattgggttgggggttaattgatgtagtgagagacgttattaagatttttacgtgggtaggcgtgtcgtttgtttttgggtagttagagtttaggatggagagcggtagatattttttttttagattaggggtcggtttcggttttttttatcgtttttaggtttagggtttttttgagcgttttgtacgtttgagattgtttcggaaaagattttaggggtgtttgggaataaatttggggaggaaggtggggttagaggtggtggtcgaggtggttagtttggggttaggtgttggggacgttatggggagttgagggggagggggtttattttagtggtggttgtggagtattaggtagtgtagggttggaataggttggtttttgtgtggaatgttttgggagttttgagcggggagtagggttttttcgttgtttaggtttgggcgttttttattttttgtattgcgtttttcgaagatttcgagagggaagttttttgtttgtatgtttgttttgtcggttttcgttttaatagatatattttgtttttagttaggtcgggttgttgttcgttgggttttttgtttttttttttgtagttttgtatttatagtaaaaatatttaaataattgtaagcgaaagttgtatagaagtttagttttgtataggatttttgtttgtttttgaaatatttttattttttttgtttatttatgggtaggggttttacgaagggagagtttattaatattaagtttaatggtaatttttgggtttattggttgtatagtttatgtataaaagtttttggggtgttagggaattagcgtatatagttttgggatgattagtaatcgttgtttttagtaatttggttttttttttttttgaggttgtggggaaaagaaagagagattagattgttaatgtgtttgtatagaaagtagatataagagattttattttaatttgtaattttatttttaattttgtgttttttgagatatgtgttgtgttaatttagggttaaatggattaagggttgtgtagggtgtgttttattaaataaatgtttgaaggtagtatgttcgttaagagttattattattttttaattttaagtatttagggatataaaatattgcggaaggtcgtagggatttttgtttaggaaagttaggtattgtttaaggtttttttttatgtgatagtttgagatatggttttttgggaagggaaagatttgatcgttttttagttcgatatcgtaaagggtttgtgttgaggaggattagtaaaagtggaaggaacgtttcgttgtagttgagataagaggaaggtatttgttttttgttcgtttttgggtaatggaatgtttcggtataaaattcgattgtatattttatttattgagatagggggaaattgttttagggttggaggtgggataagtaggtagtaatattgttttttaaggtattgagatgtttatgtgtatatatatttaaagtatagtatttaattttttattttgtttatgatgtagagatttttgtttacgtgtttatttgttgattttttttttattattattttatgattttgttatattttttttttcgagaaatatttaaaaatgattaataaatattaagggaatttagaggttagcgggggtttttcgtatgttgagcgtcggttttttggttttttaatttttttttttatattttgtttgtgttttttttttaagtttttcgttttatttaacgagaaatatttataggtgtggaggggtaatttatttttttagaggttattttgttttaaagttattttttgtaattcggtggtttttttttttttagatggttaagtgagttaatggatgttttagtttagagatggttaaaggggaattaaaaattgtaaagcgagatttaagtttgtattttattttttaaaaaagatttgtagtttttgcgggttatttgtgttattgggttggggtttgatttttgtgggtaggcgttatttagttttttgtatggaggtttaataaagaggtttttgtagaatttcggattttttattatgtcgtggggttttttatattagttttttgttcgtaggtgatatggagtcgttacggttttttggaggtggtatagatttttggaggggggtgaggggttggggattcggttttgtttttagtgggattgatgtttttgtgggattgagttttagtttttttaagaggtatttgggtagtagagttttgggatagtattgggttttatttttgagtttcgtgttttcggttggagcgggagggtttcgtagtttttttttttatatttgtgttgtgtttttggacgtttgcggatttgttatgtttcgggttaggttttgagagttttgtgattttgtttattttattagtagaacggtttttttaggttattatcgtgattagtgttatttatagatatggaaattgaggtttgttgtcgggaggagtttggttagagttacgtagttgttaaggggtagaattacgattcggattttgatgtacggaagaatagaggttttttaggtttatgtttttgttgtgtcgggtgttttttaggtgtttaggttacgttagatgtttttagtttgtaaagtggggggacgcggtttatgtgatgtgtatagaagttgggaggagttaggttttaatggtagagtagggaaggggttggagggggtttagttttggttttttaaataagtttggattttatgtttttttttttgttttagatggaggttttattttttgtggttttttggaagggttaggtttttagaggttaggagtttgagttagaaaggtttcggggaatatggagttttggttaggttttggtttttggaggttttgggttttgtttttgtagtttggttaggtggtttggtattaagggaggggtgggtttttttaggatattttgtgaggatttttagtatttttttggttataggtttttttattgggttttaatttttttattgtagagaggaagttgtttttatttgttgagggcgggatggttattttatatggttgtttaagttagggaggtagtttcgagtatcggtgagtttagaagaattcgtgtttagttaagggtattggaggggggattttttgttttttttttttttattatttttgttttaaatttgttttattggttgggttttagtttttttggtttggtttttttattgcgttttattgtgggtatgtgtttagacggcgttattttttttagtgaattaggggaagtggtgttagatttttttttttttttttttgagatagagtttcgttttgtcgtttaggttgaagtgtagtggcgcgatttcggtttattgtaagtttcgtttttcgggtttacgttatttttttgttttagtttttcgagtagttgggattataggcgttcgttattatagtaggttaatttttttgtattttagtagagatagggttttattgtgttagttaggatggtttcgattttttgattttatgattcgttcgtttcggttttttaaagtgttgggattataggcgtgagttacgtatttaggttttttttttgtagaattgattatttgttttgcgattttattaaaaggtttagttggtgggttggggttttttcggtggataagttttgggagaatagagttttgttttttgtttttttcgtagtttattagttattagttgaa

SEQ ID NO: 67 - DNA, 7928 bp, Artificial Sequence
  chemically treated genomic DNA (Homo sapiens)
ttttttttttttttttttttttagacggtgttttgttttgttatttagattggagtgtagtggtatgatttgagtttattgtaatttttgttttttggtttaagtaattaggattataggcgtgtattattatatttagttaatttttatatttttagtagaggtgggttagggtgattttatatttttgattttaagtgagttgttcgtttcggttttttaaagtgttgggattataagtatgagttattgcgtttggttggaattttttttttaattaaaatatttttattttaattttgtttttaaatgttataagttataaaatatttttaaaaaattttttaattagttttatttttatatgtttttgtttttagattttttttattataaaataaataatataaatgatataagatagaaagggagggtattgtcgagttttattagggtataattttttagattttttttttatgtaattttttttttttttgagataaggttatgttttgtggtttaggttggagtatattggtgtgattacggtttattgtagttttgattttttggatttgagtaatttttttattttagttttttaagtagttgggattataggtaggtattattatatttggataattaaaatttttttttttttttttgtagagatagggttttgttatgttgtttaggttggttttaaatttttgggtttaagtgatttttttgttttagttttttaaagtgttgggattatagatgtgagttacggcgtttaggttttatgtaattttttttttttttattattttagttttttttttttttttttttttttttttttttaggttatatttgggaaataaaattttgaaacgttaatattttagaattggtagaaaatttatagtttatatgtaaataaaacggatatttaaaattgattttttaattttaaaaatttatttattttattttaaaaattgtggtaaaaaacgtgtaatataaaattaattattttaataatttttatattttgttttggataatagagttttaaaattttgttattttgtagatttgagattttgtatttattaaatagtaatttttttttttttatttttttttagtttttggtaattattattttatttttttttttatgagtttgatttttttagatattttaatgtaaaggaattatatagtatttgtttttttgtgatgggtttattttatttatataatgtttttaagatttatttatgttaaagttattttttaatatatataaagtaatagacgtttgttgtatggaaaagtaaaaatgtttgggtggttgggtattgtggcgcgtatttgtaattttagtattttgggaggttaaggtaggaggattgttggagtttaggaattttaggttgcggtgagttataattttgatatagcgttttagtttgggtaataaagtgagattttgtttttttaaaaaaaaaaaaaaaaaaaaaaaagcgtggggggttgggtatagtggtttacgtttgtaattttagtattttgggaggtcgaggtaggtagattatttgaggttaggagttcgagattaatttggttaatatggtgaaattttgtttttattaaaaatataaaaattagtcgggcgtagtggtacgtgtttgtagttttagttattggggggttttgagaatcgtttgagtttagaaggtagaggttgtagtgagttaagattgtggtattgtattttagtttgggtaatagagtaagtattcgttttaaaaaataaataaataaaataaaataataataataataataaaatgtcggttaggtacggtggtttacgtttgtaattttagtatttttggaggttaaggttagtagattatttgaggttgggagttcgagattagtttgattaacgtggaggaatttcgtttttattaaaaatataaaattagtcgagcgtagtggcgtatgtttgtaattttagttatttaggaaggttgaggtaggagaattgtttgaattcgggaggtagaggttgcggcgaatggagattacgttattacgttttagttttggttataaaagcgaaattttattttaaaaaaaaaaaaaaaaaaaagaaaaaagaaaaagaaaagtttggggaagtttttaagtaggaagtggaagtgttatttttagttaggcggttataggtatatatttgttttttttgttttgttttattttatttattttaagatgttgttagtttgattgtaagataatgtaattttaattttgtagagttacggtgtaaaaaaaaaaaaaagtttgagaatatattttatatatatatatatatttgtatgtttagagttttttttaaatttattatttttatttaaaaaaaaataggggtcgggtatggtggtttatatttgtaattttagtattttgggaggtcgaggcgggtggattacgaggttaggagtttgagattagtttggttaatatggtgaaatttcgtttttattaaagatataaaaagttagtcgggtgtggtggtgtatggttgtaattttagttatttaggaggttgaggtaggagaatcgtttgaatttaggaggcggaggttgtagtgattcgagattatattattgtattttagtttgggcgatagagtgagattttattttaaaaaaaaaaaaaagaaaagaaaatatagatagtgttttattatgttgtttaggttggttttgaatttttggttttaattgatttttttgtatcggttttttaaagtattgggattataggcgtgagttattgtttttagtttttagttatttttatgtaggtgggattagaagagtgtagtggggttttttgtttatttttttttttttttttttttttttttttttgagatagagtttcgttttttttgttttgttgtttagtttggagtgtaatggcgtgatttcggtttatcgtaatttttgttttttgggtttaagttatttttttgttttagttttttaagtaggtgggattataggggcgtattattatgtttagttaatttttatttttagtagagacggggttttattatgttgattaggttggtttcgaatttttgattttaggtgatttattcgttttaggtttttaaaatgttgggattataggtgtgagttatcgcgtttagtttttttgtttattttttattaatgttatgggtgtttgaagttttttgttttattaattataaataatttggatttttttttttatttagattttatgggaaagttgttaattttttatttatcgtggttgtgttattattttagtgagtttttgttggtattttaaaatttttttatgtaaatttgtgtttatatgtttttttgaaataaattttttaaagtagaagggcgtatttgaagattgtgtgtgtgtgtgtgtgtgtgtgtgtgtgtgtgtttatattttagagacgggatttcgttatgttttttaggttgtgttagaatttttgggtttaagtgagtttaagtgatttttttatttcgtttttttgaagtggtggggttaataggagtgattattatgttcggtttatttgaaattttgatttattttgttaattgttttttttaaaggtgttaatgtatatatttttgagagggttttttaaatagtttttaatgtaatatttttgattttattgtatttgtttttttatagatggggaaattaaggttttaagaagtaaggatttatttgatattataggtagtagagatttaggttttttggttttttggttgttgtggttgttgaggtattattattgaaggtggttttaattttttggtagttttatttttttgtttaaatattttttatggttttttagggtttataatataaattttaagtttaatttattttattatttggggttgttgtttgggtttttatttttgttcggttatattattgagtatttattattatgtgttagtttttttgtaaaacgttggataaatacgtggttttttattagggaatttttcgtaaggtatttgatatgttcgtttttcgttttttgttgtgtttaaggatttatagatgcggttggagtttgttgtttagtatagtgagtgtttattatgggagttattttttttattaagatcgtaaattttttttttggttatttatagttttttgaatgtttcgggtaattttaggggagtagggttggttttttataattttttattttattgggtggtttttggggttttggcgggttttagttttagaggagttcgaagggttttttttaataggggaagaggagttttaggtgggtttcggttagggtttttgggtaggttttgagggcgggtttggggattgtggttagtaaagtttttgagtcgatgttttagttttttcgttttttggtttggtttttttttggtattaatgcgttgtgggattttgcggaaagagtcgtttttttttgagttttagtttttttagttattatagggaaagtttggttttgtattttggagtgtattttgagtatagtcggggtatcgtaatggaaaatttttggtaaattgtaaagtgtagttcgcgtgtgtgggtatagttatttgggggtttacggtgcggggtatacggtgtcgggtgcggtgtcgtcgcgtattcgggttcgggttcggtttcgtttcgtttttcggtttttggttcgttttttttttttttttttcgttttttttgttttcgggaacgtcggttttcggtatgtcgcgcgttgatagttttataaatagtcgtttttgtcggtcgtcgcgaggacgggtagggtacgtattggtttcggcgtttattcgtatttttttttaggttagtgcgtgttcgcgcgtgtttgggggggcgtttttgcggggaggggtagcggtatcgggggagggcgggggcgtgttggtgcggggttttttgggggttgtgcggttgtgtattcgtggttgtgattcgtgtgtgtttgcgtggttgtgtttttcgggcgttggggatttgtgtttcgttgtttgtgtttttgtggattcgtgcgtgtgtgtgcgtgtgtgtttgtgtgtgttgtagttttttttagttttcgagatagttatttttttgttttggttggtattttcggggttttaggttattgtttttggtatgttttagtttgggtttagagagggagagttgtggtttggttttttgttttagaggatttggataggggtagtttttgtgtttcgtagggttatcgtgttattttatttttagtgttgggtgtattggagaatattttttggatgtttagagtttgttttagttttttgattagggttagcgtttggggtttttttatagtattgtttagtggtcgtttggtattttttagtagtagtaggataggtttagagaggggatattaattgtttaaggttatatagttgagtgatggagttgggattcgaattttagttagttgttatttattgggaatcgattacgttgggttagaagttgggagatttgggtttgttttggttttgttttgtgattggggttaagttatcgtttttttgggtttcggttttataggttttttagtagattatttagttatattaggagtcgttggggttttgatttaggggttttataaggtttgggtgtttagttcgtaatttaattttattttagatttttgttttttgtgaggtttttttacgatttaagttattttggattaaggaagtggtaggtgttattagggcggagggggtttagattattaggaggggggcggggtagggcggggtcgaggttattttttagggttttattgtggttgtttttggtttaggacgtttttttttttatgggtagttgttgaggggtatttggtagtttttattttcgttgaagtatatttagtaggaaaagtggttgttatttttgtttggggtagtaggggtattagtaaagttattttagttgttattgggtgttaggtttagcgtagtagaaatttagggtcgagttggattttagttggttttcgaattagtttgtttttttttttatgttttagtttttttttaagatggtagtgaggatggaacgaggttttttagttttgtgtttagtttatgttaggtttagttaatgggattttaggttcgtagtatagaagaggggtttagtatagcgtggttgtgtagtgtagggtaggtttttaggaggtatttgttagtgtgggagtggagggtagagtttaggaaggttttttgaaggaggtggtatttgagttgagttttatataatagtaaggtggggaaaggtatttaggtattgggtataatatttgttagtggtagttgatagggttgtagagggtagtagaggttagtttatcgggatttatttattatgttaaggggtttaggttttgtttgggagtcgagagggttatatatgtaaggttgtaagcgggtgtgtgatgtggtttgatatttgttagagaaaattttgtaaattgcgtggtagggtgtggaggttttaaggtttatgtggaggcgggggtagtggtttaggttttttatttagtataggatatagtggtgaggagatagacggagagagtttggggaggggagggttgggtagtgggtgtgtagggttgtggagaggagagaggagtttttatattgatttagtttgtggtttggttataggggtttggagttgggatttggggagggttgtttagagtttgagaagtttgtggggtttttggggtttgtttcgggggtatggatgtttggggttggagagaaaggtttgggttgtttgtatagggatgggggtttttggagtttgaagttaagtagagagggtggtgtgggtgttttgggtggaggtttcggtgcgggtggggtcgttggttggaggttaaggttggaggggagtgtggttgtggtggttgcgagtggttttggggagggttggtggttgggagtgaagaagtggaggttaaaggtgtttagagggtagttttgagataggggggcgaggtaggggaggttttgggggttgtggtagtatagggtggggtcgtaggtgtgattgggtttatgggtaggttgagggtaaggtgggggtagtaaagttaggtttttaaagggtgggggtgtaggggatatgcgtggggttggttgttgggtttgtagaggtgaagagtttgggatcgttttattttgataattgtaaagggttgtgtttatgcgagcggtttttgtagatttttttattttaggtttttgttttttagaggatttttatttaaattttattttagatatatatagtttttggttattttttattttttggtagtttttttttggttttggggagcgttgttaaggtgtttgggtagacgttggttttgcgttttgttttttgggagtttcgaggggagtagttttgtagttgtgtggtcgttgtttatgtttttcggtgttatttttattgttttagtttttttagcgggaatttaggtggatgggagggggttattgtttttttgtgataggtgaggttatggaggttagagaggaaaggtgatttttttaaggttatttttttaaggtggtttttttagggaaggggttttgggttttttttgtttttagtagttttttttgtttttagattgtatgtcgggtttggtatatattagttgttttgggtgtggtttagtggaaggtgagttagggtgaggaggaaaatttttttttaatttgtgtttttgttttataga

SEQ ID NO: 68 - DNA, 7928 bp, Artificial Sequence
  chemically treated genomic DNA (Homo sapiens)
tttgtaagataagggtataggttggggagggatttttttttttattttgatttattttttattaagttatatttaaggtaattggtgtgtgttaggttcgatatgtagtttgagggtagagggggttgttgggggtagggaaggtttaggattttttttttgagaaagttattttgggaaagtgattttggaaaagttattttttttttttggtttttatggttttatttgttatagaagggtagtagtttttttttatttatttgggttttcgttggaggggttgggatagtgaggatggtatcgagggatataaatagcggttatataattgtagagttgtttttttcgaaatttttagaaaatagggcgtagggttagcgtttgtttagatattttgataacgttttttagggttagagggaagttgttaggaggtgggaggtggttaggaattatgtgtgtttgggatgaggtttggatggggattttttaagggatagaggtttggggtgaaggaatttataggagtcgttcgtatgaatatagttttttatagttgttaaagtgaggcggttttaggttttttatttttataggtttaataattagttttacgtatgttttttgtatttttattttttgaggatttggttttattgtttttattttgtttttagtttgtttatgagtttaattatatttgcgattttattttgtgttgttatagtttttaggattttttttatttcgtttttttattttagaattgttttttggatatttttggtttttatttttttatttttagttattagttttttttaaggttattcgtaattattatagttatatttttttttagttttgatttttagttagcgattttattcgtatcgggatttttatttaaggtatttatattattttttttatttggttttaggttttaaggatttttatttttgtgtaggtagtttaggtttttttttttagttttagatatttatgttttcgagataggttttagaagttttataggttttttaggttttgaatagttttttttaagttttagttttaggtttttatggttaagttataggttgagttagtgtgaaggttttttttttttttttatagttttgtatatttattgtttaatttttttttttttaggtttttttcgtttgtttttttattattatgttttgtgttaagtaaggggtttgggttattgttttcgtttttatatgggttttgaagtttttatattttgttacgtaatttgtaggattttttttggtaagtattagattatattatatattcgtttataattttgtatgtgtggttttttcggtttttagataaagtttgggttttttgatatagtggataggtttcggtgagttgatttttgttgttttttgtaattttattagttgttattggtagatgttgtatttaatgtttggatgtttttttttattttgttattgtgtgggatttagtttaggtgttattttttttaggaagtttttttggattttgttttttatttttatattggtaggtgttttttggaaatttgttttgtattgtataattacgttgtattgggttttttttttgtgttgcgggtttgggattttattgattgggtttggtatgggttgagtatagggttggggagtttcgttttatttttattgttattttgggaggaaattgaggtatggggaggaggatagattggttcgagggttagttagggtttaattcggttttgagtttttgttacgttgggtttggtatttagtagtagttgaagtggttttgttgatgtttttgttgttttaggtaggagtggtagttattttttttgttgagtgtgttttagcgggggtaggagttgttaagtgttttttagtagttgtttatgggagggggagcgttttgggttagggataattatagtgaagttttgagaagtggtttcgatttcgttttgtttcgttttttttttggtaatttaagtttttttcgttttgatggtatttgttatttttttgatttaaaataatttgggtcgtgaggaggttttatagaggataggggtttaggatggagttgggttacgggttaagtatttaggttttataaggtttttgggttaaggttttagcgatttttaatatgattggatggtttgttaaggggtttgtggggtcgaagtttagagggacggtgatttaattttaattataagataaggttaaggtaagtttaggttttttagtttttgatttaacgtagtcggtttttagtgggtggtaattgattagggttcgaattttagttttattatttagttgtgtgattttgggtagttggtgttttttttttgggtttgttttgttgttgttgaggagtattaggcggttattgagtagtgttgtgggaaggttttaagcgttggttttggttaggaggttagggtaagttttgagtatttagggggtgttttttaatgtatttagtattagaagtggagtgatacgatagttttacggagtatagaggttgtttttgtttaggttttttggggtagggagttaggttatagttttttttttttgggtttaagttgggatatgttaagggtagtgatttggagtttcgggagtgttagttagaataaaggggtgattatttcggaggttggaaggggttgtaatatatataaatatatacgtatatatacgtacggatttataaaggtataggtagcgaggtatagatttttagcgttcggggaatatagttacgtaaatatatacggattataattacggatatatagtcgtatagtttttagggagtttcgtattagtacgttttcgttttttttcggtgtcgttgttttttttcgtagaggcgtttttttagatacgcgcgggtacgtattgatttggggaggggtgcgggtgggcgtcggggttagtgcgtgttttgttcgttttcgcggcggtcggtaaaggcgattatttataaggttgttagcgcgcggtatgtcgggagtcggcgttttcgaaggtagggagggcgggaaggagggagggagagcggattagggatcgggaagcggggcgggatcgagttcgagttcgggtgcgcggcgatatcgtattcggtatcgtgtgtttcgtatcgtggatttttaggtggttgtgtttatatacgcgaattatattttatagtttgttaagagttttttattgcgatatttcgattgtgtttaaggtatattttagggtataaggttaggttttttttatgatagttggagaaattgaggtttagagaagagcggtttttttcgtaaaattttatagcgtattggtgttagagagaggttagattagggagcgagagggttgaggtatcgatttaggggttttgttggttatagtttttaagttcgtttttagagtttgtttagaggttttggtcgagatttatttgggatttttttttttttgttgggagggatttttcgagtttttttgggattggaattcgttaggattttaaagattatttagtaaggtagaagattatagaaaattagttttgtttttttggagttgttcgggatatttagaaggttgtggatagttagagaggggatttgcggttttgataagaagaatagtttttataatgagtatttattgtgttaagtagtagattttagtcgtatttgtgaatttttagatatagtagagaacgggaggcgagtatgttaaatattttgcgggaggttttttggtagaaagttacgtgtttatttagcgttttgtagggagattggtatatagtagtaggtgtttagtgatgtagtcgggtagggatgggagtttaggtagtagttttagatggtgaggtgggttgaatttggaatttgtattataggttttagggagttataggaggtatttgagtaagagagtgagattattaggagattgagattatttttagtggtggtgttttagtaattatagtagttaggagattaggaggtttgggtttttgttatttgtgatgttagataagtttttattttttgggattttagtttttttatttgtgggggggtaggtgtagtggggttagaggtgttgtattagaagttgtttgaaaggtttttttaagggtgtgtgtattggtatttttggggaaagtaattgataaagtaaattaaaattttaaatggatcgggtataatggttatttttgttaattttattattttaggaggacgaggtgggaggattatttgagtttatttgagtttaggaattttaatatagtttgggaaatataacgagatttcgtttttaaaatataaatatatatatatatatatatatatatatatatatagtttttaaatgcgtttttttattttaagaaatttgttttaaggaaatatgtgggtataaatttgtataggaaagttttaaagtgttagtagggatttattgggatgatggtatagttacggtgggtgaggagttagtaatttttttatagggtttgagtgagaaaggaagtttaagttgtttgtggttaatgggataagaggttttagatatttatagtattggtaagaaataggtaaaaaggttgggcgcggtggtttatatttgtaattttagtattttgggagtttaaggcgggtagattatttgaggttaggagttcgagattagtttggttaatatggtgaaatttcgtttttattaaaaataaaaattagttggatatggtggtgcgtttttgtaattttatttatttgggaggttgaggtagaagaatagtttgaatttaggaggtagaggttgcggtgagtcgagattacgttattgtattttagattgggtaataaggtaagaagagcgaaattttgttttaaaaaaaaaaaaaaaaaaaaaaaaaaagaaataggtaaaaagttttattgtatttttttgattttatttgtataaaaatgattggaggttgggagtagtggtttacgtttgtaattttagtattttgggaggtcgatataggaggattagttgaggttaggagtttaagattagtttgggtaatatagtgagatattgtttgtattttttttttttttttttttttttgagatggagttttattttgtcgtttagattggagtgtaatggtgtgatttcgggttattgtaattttcgttttttgggtttaagcgatttttttgttttagttttttgagtagttaggattatagttatgtattattatattcggttaattttttgtatttttagtagagacggggttttattatgttggttaggttggttttaaatttttgatttcgtgatttattcgtttcggttttttaaagtgttgggattataggtgtgagttattatgttcggtttttatttttttttaaataaaagtagtaaatttaaaaaagattttaaatatgtaaatgtgtgtgtgtgtgtaaaatatatttttagatttttttttttttttgtatcgtaattttataaagttaaaattatattgttttataattaaattgataatattttagagtgggtgaaatgaaataggatagagaaggtaggtgtgtgtttatgatcgtttggttggagatgatatttttattttttatttaaaggtttttttaggtttttttttttttttttttttttttttttttttttttttgagatggagtttcgtttttgtggttaagattggagcgtaatggcgtgatttttattcgtcgtaatttttgtttttcgggtttaagtaatttttttgttttagtttttttgagtagttgggattataggtatgcgttattacgttcggttaattttgtatttttagtagagacggggtttttttacgttggttaggttggtttcgaatttttaattttagatgatttgttggttttggtttttaaaagtgttgggattataggcgtgagttatcgtgtttagtcggtattttattattattattattattttattttatttatttattttttgagacggatatttgttttgttgtttaggttggagtgtagtgttataattttggtttattgtaatttttgttttttgggtttaagcgatttttaagattttttagtagttgggattataggtacgtgttattacgttcggttaatttttgtatttttaatagagatagggttttattatattggttaggttggtttcgaatttttgattttaagtgatttgtttgtttcggttttttaaagtgttgggattataggcgtgagttattgtgtttagttttttacgtttttttttttttttttttttttttaaagagatagggttttattttgttgtttaggttggagcgttatgttaaaattatagtttatcgtagtttaaaatttttgggttttagtaatttttttgttttggttttttaaagtgttgagattataggtgcgcgttatagtgtttagttatttaagtatttttgtttttttatataataagcgtttattattttatatatattaaaaaataattttaatatggataaattttggggatattatgtaagtgaaataagtttattataaaaaggtaaatattgtatgatttttttatattgaagtatttaaaggagttaaatttatagaaaaaaaagtagaatggtggttgttaggagttgggagagaatgaggaaggaagaattgttgtttaatgggtatagagttttagatttgtaaaatgataaagttttggagttttgttatttaaaatagagtgtgaaaattgttaagatgattaattttatgttatacgttttttattataatttttaaaataaaataaataaatttttaaaattaaaaaattaattttaagtattcgttttatttgtatgtgaattatggattttttattaattttggaatattaacgttttagaattttattttttaggtataatttaaggaaagaaaaaaaagaaagggagagaaaaattggaatagtgaaagaaaaaagaattgtatgaagtttgggcgtcgtggtttatatttgtaattttagtattttgggaggttgaggtaggaggattatttgagtttaggagtttgagattagtttgggtaatatagtaagattttgtttttataaaaaaaaaaaaaaaagttttaattatttaagtatggtggtgtttgtttatagttttagttatttgggaggttgaggtgggaggattgtttaagtttaggagattaaggttatagtaaatcgtgattatattagtgtattttagtttgagttatagagtatgattttgttttagaaaaagaaaaaattgtatggaggaaagatttggaagattatattttaataggattcggtaatattttttttttttattttatattatttgtattatttgttttatgataaaaaaaatttaaaaatagaaatatataaaaatgaaattaattaaaaaattttttaaaaatattttgtagtttgtgatatttaggaataaaattaaaatgaaaatattttggttaaagaaaaaattttagttaggcgtagtggtttatgtttgtaattttagtattttgggaggtcgaggcgggtagtttatttgaggttaggagtgtgagattattttggtttatttttattaaaaatataaaaattagttgggtgtggtggtgtacgtttgtaattttagttgtttgaattagggggtagaggttatagtaagtttagattatgttattgtattttagtttgagtgatagagtaagatatcgtttaaaaaggaaaggaaaggaaaga

SEQ ID NO: 69 - DNA, 6357 bp, Artificial Sequence
  chemically treated genomic DNA (Homo sapiens)
ttaaaagtttcgttgtttttttatattttattttttatattaaagtgtaagggattaaataggattggtaatttttaagtttttaatatttttagtattgatattcgttttttaaattaaatttgtttttgaattttaaaatttaaaaatagattaaagtggattgttgtagtgagattgttttttttattttaattttgtttcggttttaggtttttaggtagttttgttttagggtttttgttaagtaggagttagttgtttttttagttttttaaaagcgatggggagttgaggttagtggaatgtagttttggatttagaagttagaaaataatagagattgtttgtgggaagtgagttagagagattagatttttttttaatatttgattagattttagaatggtattaagtaagttattgaatcgtttagagtttttgtttttttattattaaaagttaggataatttttgtaatgaaatgagatattattattaagtattttagtgttgtgtttagtatagaacgaatatatttagtatgttttttttttgttttttttgtttttttagtatttaaagtagaaatagtatgggtagagagacgtttattgaattaggtgtttattagtattatgaaatatagtatataaaatttagtatttggagtttagaataaatttaaattttggtttagttattaagtagttatgtggttttgggtaattggtttatattttggtaatttttttaatatttaaaaatattttttcggttaggtgcggtggtttacgtttgtaattttagtattttgggaggtagaggcgggcggattatttgaagttaggagtttgagattagtttggttaatatggcgaaattttgtttttattaaaaatataaaaattagttaagtatggttatgtatgtttgtagttttatttatttgggaggttgaggtaggagaattatttgaatttaggaggtggaggttgtagtgagtcgagatcgaattattgtattttagtttgggtgatagagttagattttgttttaaaaaaaaaaaaaaaaaaagaaaaggaaaaaaaatttttggtagatatgagagtaaaatcgagtacgaaatgggtagttgggattttatatttattgaataattgtttgtttggaggttgagatatgattggggaggtttggtttgtttttgtgttaggtgatggggttggtttatttaggggtgtggtagtagggttgggttttgtgtgatttgtgataattttattttattaaggaggaagattggataaaatgggtttttgagatggttgaaggtagttaaaggggtttaagagattatggggagaagggtagttagtttttaggtagttttgttttattgtttttgataagtaggaggtagttgtttttttagttttttgaaagtaatgaggagttgaggttacgggaatgtagttttggattttagaagttaaggatttgttataaaggtggttttttgggaagtaaattagagggattagatttggttttaatatttgatttgattttaatttattaaaggattttttagtttatttgggagttaatatattagggttttagtttttttgttcgttgtgtggttttgggtaagtttttgtttttttttggattttgaggttttatttatataaaaagtagttggatttaggtttgttagtttttatttttgtggttttttttcgtttttttttattttttggttatgggatagttttttaggtatttttaaaaggaagtgtttaaaatagagttttttattttttttttaagtttagttttttattgttttttttttgttttgtttttgttttcgttgttttttagattaggtaggtaggtaggtttagagtattcgttttgagatattgtttgttggttgttttaagacgttttttttttttttgttcgtagtttttttagtttttgtatttttttgttttttgtttgttttgtttagtttgtaggattgatttttttaaagttaggtgttaattaggttattaattttatttattgtttagaaatttttttatagttttagtttggtttttttttatttattatttttatatatatttgttttagttttttaaaatagtttatagttattttttttatttatttttgttttttttttttttttttaaggaaatattggtttttttttttttattaggttgaatttatttattttgtaaaattaagtttaacgttttgttattttttttttttttttttttttgagatggagttttatattgtcgtttaggttagagtgtaatgggtgtattttcggtttattgtaatttttgttttttaggtttaatcgatttttttgttttagtttttagaggaattttgattataggtgtatattattatatttagttaatttttgtatttttatttttatttttatttatttatttattgtgagatggagttttttttttgttgtttatgttggagtgtaatggtacgatttcggtttattgtaattttcgttttttaagtttaaaggatttttttattttagtttttgaagtagttgggattataggcgtgtgttattatattcggttaatttttttttatttttagtagagatggggttttattatgttggttaggttggttttaaatttttgattttaagtgatttatttatttcggttttttaaagtgttgggattataggcgtgagttatcgtgtttggtttaatttttgtatttttagtagagacggagttttattatattggttagtttggttttaaattttagattttaagtgatttattcgttttagttttttaaagtgttggggttataggtgtgagttattacgtttggcgtttgtttttttttaatatgttttttttgatttttttatttttattggagttatggtttatttttggttaggttttatgtatttaattagttttgtttgttaggattgtagtgtttatttgatgagaaattatttgtgaaaatgttaggtatggtttggtatatagtaggtgtttaagaaataaatgttaatgttttagtttttttttgttttgtgtttattaatttggtatttggagtatatttttgtattttacgtaattaaatatttattgtgtgttaaggttagtgtgtgatagagtattgtaggggaggtaaaaatgaattaattttggattttgttttgtagaagttttgtttattggtatgaggtaagataggtttatagataatttatataagagagattgtaatttggataagatagttttagtgggagagggaaggagaattttgtagatttgggtgcggggaggttgtggggagagtatagttttttaggtaaagggataaggttaggaaagtaagaaggtgtagtttgtgttcgtggagtttaggaaattttttgggttagaaaagatttggtggtattttatatagtgtatgtgtttgtttgtttatttaatatgaatggtattatttttttttattggtgtgtattgtatttaataaaaaatttatgttttaagtattttttttttttttttttttttttttttttttggaatgaagttttgttttgtcgtttaggttggagtgaagtggcgttatttcggtttattgtaattttttttttttggatttaagtagtttttttgttttagtttttttagtagttgggattataggtacgtattattatgtttagttaattttttttgtatttttagtagaggtggggtttaatcgtgttggttaggttggtttcgaatttttgattttaagtgatttgtttattttagttttttaaagtgttgagattataggtgtgagtcgttatgttcggttaatagtatttttttttagaggtagaattgtaggggatttttttttttttgtttatttgtatttttttaaaagttttgttatgaatacgggtattttttgtggaataaataaagtttaaatgttggttagattagtgtttttttatgtataaggaaggattagttttttttttgtttatttttaatttattgattttttgataaaatgtaatgtaataaaattattatttttttttagagacgtttttttttttcgtttaggttggagtgtagtggtgtaattatagtttattgtaattttgaatttttgggtttaagcgatttttttgttttagttttttgagtagttgggattataggtgtggattattatatttggttgattttaattcggtattttgggaggttgaggtaggtagattgtttgagtttaggagttcgagattattttgggaagtatggtaagatttttatttttataaaaaattcgaaaattagttggatgttgtggtgtatatttgtagttttagttatttgggaggttgagttgggagaaatagttgagttcgggaggttaaggttgtagtgagtcgagattgtattattgtattttagtttgggcgatagagattttgtgtgaaaaaaaaaaaaagaagagaattttttttaaatagttattgtttgtttagatgtttattttaaaagataataatgaataagaagtagttatataaaatataagtttaaattttatattattagattttgattgttatgaaagtttttaaagatttatttttattttttaatttattttgttgattagtagggattggtgaattatgttgtgagtagtattgggttagagagaggggaggtaggaatttagaagagttgttttttagatgtgattattttttgaggatagggattatgttttatgtgttatttattattttttatagatagagtttgtagttaatgttttaggagttttcggttttaattaattgatgtttttgtgtttattggtttacgttatgtagttttagttcgttttgtatagcggttatttttatttattatttcgggtttggtagatagttattattatttttaatgtttttaattttatttattttatttttgttacgtgagtttttaagaatgggttaggtttttgttttgttggttggggttggggttggggagggagtgttgattggagcgggtattagtatggttgggggtggtaaagtgagttgttagtttgaaatttaaggtattggaagtaggttatttggattaaggataggaattttaggaataaaataaattttgaaagaatttatttattttatttggaaaattagaagaataatttttgtttgttattttgagtttttgtagtaagatagaagttgagaaggtgttttgtatattgtaaagtgttatgtatttgtaagagatggtagttattgaggttgggtacggtggtttacgtttgtaattttagtattttgggaggttgaggtaggcggattacgaggttaggagatcgagattattttggttaatatggtgaaattttgtttttattaaaaatataaagaaattagttaggcgtggtggcgggtgtttgtagttttagttatttgggaggttgaggtaggagaatggcgtgaattcgggaggcggagtttgtagtgagtcgagattgtattattttattttagtttgggcgacggagttagattttattttaaaaaaaaaaaaaaaaaaaagagatggtaatcgtgattgttaataataatgtagatatttattgagtatttattatttattaggtattatgttaagtatttatatatattattttatttaattttgagagtatttgtatgaagaaggagtagttattttttagaatattagttttatgagggtagggatgtttgtttattttgtttattgttgtattattagggtttagaatagtatttggtatataataagtatttaataaatatttgttgaatgaatgaattaattacgtatgatatagatgaaggtttaaggtttaaagagatgatagaatttggttacggttatttaggtagtaagtggttgggatagaaagtaaggatttgttaaatttagagtttaagtttttaattatttaatttttttttgtaattatcgtttttttagtatagttgttagtgttgttattgttatttttgttgtttttattattattttaggttttgggtttggttaggtagggaagttagatattggattttattttttttttattatttttatttttatattttttttttgttttttaattattttttttagtcgttttcgtattattggttttttttatagttattaatttatattttattttcgtttttgtagg

SEQ ID NO: 70 - DNA, 6357 bp, Artificial Sequence
  chemically treated genomic DNA (Homo sapiens)
tttgtaagagcgggggtgggatatggattggtagttgtgggaagggttagtggtgcgggggcgattgagagggatggttgggaagtaggaaagaaatatggaagtggagatggtgggaggaggatgggatttagtgtttggtttttttgtttggttaagtttagggtttgaaataataataggaataataagaataatagtgataatattagtaattgtattaaaagaacggtaattataggaaggaattaagtggttaagaatttggattttgaatttggtaggtttttgttttttattttagttatttattgtttgggtgatcgtggttaagttttattatttttttgagttttaggtttttatttatattatgcgtggttaatttatttatttaataaatatttattgagtatttattatgtgttaagtattgttttaggttttgatgatataatagtgaataaaatagataaatatttttgtttttatggagttgatgttttagaggatagttattttttttttatataaatgtttttagaattgaatgagataatgtgtgtaggtgtttagtatagtatttggtagatagtaagtatttagtaaatgtttgtattattattaataattacgattgttattttttttttttttttttttttttgagatggagtttggtttcgtcgtttaggttggagtgaagtggtgtaatttcggtttattgtaagtttcgtttttcgggtttacgttatttttttgttttagttttttaagtagttgggattataggtattcgttattacgtttggttaatttttttgtgtttttagtagagatagggttttattatattagttaggatggtttcgattttttgatttcgtgattcgtttgttttagttttttaaagtgttgggattataggcgtgagttatcgtgtttagttttaatgattgttattttttataggtatatagtattttataatgtatagagtatttttttagtttttgttttattgtaagagtttaggatggtaggtaagggttatttttttaattttttaaatgggatgaatgagtttttttaaagtttgttttgtttttaagatttttgtttttaatttaagtagtttgtttttagtgttttgaattttaagttgatagtttattttgttatttttagttatattgatgttcgttttagttaatattttttttttaattttaattttaattagtagagtagaggtttggtttatttttggagatttacgtgataaagatggggtagatgaggttggaggtattgagggtggtggtggttgtttgttaggttcgaagtagtgggtggaagtagtcgttgtgtagaacggattggggttgtatggcgtgggttagtgggtataggggtattagttggttggaatcgagggtttttggggtattggttgtaggttttgtttgtggggggtgatgggtggtatatgagatatggtttttgtttttaggagatggttatatttggaaaatagtttttttagatttttgttttttttttttttagtttaatgttatttatagtatggtttattaatttttgttggttaataaggtaagttgagaaatgaaagtaagtttttagaaatttttatgataattagaatttaatgatataaaatttgggtttgtattttatgtgattgttttttgtttattattattttttaaagtaaatatttgagtaagtaatgattgtttaaaaaaaattttttttttttttttttttttatatagggtttttgtcgtttaggttggagtgtagtggtgtaatttcgatttattgtagttttgatttttcgggtttaattgttttttttaatttagttttttaagtagttgggattgtaggtgtgtattataatatttagttaattttcgaattttttgtagagatggaggttttgttatgttttttaggatggtttcgaatttttgggtttaagtaatttgtttgttttagttttttaaagtgtcggattaaaattagttaggtgtggtggtttatatttgtagttttagttatttaggaggttaaagtaagaggatcgtttgagtttaggagtttaaggttgtagtaagttatgattgtattattgtattttagtttgggcgagagagggagacgtttttaaaaaaaaataataattttattgtattgtattttattaaagaattaataaattggaaatagataaaaaaagaattaatttttttttatgtataaagaagtattgatttagttaatatttaaattttgtttattttataaaaaatgttcgtgtttatggtagaatttttagaaaagtgtagataagtaaaaagagaaaaattttttgtaattttatttttagagaaaagtattgttggtcgggtatggcggtttatatttataattttagtattttgggaggttgagatgggtagattatttgaggttaggagttcgagattagtttggttaatacggttaaattttatttttattaaaaatataaaaaaaattagttgggtatggtggtgcgtgtttgtaattttagttattggggaggttgaggtaggagaattgtttgaatttaggaggaggaggttgtagtaagtcgagatagcgttattttattttagtttgggcgatagagtaagattttattttaaaaaaaaaaagaaagaaagaaaagagaaaagtatttgggatatggattttttgttaggtataatgtatattaataggagaaaatagtattatttatgttagatagatagatagatatatatattgtatagagtgttattaaattttttttagtttaaggagttttttgggttttacgagtataagttatatttttttgtttttttaattttgtttttttatttgaaaggttgtgttttttttatagttttttcgtatttaaatttatagggtttttttttttttttttattgaggttgttttgtttagattgtagttttttttatgtaagttatttgtggatttgttttattttatgttagtagatagagtttttgtagggtaaggtttagagttggtttatttttgttttttttatagtgttttgttatatattgattttggtatatagtaaatatttaattacgtgaagtataaaaatatgttttaaatgttaaattagtggatataagatagaaggaagttggggtattaatatttgttttttgagtatttattgtgtgttagattatgtttggtatttttataggtgattttttattaagtgggtattatagttttggtaggtagggttgattgagtgtatggagtttgattagaagtgagttatggttttaatgggagtgaggaggttagaagaggtatattagaagaagataggcgttaggcgtagtggtttatatttgtaattttagtattttgggaggttgaggcgggtggattatttgaggtttggagtttgagattaggttggttaatgtggtgaaatttcgtttttattaaaaatataaaaattaggttaggtacggtggtttacgtttgtaattttagtattttgggaggtcgaggtgggtggattatttgaggttaggagtttgagattagtttgattaatatggtgaaattttatttttattaaaaataaaaaaaaattagtcgggtgtggtggtatacgtttgtaattttagttattttagaagttgagataggagaattttttgaatttgggaggcggaggttgtaatgagtcgagatcgtgttattgtattttagtatgggtaataagagagaaattttattttataataaataaataaatagaaataaaaataaaaatataaaaattagttgggtgtggtggtgtgtatttgtagttagagtttttttggaggttgaggtagaagaatcgattgaatttaggaggtagaggttgtagtgagtcgagagtgtatttattgtattttagtttgggcgatagtgtgagattttattttaaaaaaaaaaaaaaaaagaaaatgatagggcgttgaatttggttttgtaggatgagtgggtttagtttggtggagagaagggggttaatatttttttaggaagggaagaaaggggtaaaggtgggtaaagaggatggttgtggattgttttgaggagttgaggtaagtgtgtatggaggtgatggataagagggggttaggttgaggttgtgggaagatttttaagtagtgggtagggttagtggtttggttgatatttggttttgggaagattaattttgtaggttgagtagagtagataggaagtagaggaatgtagaggttggggaggttgcgggtagagaaggaaggggcgttttaaggtagttaataggtagtgttttagggcggatgttttaggtttgtttgtttgtttgatttaaagggtagcggagatagggatagggtaggaagagggtagtggggagttgggtttggagaggaggtggagagttttgttttagatatttttttttggaggtgtttgggagattattttatagttaaaggatggggaggggcggggaagagttataaaaatgggggttggtaggtttgagtttaattgttttttgtatgaatgggattttaaggtttagagaggggtaaggatttatttaaagttatatagcgagtaaaaggattagaattttggtgtgttaatttttaggtgaattgggagattttttggtaggttggagttaagttagatgttgaagttaggtttaatttttttaatttgttttttagaaaattatttttgtaataggtttttggtttttggaatttaaagttgtattttcgtggttttaattttttattgtttttaggaggttgagggaataattgttttttgtttattagaaatagtggggtagggttgtttaggaattggttgtttttttttttatagttttttaggtttttttagttgtttttagttattttaggggtttattttatttagtttttttttttggtagggtggggttattataagttatatagggtttagttttgttgttatatttttgggtgggttagttttattatttaatataggggtaggttaggtttttttagttatgttttaatttttaaatagataattatttagtagatatgaggttttagttgtttatttcgtattcgattttgtttttatgtttgttaggagttttttttttttttttttttttttttttttttttgagatagagtttggttttgttatttaagttggagtgtagtggttcgatttcggtttattgtaatttttattttttgggtttaagtgatttttttgttttagttttttaaatagatgggattataggtatgtatgattatgtttggttaatttttgtatttttagtagagatagggtttcgttatgttggttaggttggttttaaatttttgattttaagtgattcgttcgtttttgttttttaaagtgttgggattataggcgtgagttatcgtatttggtcgagagaatatttttgaatattgagagaattattaaaatgtaagttagttgtttaagattatatagttatttagtgattgagttagaatttgaatttgttttggattttaaatgttgggttttatatattgtattttataatattgataaatatttgatttagtaggcgtttttttgtttatattgtttttgttttgggtgttggagagatagaagaaataaaagaaaaatatattgagtgtattcgttttgtgttgggtatagtattgaagtatttggtagtagtattttattttattgtaagaattgttttaatttttagtgataaggaaatagaggttttgagcggtttagtgatttgtttaatgttattttagagtttagttagatgttgaagagaggtttaatttttttgatttattttttataaataatttttgttgttttttggtttttgaatttaaagttgtattttattggttttaattttttatcgtttttaggaggttgagggaataattggtttttgtttagtagaaattttggggtaggattgtttaggagtttgagatcggggtagggttagagtaaagggaatagttttattatagtagtttattttgatttgtttttgaattttaagatttagagatagatttgatttgagaaacggatgttagtgttgaaaatattaaaagtttgaaaattgttaattttgtttaattttttatattttaatgtggaaaatggggtataaagaggtaacgggatttttgg

SEQ ID NO: 71 - DNA, 9964 bp, Artificial Sequence
  chemically treated genomic DNA (Homo sapiens)
ttaaggaaataaaagaggataaaaataaatggaagaatattttatgttaatgggtaggaagaattaatatcgtgaaaatggttatattgtttaaggtaatttatagatttaatgttatttttattaagttattaatgattttttttatagaattggaaaaaattattttaaatagatttatttttttatattttataaaaatattataaagtagatattattagtatttttatattatagataaggaaattgaaatttagataggtgaaataattttttaaagtttatatagttaataaatggtagaatttagttaatttggttcgagggttgatgtttttaattattgtttatttttgtagtaatatttagaagaattaagtattaggatgagattttattttttataaagtgacggagtaagtaattttagattttttttttttttttaatatttataaaatttattgtttttgaaatgtagtaaatattttaagatttttttgattttgttgatattgtattttttgtttggattgtttttttttttgtgttttatttagtaaatttatgttttataatttatttaaaatattatttgtgttttgtagtgttttttgaaatattttagggatttttaaatttttttttttttgtttatattgttttttttgtttgttgaataggggattgagaaagaaaatatatttttttttattaaaagataaaaattataaatagttattagttgtattaagatatatgttaggtgtgatggttaatatcgagtgttaatttgattggattgaaggatgtaaagtattgattttgggtatgtttgtgagggtgttgtttaaaggagattaatatttgagtaagtgggttggggaaggtaaatttatttttaatttgggtgggtattatttaattggttgttagtaaatataaagtaggtagaaaaatatgaaaaggttagattggtttagttttttagtttatattttttttttatgttgtatgttttttgtttttgaatattggattttaagttttttagttttgggatttagattggtttcgttgtttttcggtttgtagttggtttattgtgggattttgtgattatgtgaattaatattatttaataatttttatatatatatatatgtatatatatatataaatatatatatgtatgtatatgagagttatatataaatttacgtgtgtgtgtgtgtgtgtgttttttattagttttgtttttttagagaattttgattaatatattaggattttttttaatttttttaataggaagatatttttattaagtatatagattatttataaaaggaagagtatgagtttgatattgaatattttagttttaattataagtgttattaaataatgaaataatatttataatattttgaggggtgaaaaattggattttggaattttatatttaattaaaaatgataagagaattttttgtattattttatgatattttgaaaaatattgattattaaaattgatatgggaagaagttttttaaaaaacgtataaataaattattatggaaattattggaaaagttgtttaagaataatttagttattattattaaatggtattagggtaaataattatattggttggtattattaaaatttataagaatagatgtgttatttaaattaaaatggaaattatagattaattttatatgaagaagaaattatagtacgtttgggatatagttattatgttattttttgagttttattttagaatgtgggtaagggatatagttaatgaaggagagagatgttgatagtgagattaattttttaggaagtaatttaataaagtttgtatgttttttttaatttttatttattataagtggttgagattatcgttaattgggataattttttatagagatattggataaaatgtaggaaaaaatttttaaaagatttatattttttggtcgaataattttattattaaaaattaatattaatatttgtggtgatggttgtatagttttgtaaatatattaataattattgaattatatatttaaaatgggtgagttttatggtttataaataaatttttagaaaatttatgttaagaaaataatttaagatgtagagaaaattttaagtattatgatgtttattgtagtgtaattgtaaagtaaaaagttgaaatttttaagttatcgaagtttatttaattaaatattgtttgaatagttatttattgttaggttgatattggggttgtagaaatgaattagatttagattttgattttagaggaatttttatatgggtaggaagttagttaagatatagaataaattaatgtagagagagagaggggattatgtagagaagggttaggaaagtgttttttttggatacgttatatgagtatatgggattgaaatttatttttttttttagattatattgttttataaaaaggtgagaattatataattattatttaaagagaaaatgagatatttttttttaaaggagaggagatattaggtataattatagttatttatatttacgggtttagttggattaggaatagtatagagaggtattatttaagtattttttttaatgatttgggaagttttatatatttttttttattagggtatttcgagtttttttttacgttattttagaggtttgttaattttagtagattttatttttttagttttttttttgggtataggtagaatagagtagaaagaacggaggaaatgtatttgaatgtaataggtatttttgatagtttttttagttaatggttttagatttttgttagtaagttgtttaaggtttgatgtgggaggaagatataagataaggtgttagtagtatagtgtgataaattttgagagagaagatgtgggggtttagaagagggaataagatttagtgtgggggtttaaaagggttttttagaagtgatgatttttgagtttattttttaaagtgataaatggttagttagttaaagagttggaggttaaggttattgtagttgtatttgaaatattttttagaagaattggaattaatttttagttttaaaaatggttaaatatattatgttatatttatattttttaatttatatgttattgtatttttattatttagtattatatttgatatgttataggtatttaataaatatttgttgaattaataaattaatttagatgaagtagtaaatattatagaaaaggagttaatattaatattatttaaagttttttttattttatttttataataatttaatagggtaggttttatgattgttttattttatatatgagagatttggagataagtgaattaaatagttaaggtgttggtgatttggtgatttgggtgagtttgattttagagtgtatgtttttagtttattatattttattgttaatttatttttaaaatgggtaaaaagtagattatttagaagagaaatagataattgataaagaaatatgaaaagatatttaattttattaataatgaaagaaaagtaaattaaagtaatattgatatattatttttagtgtttataagattaataaatattttaaaaattgaaaataataaatggtattggtgagtttgtgagaaaatagatatatatttatttttatatattattgggtggggaggggtgtataatatatgtataggataaattggtagtattaaaaattttaaatgtttattatttttagatttaggaatgtttatattttaggatgttattttttaaaaaaatgtttttataaatgttaaaagatgtttattgtaatattaattataatggaggggggaaaatttttgggaataatttaaatttatattaataagggagtgtttaaataaattatagtgtatttagattttgtaatttttatggtatattggtatatggttgaatgaaaaataaataaaaaaaagaaattgtaaattaatatgtagattatggttttatttatgtaaatataatattaatgatgataatttgttttaaagatgaaattgtttggttataatatggttttgttgttttaggattgataagggaaggggaaaaagagagtgataaaaggggaagaaaatgaaaaagggaggagaaggtaatagaaaagataagatagagaattttatatttttaattgtatattatgagaggaagagaagagtgtgggttttgtaattatattgtttaggtttataggcgggttttgtattttttagttgggtaattattaataagttattttatttttttgagttttagtttttttatttgtaatatagggataatagtatttattttttaaggtttttatgtggttaaattaatttatgtaaagtatttagtgaagggtttggtgtattgtaagtatttagttaatagtaggtgttatttatttgggttaggtattgtggtatgcgttttttatatatgatattattaaattgttataataatcggggatttagtttgtggaagttgattgtttgagtttataagtataatattgtattttaggtttgattttagagtttttttaatttgtgttatagttatttttgggttttattgttttttttttatagttgaggagatttatagttagagaggtggttttgtttaaggtattttagttttatgtggatggtttgattttaaagtttaaatgagttaattttattgttttatagagagaagaaaatagggaagagttagagttgggggagggggtatattagagggaggggttattttgggttttatttttagtaaggaagggattgagatatttttggggttaatgtagggttaggtcggtagaaggtagggtgggtggggttgagttagaggagaagggataaatgttaggttttaatttaagtatttatttgttattcgttcgtttttagtgtagggtaataggtaagagttgtttttagtttggtattttatttttggtttgttagttggttttttagggttgtatatattgattttttggtttgagtagatttgatttttttttttgtttgttttttagaatttgttttttttttattttttttttattttttatgtttttttttgtttttttttatttttagttttttttttttttttttttttcgttatttttttttgttagtttttaagattatttattttattttattattttttgatatttttgtttttttttatttttttttttgaattttaattatttttttttttaaatttttttttttttttttttttgttttttttttcggttttgtattttttcgtttttgtgtttttgtttttttttttttttttattaagaacgatggtttaatatttttttttgtaattttttatttttttttttttttgattttttttatttgttgggttgatagtagagtttagtgggttagagtttatggggagtttaggggtgggggaagagttagggagggaaattaagaggatgtgggggtgatgggaatgatgaattgggtaaggagagatttggggaattgagagatgaataattagtagaaataagtgaagaaagtggaagaggaatgtagtgttattatatagaaagtaaatagatttttatttttattttaatttattgtgagattttaggtaagttatttattttttgaaaaaaaggtttggtttgtaatttttattattttttttagttttgattttgtgattttttaaatttttttgtttttaagaatttttgattttttgattatagttatttaaagttttgtatgatttttttatggtgggaaaggggtattaggaagagaagtaaggtttgatgtttttaatttttgaagagaaattattattttttttttagatttaattgatttttgtaaagtaggttataaaaggggtgggggggtgggggataaggaatgttgtaatgagtgttttttggttgtttgttggggtagagttgtagttggttttttttatttttgggagtatagattgggtgttgatataagagaggattttaaagtcgtagggaaaaatttttagtaatgatttgttatttggttttaaattttattattatttttttggttaaaagtattgttttaagaagatgtttggtaagtattattatatattaggtatataagttattgaatggtagagtaaatgaatatttaatagtatttgaaattttattgtagttatagatttgtttttttggtaaggtattggtgataaatggtatatgatttggaaagaggtttatgttagtgtagtagaggagataaatgtttagagttaggtttttagttaagaaaaaaaggtagtaatatttgaattatagatttataatggttaagttaggaatttttggaaatagattgtttaggtttaaattttgttttttttatgtattagttttttgatttagataggttatttaatttttttgggatttagtttttttattattatagggttgatatgagaatacggtttggtatagagggttttgtaagtgtttgattattagaattaggcggaatttatgaaattatttagtttaatgttagtggagaaacggaagtttagagaggggaattatagagtttaagtttatataataaattgtaataggattgggataagaattaattttttagttttttaaatttagtttggtatatttatgtgattttttttggttgtacgtttattttttttatatgggaaatggagaaaataaaaataataaagtttattaattaaatataatatttaatatttttttattgtttattttgggataggtattttgttaaatgttttatatggattattttattgaatttttataatatttttgtgatgtagattgtttttgttattattaatattttttagatataagatgtatagtagggaagtgatttttttaaggttttaaagttagtgagtggtggagttaggatttaaatttaagtagtttggttttagagtttatattttttatattttaaattgattaaaatgtttttttgatttaattttatttattttagttttttggtaggtaatgagatggaatagaaatagagtttatggtaattagattataaggttatgggtataatgatggttaggtagagtgaggtagagtaaattttaggaaaggagtaatagaataagagaaatgagaataggagtttgaaagaatttgagaatttaataaattttaagaagtggtttatatttttttaggattttgagtatattatggttaaaagttttttagtaatgatgtgtgttaattttttttgtttttatatataggaggtaggttttttttattattttaaggtaggattggattttgtttttaatattgggggtttttttttttattatatattttaatgttgttggtattattgttgttagtattgatgttaggggagtttataggagtttggagttttgttatttgttttgtttgtatttttgggttatttattttttattattaatagttagggttagttttagttagatgtttagacgtgattttaggaaggggtttttttttttttttacgttttggttttagtttggggagtggttagattttaatggcgataaattttggtaattttatttgtggtttgtaggtttagttttaagtgttttagtttttataagtaggtaggggaagggaaatatatatttttagatatgaggtaggtattggatttaattttttatttattttgtgaagtggttataattattttacgtttgatagttgatgaaggttaagatttagagaggggaagtgatttgaataagaatatttaataatgaaattggagagttggaattttaataagaaaagttaatatttattgaagatttattatgtgttaaaaattatattaaaggtttaatttggattgttttatttagtttttttaataatttttttgttttttttaattttagggtttatatgttttggttttatatattaatttaggttgttgtgatagtttatgagagggggagaggttgttttgggatggaataagaaaaagaggttgttttgtgaggtacggggagggtgtttgttttatgagattaggaagggagggagatgaaggaggttgttatatgagggtagggttatgagttgatttgttttttaaaatataaggttgagggtgttagtagattttatttagtaattttttttatagtgttagtgttttagtttttttatatttttttatgttttttttattgtattgttttttattttgttttattttttgattttgtttttttaatttgttttttttttttatatttgttttttttttttgttttttttagttgttttttttttggtgttttttagtttttattttttttaatttttatttttttgttttagttatttttttgtttttattttttgattttgttattttttttatttttttttttttgttttttagttttttttttattttttttaattagggttatgatttttttttttaaatttatttagttttttgtaatttttggtagtatttttttatgtttgtgtttgattgattttttatttttgttggattttttttatttttgtttttatttttatgaatttttgtataattttttagatttattgatttttttttatgtttttttcgtgttttttggtttatttgtttttgtttttatttttgtgtgtattattattattttttttttttttttttattttttttttttttcgatttaatttttgtttttatttttattttgttttttttttttttatttttgattttttttttttttttaatttttgtttttttaattttattattattattatatttttgttttttttttatttttttttttttattttttttaaattttttttttttttggttttttttttagttttttttttttttttaattttagattttgtttatttattaatttattttaaaatttaataaatatttattgagtgtttgtgtgttatttgttttttttttttttgatttttttgtttttttttttttttttgttttggtttttgtttgttttattaatttatagattatgtttttgtttttgttttttagttttattgggatttgtttttatttttttttatatttgtgtttatttaagagataggagtaaatttaaagatagtataatattaggttggtggtatatattttgtaggatttagggtttattttttttttcggattttttgatttttttaaattgatatatgtgattttaagtttttttttttttttggttgattttgtttaggaaatattttgggttaagttttaggagttttatttaatgatatatgtttgtattagtaggttgaatttttatttggttaagattaatatttttagaaagatttttggttttaagtattgattaaagggttagtgggttggtagtttttattttgttatataaaaatatattttagtgatttttattattatagaggtagttagtgttagaatgtgagttagaatttaggttttttgatttttagttagaattgttttttttatttttttgtttagtagttagttttttattttttttttttttatgttttattggtatatgttaatattgggaaagaagttttttttttggaagggtaataagagtatttcggaggtagtaagttttgggtgggaagttgaagacgaggattaaaggtttggttttttgttaggtttttatgatggaattttattttttttatgttttttgtagg

SEQ ID NO: 72 - DNA, 9964 bp, Artificial Sequence
  chemically treated genomic DNA (Homo sapiens)
tttgtagaagatatggaagagatgaggttttattatgagggtttggtaaaaagttaagtttttgattttcgtttttagttttttatttaaaatttgttgttttcgagatgtttttattgtttttttagggaaagaattttttttttaatgttaatatgtattaataaaatatgagggaggaagaaataggaaattgattattgggtaaaggggtgaaggaaatagttttaattggaggttagaaagtttggattttgatttatattttggtattgattatttttgtgatgatgaggattattgaaatgtgtttttgtgtggtaggatgagaattgttaatttattaattttttgattaatatttaaggttaagaatttttttaagaatgttggttttagttaagtgaagatttagtttgttaatgtaaatatatgttattgagtagagtttttgaggtttggtttagggtgttttttaagtaggattagttagaggggagaaggagtttgaggttatatgtattagtttaaggaaattaagggattcggaaggaagggtaggttttaggttttatagaatgtgtattattagtttgatattatgttgtttttgaatttgtttttgttttttggataagtatagatataggaagaggtgaaagtaagttttagtggggttggaaaatagggataaagatatagtttatggattagtgaaataggtagaggttaagatagagaagagaaagggggtaaagagattagaaaaagagaaagtaaatgatatataggtatttaataaatatttgttgaattttggggtaaattgatgaatgaatagagtttgaaattgaggaaggagaagggattaggagaaaagttagaagaaaagaaaatttaggaaagataaaaggaggaaagtagagagagaataaagatgtggtggtggtggtagagttaaaagaatagaaattgagggggaaaaagagattaaaggtagagggaaagggagtagggtagagatgaaaatagagattgagtcgagagaaagagaaaatgaaaaaagaaaaagggggtggtgatagtgtatatagggataaaggtagagatagatagattaaggggtacgaaagggatatgaggagggattaatgagtttagaggattatataaagatttatagaagtgagaataggagtggagaggatttagtaggggtagagagttagttagatataaatataaaaaaatgttgttagaaattgtaaaaggttaagtaagtttagggaagagaattatggttttaattgagggagatgagagagagattgagggatagagagaagagagtagagaaaatgataagattaaaggatagagatagagaggtgattaaagtagggggatgagggttaagaggggtgagagttgagagatattaagagaaagatagttagagagagtaagaaggagagatagatgtaaagaaaaagggtaaattggaaagatagagttaaaaagtgagataagataagggatagtataatgggagagatatgggagaatgtgagaagattaaagtattgatattgtgaagaaagttattgagtagaatttattagtatttttagttttatgttttgagggataggttagtttatggttttgtttttatatggtaattttttttatttttttttttttttgattttatagaataagtatttttttcgtattttataaaataattttttttttttgttttattttagagtaattttttttttttttatgggttgttatagtagtttgggttggtatgtggggttaaggtatgtgggttttgaaattggaaaagatagaagggttgttggagggattaaatgaaataatttaagttaagtttttagtatagtttttggtatatagtaaatttttaataaatgttagttttttttattaaaattttagttttttaattttattgttggatgtttttgtttaaattattttttttttttggattttggtttttattagttgttaaacgtgaggtaattatggttattttataaggtaggtaaggaattggatttagtgtttattttatatttggagatatgtgtttttttttttttgtttgtttgtgaaagttaaagtatttggggttgagtttgtagattatagataaagttgttagagtttatcgttattggggtttgattattttttaagttgagattagggcgtgggagagaagaggagtttttttttggaattacgtttgagtatttggttagagttggttttggttattggtggtaagaaatggatggtttagaagtgtaggtaaggtagatgataaggttttaggtttttgtaaatttttttaatattaatattggtaataataatgttaataatattggggtatgtagtgggaaggaaagtttttaatattggaggtaaagtttagttttgttttgggatggtggagaagatttattttttgtatataaaaataggagaaattaatatatattattattagggggtttttggttatgatatgtttagggttttgggaaaatatagattattttttggaatttgttgaatttttaagtttttttaagtttttgtttttattttttttgttttgttattttttttttgaaatttgttttgttttattttgtttggttattattatatttatgattttgtagtttagttattatgggttttgtttttattttattttattatttattaagagattagagtgagtaaaattgaattaaggaagtattttagttaatttagggtataaagagtataggttttagagttaaattatttgggtttgaattttggttttattatttattagttttgggattttagaaaagttatttttttgttgtatattttatatttggaaaatgttggtaataataaggataatttgtattataggaatgttgtgaagatttagtaagataatttatataaagtatttagtagagtatttattttagagtaaatagtaaaaaagtgttaaatattatatttaattgatagattttattatttttattttttttattttttatgtagaaaaaatgaacgtatagttaagggaagttatatgaatatattaggttgggtttgggaagttagagaattgatttttgttttaattttgttataatttattgtgtgaatttgggttttgtaatttttttttttgggttttcgtttttttattgatattggattagataattttatagatttcgtttagttttgatagttaaatatttatagagttttttgtgttaggtcgtgtttttatgttaattttgtgatgatagggaaattgaattttaaaaagattaagtaatttgtttagattagaaagttagtatataggagaagtaggatttgaatttaggtaatttgtttttagagatttttaatttaattattatggatttgtgatttaaatattattattttttttttttgattgagggtttgattttagatatttattttttttgttgtattaatataggtttttttttaggttatatgttatttgttattaatgttttattaaaggaatagatttgtaattatagtggaattttaggtattgttgaatatttatttattttattatttaataatttatgtatttaatgtgtgataatgtttgttaggtatttttttaaaataatatttttaattaaagagatgatggtgaaatttgagattaagtaatagattattattgaaagtttttttttacgattttaaaatttttttttgtgttagtatttaatttgtatttttagaggtgaaaagggttaattgtaattttattttagtagatagttagaaaatatttattgtagtattttttgttttttatttttttattttttttgtggtttgttttgtaaaagttaattaggtttggaagggaagtggtaatttttttttaggagttggaaatattaggttttatttttttttttagtattttttttttattatgaaagaattatatagaattttagataattgtaattagagaattagaaatttttagaaataggaaaatttagaagattataaaattaaaattagaaagggtggtggaaattataggttaagttttttttttagagagtgaatgatttgtttagggttttatagtgaattaggatgagaatagaaatttgtttattttttgtatagtgatattatattttttttttattttttttatttatttttgttaattatttattttttaattttttaaatttttttttatttaatttattatttttattatttttatatttttttagtttttttttttagttttttttttatttttaggttttttatgggttttgatttattgagttttgttgttagtttagtaggtagagggagttaaagggagagaggaatggggaattgtaggaagaaatattaagttatcgtttttgatagagaggaagagagagatagaaatatagagacggagagatataaagtcgaggaaagagataaaaagggggagagaaagaaatttagagaaaaagatagttagaatttagagggaaaaataagagaaagtaagagtgttagagaatgatgaaatgaaatgaatgattttgaaaattaataaaagaaagtaacgaagggaaaaagagagaaaaaagttgaaaatgaggaaagatagaaagagatatgggagataaaaagaaaatgaaaaagagatagattttaagaaataaataaaggaaaaagttagatttatttagattagagagttagtgtgtatagttttgagagattagttggtagattagagatagggtgttaggttgaaagtagtttttatttgttgttttgtattgaggacgaacgaatgataggtgggtatttgggttaggatttggtatttatttttttttttttgatttagttttatttattttgttttttgtcggtttggttttgtattggttttaaaggtattttagttttttttttgttagagataaaatttaaagtagtttttttttttagtgtatttttttttttagttttggtttttttttatttttttttttttataggatagtaaaattagtttatttgggttttggaattagattatttatatagagttgggatattttgagtaaaattatttttttgattatagatttttttaattataaaaggagggtaataaaatttagaagtgattgtggtataagttgggagggttttggagttagatttagaatatagtgttgtgtttatgagtttaaatagttagtttttatagattagattttcggttgttgtaataatttggtaatattatgtatggaaaacgtatattatagtgtttggtttaaataaataatatttattgttgattgagtgtttataatgtattagattttttattaagtgttttatatgaattaatttagttatataaggattttaaaagataggtattattatttttatgttatagatgaagaaattgaggtttagagaggtgaggtaatttgttgataattatttaattagaaagtatagagttcgtttatgaatttaggtaatgtagttatagaatttatattttttttttttttttataatatataattaaaaatgtgaagttttttgttttattttttttattattttttttttttttttttatttttttttttttttgttatttttttttttttttttttttattaattttaaggtagtaggattatgttataattagataattttatttttagagtagattgttattattaatattatatttatataaataagattatagtttatatattgatttgtaattttttttttttgtttgttttttatttaattatatgttaatatattatggaggttataaaatttgaatgtattgtaatttatttaaatatttttttattgatataaatttaggttatttttaaggatttttttttttttattatgattaatgttgtaatgaatattttttggtatttgtgagagtatttttttagagggtggtattttaaaatataagtatttttggatttaaaggtaatagatatttaaagtttttgatattgttaatttgttttatatatgtgttatatatttttttttatttagtggtgtataagagtaaatgtgtatttatttttttataaatttattaatattatttgttatttttaatttttaaaatatttgttaattttataggtattaaaaatggtatattagtgttgttttgatttgttttttttttattattaatgagattgggtgtttttttatgtttttttattagttgtttattttttttttgagtggtttattttttgtttattttgggggtgggttggtagtaaaatatagtggattaaaagtatgtattttggagttagatttatttaagttattaagttattaatattttagttatttggtttatttatttttagattttttatatataaaatgggatagttatagaatttattttattggattattgtgaggatgagatgagaagaattttgaataatattaatattaattttttttttgtgatatttgttgttttatttggattaatttattaatttaataaatgtttattgagtgtttatagtatgttaggtgtggtgttaggtagtggagatgtagtggtatgtaaattggagagtatgggtatagtatggtgtatttaattatttttaaaattaaagattaattttagtttttttagaaggtattttaaatgtagttgtaataattttgatttttaattttttagttggttaattatttgttattttgaaaagtgagtttaaaggttattatttttgggaggtttttttaaatttttatattggattttgtttttttttttgggtttttatatttttttttttagaatttattatattgtattattggtattttgttttatgttttttttttatattagattttgagtaatttgttgataggaatttggaattattgattaggggggttgttagaaatgtttgttgtatttagatgtatttttttcgttttttttattttgttttgtttgtatttagaaaaggaattggaagaataaaatttattgaggttaataaatttttgaggtgacgtagagaaaaattcgaagtgttttaatggaggaaagtgtgtgggattttttaggttattgggaaggatatttaggtggtgtttttttgtattatttttggtttagttgagttcgtgagtgtaggtggttgtggttgtgtttgatatttttttttttttagaggaaaatgttttattttttttttgggtggtggttgtgtgatttttatttttttatgaggtaatgtagtttggagggagaagtaagttttagttttatatgtttatgtagcgtgtttaaaggaaatatttttttggtttttttttatatagttttttttttttttttgtattgatttgttttgtgttttggttgattttttatttatgtgggaatttttttggaattagagtttaggtttgatttatttttgtaattttagtgttaatttgataataagtaattatttagataatgtttgattgaatagatttcggtgatttaggagttttaattttttattttgtagttgtattgtagtagatattatggtatttaaagttttttttgtattttaggttatttttttagtatagattttttaaaagtttatttataaattataaaatttatttattttaaatgtgtaatttaatgattattagtatatttatagaattgtgtaattattattataaatattagtattgatttttagtaatgggattattcgattaaaggatatggattttttaaagatttttttttatattttatttaatatttttgtaaaaggttgttttagttaacgatagttttaattatttgtgatgagtggggattaaggaagatatataggttttgttgggttattttttgaagggttggttttattattagtattttttttttttattagttatattttttatttatattttggaatgaaatttagagagtagtatgatagttatgttttagacgtgttgtggttttttttttatgtaagattggtttatagtttttattttaatttaaataatatatttgtttttgtaagttttggtaatattagttaatataattatttgttttaatattatttggtgatggtagttgggttgtttttagatagtttttttaatggtttttatgataatttgtttatacgttttttaaaaaatttttttttatattaattttagtaattaatattttttaaaatattatagagtaatatagagaatttttttattatttttggttaggtataaaattttaaagtttagttttttattttttagagtgttataaatattattttattgtttaataatatttataattagagttaaaatgtttaatgttaggtttatatttttttttttataagtaatttatatgtttagtaggaatatttttttattaggagaattaaaaaaggttttggtatattagttagggttttttagagggatagaattaataggagatatatatatatatatatacgtgagtttatatataatttttatatatatatatatatatatttatgtatatatatatatgtatatatatatgggagttattaagtagtattaatttatatgattataaggttttataataggttagttgtaagtcgaggagtaacgaagttagtttgagttttaaagttgaagaatttggagtttaatgtttaagggtaggaagtatgtagtatgggagaaggatgtaggttgggaggttaagttagtttagtttttttatgtttttttgtttgttttatatttgttggtagttaattagatgatatttatttaggttaagggtgggtttgttttttttagtttatttatttaaatgttaattttttttgggtaatatttttatagatatatttaaaattaatattttgtattttttaatttaattaagttgatattcgatattaattattatatttggtatatattttaatatagttagtaattatttatagtttttgttttttggtaaagaagaatgtgtttttttttttaattttttatttagtaggtagagaaagtaatatgagtaaaaggaaaaaagtttaaaagtttttaaggtattttaggaaatattatagagtatagatgatattttaaatgggttatgaagtatgagtttattggataaagtatagggaaaggggtaatttaggtagagggtataatattaataaaattagggaggttttaagatgtttattgtattttaggaatagtgagttttgtagatgttgagggaggaggaagagtttggaattatttgtttcgttattttatggaagatgagattttattttggtatttggtttttttaaatgttattgtaagaatgaatagtgattaagaatattagttttcgagttagattaattgggttttgttatttattaattgtgtgaattttgggaggttattttatttgtttgaattttagtttttttgtttgtaatatgaagatattgataatatttattttatagtgtttttatgaagtgtaaaagagtgaatttgtttaaagtagttttttttaattttgtgaagaaagttattggtagtttgatggggatggtattgaatttataaattattttgggtagtatggttatttttacgatattgattttttttatttattagtatggaatgtttttttatttgtttttatttttttttatttttttga

SEQ ID NO: 73 - DNA, 5728 bp, Artificial Sequence
  chemically treated genomic DNA (Homo sapiens)
attgagatgggttttattatgttggttaggttggttttgaatttttgatagtatgtgatttgtttgtttgtgttttttaaagtgttggaattataggcgtgagttattgtatttggttgattttttttaattttaaaaatatattttaatgtttagagtaattttaggtttatagttaaattaagaggtcgatatagggattttttatattttttagtttttatatatatatagttttttttattattaattttgttttttaaatattatgagatttttcgataagggttttttaaggagtcgtttttttttttagggtgaaaatttttatataatcgtgggggattttttttttattaaattcgcgggggtttaaggttattaattttttttaatatataagatgggtataaagaatttttaaaaaaaggtgtgtttaattttattaaagagaaggggaataaatttatggggattgttaaggtattttagataaaaatatttttttcgtggttttttgaaaaaaatttttgattaagaaaagatttttaggaaaagtgttttttattaaaaaaaaggtttataaaataaagttttaaaaatgaatttttttttttttttttttaaaaaaatattaaaggtttgaattaaagttagaaggcgtaaaatattttaaagaagttaatttgtgaagggtttaaggaaatgaattaagttttttaaaattttaattttttaaattgtttaattttgaataatattttttttttaattatttaagggtttttttttttatttgattaagggtgttttttatttaaaaatatgaaatttgtagaaatgtttaagggtaaaagggatcgttaaaagataatttaggtttaatttgattttatatggtataagagatatatttagatttgtatgtttagttttgtagttagaaattgatattgagttgaattaaattattcggagaagaattgagaaatttaaagtaaaaggttaggaaattcgaatgtatatatattttagaggtttagtgtaatatgaagaaagttaaggagagggatttttttattatggaagatttgggggtagagggatttaaaaggtgggataagttaaagatggtgatttagggtggtttttatgatataattttttttttttttattttttatgaaatttttagttaattttatattttttattaatttaagtgaatatttggggggatggtttatggagggaaataagggagtaattgtttggattatattttaattttttatttgtattagaatatttatatgtttatatatttttatttgtattagaaatatttatataagtttatatatttttattttaattttttttgagggaaatgtatttttataagtgaataagaagttaaattattgattatgttttaattggttagtttgatgtttaatagttttttatttttttatttttgtatattttgtagagagtaatataagttttttatgataggaaggatttgtatatgtttattttatagtagaaaaatggtaagatttttttgtttttaattttttttttaaataaatttaaattttttgtattttggaatgattttgggtaaagtggttgtttatagaaagttttttataaaatattgaggatattattagatattattatatttttatgaatatgtttttttttatttttaagagaagaagagttagaaatataatttattagagtgggagatggtataaaagttggattaaatggattgttagatggagggtaaatttggtgtgaatgatttagtgagaagtttcgggagttttgagggtagtagaagggtgcggatttaaagttattgttagagtggttggaaaatgggagatcggtttagagatattttatttatttaaaaattgtgttttttgtattacgttaaagtgaatgtaaaataaagaataaaagggttaaaggtttaggtttaaattttaggtatatgtatattttaattgaggtatttttttttttttttttaaatgattagtatatttattttttttaaagaaaatattttttttaattattttttatttttaaattttttttataaagatgagaaaatatttaaaaattattggggttatttttttgtttatcgagtaaagagaatttttaaattatatttataatttttattttaaatatttgtatttatttttatgttagagttcgttgatgattgattaaatagagttttaaagtttgaagaataggaaatttagaaatgattaataattatgtaggtttattttttttagtatagaatgtttatatagaattaatgttagaggtttttagagaaaaatgtagaaatttttattttgtaaatttagaagatgtaattgtttaagtattttttaagaaatattaattttaagtatgtagatattattgagaattaaatattttaatttttaaattattaattttttagtaggatgtatatatgtaaaatgttttattagtattgtaagaaaagatttttggtcgggcgcggtggtttatgattgtaattttagtattttgggaggtcgaggtgggcggatgacgaggttaggagatcgagattattttggtatacggtgaaatttcgtttttattaaagatataaaaaattagtcgggcgtgatggcgggcgtttgtagttttagttattcgggaggttgaggtagaagaatggcgtgaattcgggaggcggagtttgtaagtgagtcgagatagtgttattgtattttagtttgggcgaaagagcgagattttattttaaaaaaaaaaaaaaaaaaagaaaagatttttttaggttttattaattttgttttaaagttagggttttttattagatataggaaaattaatttaaagtttttatttagttatgatgaatttgagatttttttaggtttttttgtatttaataatatattatattataatgttgtggtgaaaattaaatggattaatattattttttttatttgttaaatgaaaaagtatgtataaagtatatgtgagagtgataaaggtttgaatttgttaattagtaataattgtatttaatagtaaggattttatgtttgggtaggttttttttagggatttttataaggaaaaagttagagttggttattgatttttaataaataatgtttataatttttaggaagttaaaagttgatataatttatttaagaaagaattatttttttaatttagaatagttttttttttttttttagatgtaggtttttttggttttagaaaaaatgtttgtttttttttaatggaaaataggtatatttgttttatgtttgtttatttgtagttagaaagataagtttggtatttttttttaggatttttttgagttattaaaaaaaatttttttatttatttatgtatttattatttatttagttttgattttttttttttttgtgttttattagttaattagtatttatttttgaagaagaaataatataagattatagaaaataattttttttattgtaagattgaatagaaaaaatttttttttattataagattgagtagaaaaaataatattttgttagtttttgtgtttttatgtgttatgaggaaatttgattattggttttgattgattgagttatttaattaagtaaaataattggtttagtattaattattgttttgtagtattagagaaagttgttttttttattggttgagtttagtagttttttatattttgagtaaaagggtagaggtaggatagtttttttgaggtagagataagaattttgggtagggaaggaagatttatgaaatatttaaaaaattatttttttttcgttttgtttttagatataatgttaaatttattttgaaatttaaagtaatataaaagaatatgtgatttttttatttattgaaagagagaaaggaaaaaaatatgaaatagggatggaaagaattttatgtttggtgaaggttaagggtttttataatttatagagaatttggggttagtttgttttattgtatattatggtaaagataattattattttatttgggtttatttttttttttatttttgtttaattgaagattttatgagatatatttatattgaatttaaatagtttattttagggtttgaattatatgtgggttatagtaggaatgggaatatggaatttttaagttttattttatttgttattgttgttatgttttttttttagtttgtatttgaggtaatattagtttttttagatagaatggttttggaatagtaaaaaagatatagaagttttaaaatatgtatgtatgtatatgtgtgtgtgtatgcgtgagtatttgtgtgtaaattttttattatttataggtaaaagtatatttggaattagtaatagatgtaatttgggatttaatttttttagtatgttttatttttaagtaaagtatttagtttggttagtaattattaaatattgagaattaaattgtaaatattaagaattaaaatgtttaagtgggaaattatagttaaatattatggtaatgaataaaaggtataaatcgtttaaatttttatgtaaaatttgataagatgttttatataattttaatatattgataaggttttgtggagaaaatagttttagatggtaaatatatataagggatttagttaaataattttttggtaagaatattatgaattttgtaatcggttggtagttaatgaaatataaagatgagtttagttaataatttataattattggttaaagaagtatattagtgttaattttttttcgtttgttttagttttttttttttgttaattttatacgtttttggtataatgaagtgggtaatttttattttttttttttttttttttagttcggtttattttaggggtgtgtttcgtcgagatgtacgtaagaaatttatttttttattgtttaatttttattttatttttttagtaaaataaagttttagtaaattttgtatttttaaagaattattttggtatttatttttaaaatggtatagtattttgtatttgtgaagttttataaggttattttattaataaaatttaaatattttaggtaaaaaaaaaaaaaggttagaattgtttagtgattgtaatttttttttgcgtattaaggaaagtgtaaagtaatttagagtgattgaaattttatagaatagggttgaagattgaatttataattattttaaagatttatttattgtattatgttttatttaaaaattataaaatttgtgttgttgattttataaatagaatttgtatttatatttatttttattttagtttgtttttttggttgttgttgatagatattaaaagagtattagatattatttaagtttgaatataaggttataaatatttaataatttttaaaatagtatttttggtaattgaattatttttttgtttaaaggtagaagaaataattgaatattattttgagtttttttgtaggaattagagtttaatattttgaaataaatgtataatttaagttaaatggaaagaaatataaaaagtaatattattattttttgttttttttagtatttaataatttttttttttttttttttgtttaga

SEQ ID NO: 74 - DNA, 5728 bp, Artificial Sequence
  chemically treated genomic DNA (Homo sapiens)
tttgggtaagggaagaaaaaaaaggattgttaaatattgaagaaaataagaagtaataatgttattttttatatttttttttatttgatttagattatgtatttgttttaaaatattgggttttgatttttatagaaaaatttaggatgatgtttaattattttttttgtttttaaatagaagaataatttaattattaagaatattattttaaaaattattaaatatttatagttttatatttaaatttagataatatttaatatttttttagtgtttattaatagtaattaagaagatagattaaaatgaaaataaatataaatataagttttatttatgagattaatagtataggttttgtggtttttaaataaagtatagtgtaatggataggtttttgggatagttatgaatttaatttttaattttattttgtgaagttttagttattttaagttattttgtattttttttagtgcgtaaaagaaaattatagttattaaataattttgatttttttttttttttatttaggatgtttgaattttattaataagataattttgtaagattttataaatataaaatattatgttattttagaaataaatgttaaaataattttttaaagatgtagagtttattaaaattttattttattgggaaaatagaataaaagttgaataatagaaaaatggattttttacgtgtatttcgacgaaatatatttttggaataagtcgagttaaagagaaaaagaagggaaataaaggttatttattttattgtgttaaaggcgtgtggggttgatagaagagaaaagttaggataaacggagggaaattagtattaatatatttttttaattaataattgtagattattaattagatttatttttgtattttattggttgttaatcgattataaaatttataatatttttgttaaaaaattgtttgattaaattttttgtgtatatttattatttggaattgttttttttataagattttgttaatgtattaaagttgtgtaaaatattttattaaattttatataagagtttaaacgatttgtattttttatttattattatggtatttaattgtaattttttatttgaatattttagtttttggtgtttgtaatttagtttttagtgtttagtaattattaattaaattaaatattttgtttagaaataagatatattgaaagagttaagttttaaattgtatttattgttaattttaagtgtgtttttatttatagataatgaaaaatttatatataagtatttacgtatgtatatatatatatatatatatatatattttagggtttttgtgttttttttattattttaaagttattttgtttgaaaaagttgatgttgttttagatgtaaattaagaaaaagatatagtaataataataagtaagataggatttagaaattttatgtttttatttttgttgtggtttatatgtgatttaagttttgagataggttatttagatttagtgtgagtatattttatgggatttttagttaagtagagatggagaggaaaatggatttaaatgagatgatgattatttttgttataatatataataggataggttgattttaaattttttgtaggttatgagaatttttgatttttattaggtataggattttttttatttttgttttatatttttttttttttttttttttaataagtagaaaaattatatgtttttttatgttgttttaaattttaaaataaatttaatattatgtttaaaaataaagcgaaggaagaataattttttaaatattttataaattttttttttttatttaaggtttttatttttattttagaaaagttattttatttttgtttttttgtttagaatatgaagaattattgagtttaattagtaggaagaataattttttttgatattatagaataataattagtattaagttagttattttatttaattaaataatttagttagttaaaattagtagttaaatttttttatggtatatagaggtatagagattaataaagtattattttttttatttagttttataatgaaagaaaattttttttatttagttttataatgaaagaaattattttttataattttatgttattttttttttagaaatgggtattaattaattaataaagtatagaagaggaaaaaattaaagttagatggatgatagatatatagatagataggaagattttttttaatgatttaagggagttttgaaaggaaatattagatttgtttttttgattatagatgaatagatataaaataagtgtgtttattttttattgaagaaaaataagtattttttttaaagttagaaaaatttatatttgaaaagaaaaaagaaattattttaagttaagaaaataatttttttttggataaattatgttaatttttaattttttagaaattgtaggtattatttattagaagttagtaattaattttagttttttttttgtagaagtttttgggaaaggtttatttaaatataaaatttttattgttgaatataattgttattaattgataaatttaggtttttgttatttttatatatattttgtgtatatttttttatttaataaatgaaaagaataatattagtttatttagtttttattataatattataatgtaatatattgttaaatataaagaaatttaaaaaaattttaaatttattatgattgaatagaaattttgaattgatttttttatatttaatgaagagttttagttttaaaataaaattgatgaaatttaaaagaattttttttttttttttttttttttttgagatggagtttcgttttttcgtttagattggagtgtagtggtattatttcggtttatttgtaagtttcgtttttcgagtttacgttatttttttgttttagtttttcgagtagttgggattataggcgttcgttattacgttcggttaattttttgtatttttagtagagacggggttttatcgtgtgttagggtggtttcgattttttgatttcgttattcgtttatttcggttttttaaagtgttgggattatagttatgagttatcgcgttcggttaagaatttttttttatagtattaatgaggtattttgtatatgtgtattttattaaaagattaatagtttagaaattaaaatatttaatttttaatgatatttgtatatttaaaattaatgttttttaagaaatatttgaataattgtattttttggatttgtaaagtaaaaatttttgtatttttttttgaaaatttttggtattaattttatatgaatattttatattgagagaaataaatttatataattgttagttatttttaaattttttgttttttaaattttgaaattttgtttagttagttattaacgggttttggtatgagggtaaatgtaaatatttagagtaagagttataaatatggtttagagattttttttattcggtaaatagaaaaatagttttaatgatttttaaatgtttttttatttttgtgggagaagtttaaaaatagagagtagttaagaaaagtattttttttagaaagaataagtgtattgattatttagaaaagaaaaaaaaaatattttaattgaaatgtatatatatttgggatttaaatttgagtttttaatttttttgttttttgttttgtatttattttgacgtgatataaaaggtatagtttttaagtagataaaatgtttttgaatcggttttttattttttagttattttaatagtaattttaaattcgtatttttttgttatttttaggattttcgaagttttttattgagttatttatattaggtttgttttttatttagtaatttatttagtttagtttttatgttattttttattttgataggttatatttttgatttttttttttttaaagataaagggaaatatatttatggaaatgtaataatatttaataatatttttaatattttataagagattttttataaataattattttatttagagttattttaaaatataagaaatttggatttgtttggagagaaaattggggataggaaaattttattatttttttattataaaataaatatatgtagattttttttattatgaagagtttgtattattttttataaaatatgtaagagtggaaaagtgaaagattgttaagtattaaattaattaattgaaatataattagtaatttaattttttatttatttatggagatatattttttttaaaaaaagttagaatgaaagtgtataaatttatataagtatttttaatgtaaataaaaatgtataaatatataggtattttaatgtaaataaaaaattggaatataatttaaataattgtttttttatttttttttataagttatttttttagatatttatttgaattagtgagaaatatggaattggttgaagattttatagggaatgaggagaaaaaaggttatattataaaaattattttaggttattatttttggtttgttttattttttaagtttttttgtttttagattttttatgatgaaagagtttttttttttgattttttttatgttatattgggtttttggaatatatatatattcgaattttttaattttttattttaaattttttagttttttttcgggtggtttaatttaatttagtgttagtttttagttgtagaattggatatgtagatttggatatattttttatgttatatggggttaagttggatttaaattattttttaacgattttttttatttttgaatatttttgtaaattttatgtttttaaatggggaatatttttaattaaatgaaaaaaaggatttttgggtggttgggaaaagaatattatttaaggttaggtaatttagggaattaaagttttgaaaagtttggtttatttttttaaattttttataaattggtttttttaaagtattttacgttttttaattttagtttaaatttttaatatttttttaaaaaaaaaaaaaaagagatttatttttaaaattttattttataaattttttttttaatgggggatattttttttaaaaatttttttttaattaaaagttttttttaaagggttacgaaaaaaatatttttgtttaaagtgttttggtaatttttatgggtttattttttttttttttaataaaattgaatatatttttttttgaaaattttttgtatttattttatatattggggaaaattaatgattttgaattttcgcgggtttaataagagagaaattttttacgattgtgtgaaaatttttattttgaaaggggaggcggttttttaggaaatttttatcgaaaaattttataatatttgaaaaatagagttgataatggaggaggttatgtatgtgtaggggttggggaatatgggaaatttttgtatcggttttttaatttggttgtaaatttaaaattgttttaaatattaaagtatatttttaaaattaaggaaagttagttaggtgtaatggtttacgtttgtaattttagtattttgggaggtataggtaggtagattatatgttattagaagtttaagattagtttggttaatatggtgaaatttattttaat

SEQ ID NO: 75 - DNA, 9352 bp, Artificial Sequence
  chemically treated genomic DNA (Homo sapiens)
ttttattttagagtttgtttgtttttggattagtttattttttaagtatttgttagtgtatattttaatgttagagtttatagaattatagagttggaacgatttgggaaaattttaagtttagtttagatgtagagaggtttaggatttttttttaagatatgttgttatatatttttgtgttttttttttattattatagggaatggtaggattttattgtgtgtttggttgtttagttttttattagaggttttgttttaggtaattttgttgtttaagtgattggtgagtagtattatttagattaaggttataggttagttagttttttttggttttagttttagagtgatttgaggagtagttttagaaattttaggcgtttttttttttaaggttttgaaaaaaagtaatgtaaggtggtcgttataagttgtatataaattgtttggtataagtttacgtttattgttagaggggttttttttttttttttttgagatggagttttttttttgttgtttaggttggagtgtaatggtgcgatttaggtttattgtaatttttgtttcgtgggtttaagtaatttttttgttttagttttttaagtagttgggattataggtgttcgttattacgtttagttaattttgtatttttcgtagagatggggttttattacgttggttaggttgatttcgaattttttattttaggtgatttatcgattttagttttttaaagtgttgggattataggtatgagttattatgtacggtttagaggggttttaaagtgaagaatcgattagcggttagtagtatgggtaaagggagtttttttttttttttaagagaaagatatagtattttattggtttgttttttagtagttaaaattggatgttatatattaaaagtggtaaagggttttgtagtagagattagggtttaggttaggtagttgtttttagttatagtttatttatcgatgattaatagtataaggatgataatgagaattataaagaaggtgttgttataggatattaataattttattagtcgggatttgaaaattttttgttatttgtgaagaagataaaaaggataggagttgaagagaaagtatatatacgagttttagggttttgagtaaaatggaaatttagttttgtatttttttttaatggtcgaatagtttatgtaaagttagttttagtggtttgtaattttttaatttgatatttatttaagattattggaaaaaaggttaggtgtaatggtttatatttgtaattttagtattttgggagattaaggtgggtggattatttgaggttaggagtgtaagattaaattggttaatatggcgaaattttgtttttattaaaagtacgaaaattagttaggcgtggtggtgggtatttgtaattttagttatttaggagggtgaggtaggagaattatttgaatttgggaggcggaagttgtagtgagtcgagatcgcgttattgtattttagtttgggtgatagagcgagattttgttttaaaaaaaaaaaaaaaaaaagatgttggtttacgtatagattaaaatgtttggaaaattaattttttttttttttttttgagatagagttttgttttgttgtttaggttggagtgtagaggtgtaagttatcgcgtttagtttggaaaattaattttaaacgtgggtagttggttgggcgtattggtttacgtttgtaaatttagtattttgggaggttgagatgggtagattatttgaggttagaagtttaagatcggtttggttaatatggtgaatttttatttttattaaaaatatatatataaaaaaaaattagttgggtatgttggtaggtatttgtagttttagttattcgtgaggttgaggtaggagaattgtttgaattcgggaggtggaggttgttgttagtcgagtattatattattgtattttagtttgggtgatagagtaagattttgttttaaaataaaaataaaaataaataaaaaaattataataataaaaagaaaatatattggtagtttttgaaaagggaaatttattttttattgtatttttttttgtaatatttaaatgtttgttttatatacgttatttttttaaattgtttttttatatgataaattttggtttgtttatatttttcgattttgttatgatgagatggattttagattttatattatttttatttataaatgttttgggatgtagttttaagaagagattttagaagtgtttatatattgtttaaattaataagaagtttttattattagggttagagttgaatatgttaattattgaaggtaatgatatttgtttgaattcggatttaataaggtatcgatttggtattcggtagataaacgttttaaatttagtttattttggaagttttttttttttttttttttttttatttgtttttttagttttttttgtgtagaaattagattgtttgttttttaaagttttttagattaaagtttttcggggttttttatttttgtacgttttgttaattgtacgaaggtgtggttttttataagaattttttttagatagtattgtatattttttatggtattatattaaagataattttttacgaaaaaacggtttttaaaaatatttgtggagatttggttttatttgtaatatcgtaatttaaatagggatgtgtttaggtattatatataattaaaattaatttttaatttatttttaataggttttttgtttattaaaagggaatatggttttattttttataggttgagtaatgtttatgtagttattgcgtaatattagtgagattagttaggaggataagagttattaaattagtaataacgtgatttagtggtgtaagtttttcgaattttacgttattattttagtatttcgtggattaagagtgggtgggagggtattatttttagaattgtaatatagatttttttgtttttcgggggtattttgaagattagaaggtaggggatataggaaaaggaattgagtaagttatgacgaagtagaattttgggaagggttggtaataataaatataatttttgttatttttattttagataggttttatttgttttatcgggttttaattttagggtttattagttgtatatattagttttagggttagggtataggtatttttttgtttaattcgtttgtttgttttataggttatattttttaggagaaatgaagggaatgtagagaagtaatataataaagattttcgtatagaggaaggtggtaattgtagtttattgtagatttattttgttgttagaaggttttttataggaagatgtgagtttgttttttggtagggtataaaaggtacgggatttgtaagcgttgggtagttaagaatatttagtttagttattttgcgaggttggggtcgttattttttattttgattttttgtattttgttttaaagtttttgatgcgttggcggaagtagggttttattcggtagggttttttggttagtagcgtttataggttttataaattttcgttcgttggttaattatttgttttttttagtacgtgtgttaatacgtttagagcggtttttttcgacgatttttgttttaggaagttcgagattttcgacgttcgtttaattgaaaggcgtttttcgggaagagtagtgttagggtattaagaggaggacgtttcggtatttatcgggcgttttttttttcgttaggtagaatttagtcgtagaggcgggcgttttgcgggtttaaattttcgttattaggtaggtttaaggtcgtatttagtttaagcgttgtcgacgttttcgttttttatcgtttttacggcgttcgcggagagaaatcggtatttttttcgaggatttagcggtttttcgttcggggtcgtttcgttttcggtgggttggaggttcgtaagagcgatttttagagggtaggattcgggattaagcgtaaaggtaggtttcgattaagtattttaaggttttatacggagaaagttttagacgtagtatttttagaagttaggggtttttatagtagttttcgcgggttttagcgtttatttagagcgaggggttttcgatttggtttcggtttggtatatcgtttcggaggtttatttcggtcgtttttttaggtggggttttatcgtttttcgtttcgttttcgagattagtttttagaggcgtcgttcggttttttttcgtttttgttttttatacgtaggtaggttgcgggtttcgagatttttcggttttcgggttttttcgcgtcgttcgtttttttttttcgtcgatgggtcggggagttttcgcggtttcggagtttagttcggcgcgcggagttcgtttatcgagttttttatagttaacgtgtaggtttcgtcgtagtaatagaatttttttatagtagtttcggtttcgttttttatatcgcggtcggaaatcggaagcgttcgtcgggtatcgtttattagttttcgcgaggtttcggaggtttcgtttattttcgttttttatttcgtttcggagcggagggtcggcgtttcgagcgggagaggaagaggcgtttcgggtttcgggcgagtagggcggggtggagcgagtacgcgggcggggcggggcggggttttgtcgggtcggcgagggtcgtttttttagttcgcgcggtcgttttacgtttttgtggtgcgggaggggtttcgtcgaggggcgagaacgggaggtgggggtgtgggcgggtttcgtcgaggggcgagaatagggtggggttttcgcgttcggatttcgtttttcgtttttttttcgttttttttttttttttcgattcgtttttggggaagagtgggtggggattttgggtcggtggaggagttattgtcgttttagttaggttgcggagcggacggacgcgtttggtgtttcggggaggggcgttatcgggggaggaggaggaggagaaggtggagaggaagagacgttttttttgttcgagattttttaaggttttgattttaggggttagggtattgataggataggagagttaagtttttttatttgggttgttcgaagaggtcgcgattttggagggttttgagtttatcgtattaggggttttagtattatttcgggggtttaaagcgatagttttaggggttatcgtaaggtttttagttgtttagataataggtttagggttagagtaataatttttttagttatttgttttaattgttgttttaggtattagttttagtttttacgcggtagttagtttaggtgatatgtcggtgttttttaggtttcggttttggcgggggaatacgttgaagcgtacggtcgtgtttttggttttcgcggtttatggagtttataaagtttattttttggtgcgttagtgtttggtttcggttaggggtttttaggcgttcgtcggggagtttacgtaggaggttttcggggtcgcggcggttaaagttggtatgaatcgggtatttttgtagcggtttttgtggtttttgcggttgttgttttttcgggttttgtgtcgggagacggggttgttggttttgtattcggtcgttttggtgagtcgtatttttttgtcggtgtatgtggttcgtttggacggaaggttggttcgttgtatcgttcgtaaggattcgcgggtttttggttggtagttgttgtagtggttttttatcgttttttttgttattttcgttaatagtgttattcgttatttggagggttaattggttttgtcgtttcgtagtcgtttggtggtttacgtttatcgtttttattttttttagtagatttattatcgggttagtaatatggacgggcggtttcgtaattttgattagtttttgacggaggacgtggtggtttttgcggtttttgtggtttatttttattttaatttgattaagttatttttggacgtggttgtgattttttatattttgtttcgggcggttcgttttcgtggagtcggtatagtttggttttcggttatcgtcggtttcgtggtgttttttacggttaacgtgttgcgggttttttcgtttaagttcggggagttggtggtagaggaggcgcggcggaagggggagttgcgttatatgtattcgcgtgtggtggttaattcggaggagatcgttttttatgggggttatgaggtggggtaggttggggtgtcgggtacggagggaagcgtgtggtagggaggttcgggggtaggtagtcgtgagcggtggggatagtttggggcgggtcggggttgatgttaaaggtgtgggtaggttatgggagagtcgggttggggtgggtagggtttttgggtagtcgtggatttaggcgcggtagtggagaggtaggaaggttgggtggggattgttttgtgttggttgtttgtacgttcgaggttatttttgtttttttttttttttaaggaggttgttttggttttagagttgcgattttagcggtttgagtttcgagagtttttgttcgttttatttttgtagttagttaggaggagacgtttgttatttatgagcggggatcgagggacgtagtttgttgtttagttttttttgggtttttgggttttttgaaggtcggcgtttagtagagttggttggttaggtaggtcggtattatgggtatgatttagtttaagcggaggttaatgagtagcgtttagtatagtagtgggatttggggttaaggttattttcgtttgagtttataggtttgtttggttattaattggtttagttgttttttcgggtttttagattagagatgtcgggtttaggtcgttattgcggcgggatatattttttgtttttggcgtggttgtttttttaattttgtttgttttttggttttttggtgggtcggggtcggcgggttagataggcgttgggaaaggttattttaggttaatgttttttttatttcgttttagttttttttttttttcgtgtttggggttgtagttgttttgggttttgttttttgcgatttagtttcggttttttagtgttttttgggaggaggggtataatggtatttatttttcgaaggtttgtgtgtgttttttgggttaggtggttttttgttttgggattttgttttattggttgtgtattagtagagaagtaggtttgttttcgaattttacggagaggggtatttcgggtgtgggttagattgtagatttagagaaaaggtttttggattttagttattattttggtttttttttttttttttttcgtatgttgggttgtagggttttggtaagtagttgtagttttgggcgaggcgtttggtatatttttcgtagttatattgttagttttggttggtatttttgttagtttttagtacgagtttggattgttagggtgtttgttttaggaatgggagatcgggtttgtagggagtttagttgtgtaggtcgatttgggtggcgggggtagaagagagattattggttttttgaaggttttcgttcgggttagttttaggaagtagagagattattggttttttgaagggttagttttaggaagtagtacgttggttaagagggtttgttggttagggtaggagggttcggtgtgtatttacggtttgtttgtataggtttcggttggaaagttgtgtggggtgagaggattttcgggtagtatgtggtttatggtagttttattggttgatgttttcgtggatattggtttaggtttagattagggtagaagtagttgattggttggagggtatatagtagagtattttgttttttttgggattgtcgcgaggaggtttattgaaacgtatatgtatacgattttttgtttgagaataaagtaaagtttttttgataagtttaagtattatttataagaatgtggtttttttggtagttttgttagtgtggtttaaatttttatattggttgttattattaggttgtatgggtttgggtaggttattttgtttttttgggttttagtgttttgtgtatagtgggtacgtgaatatatatgtagtgggatgtggggagaattaaatgtagagacgtgaaagtatttggtaaatagtggtaggttaggtagttgttattagacggttgtggggaggtaaggttggggtgcgtgtttttggattgagtttagaaatttataattttttggttattttgttgggagtattttttaatattttttatttttttcgtttgtttgattgttgttgttattttttttttgcggttgtttttttttttatttgttggtgttttgatatagtggtggttagtgtaggaagggggatagaaggataggggaggtttatttattgttgagggagtaaggtttaggtttagtagtggggatatttattggggcgagttttgtagggtttagtttaggagcgtatttttttggttttagtgggaaaatgttatgtaaattttttattaaaaggaagtgtgggaaagttgaggggaaagagggcgtaaataggtttagattgttgaatcgagttttttagaattaagagatagggttttattgtgttgtttaggttggggtgtagtggcgttattattgtagttttaaattttagggttttcgcgatttttttattttagtttttcgagtagttgggattataggtgtgtgttattatatttggttaatttttttttttaattatttttggtagagatagtatttcgtcgtgttggttaggttggtttttaatttttgggtttaggtaatttttttattttagttttttaaagtgttgggattgtaggtgtgagttattgtatttagtttaagagtattgttttttgttgttttgcgttgttttttgtttagtttagggggggaaattagagttgatggatgattttttcgagttaggaggagggggttggtagggagtttaaagaaatgggtttagtagaggatagaaataaggtgattagagagggagtggagaggggacgggagtcgtattgtgatattagttagttttttatatttttttatattttgagtttgagatttggttttatttaatcgtaatttttggttttcggttttttgatggttattatggtatagcgtgtgtgagtggtattgggagattttgattatcgtttttacgggagttgtttttgtgtatggttaggaagtttttttgtgtttgttatttttcgtagg

SEQ ID NO: 76 - DNA, 9352 bp, Artificial Sequence
  chemically treated genomic DNA (Homo sapiens)
tttgcggggggtgatagatatagagaggttttttggttatgtataggggtagttttcgtgggggcgatggttagggttttttagtgttatttatatacgttgtgttatggtggttattagaaggtcgagagttagaggttacgattgggtggggttaggttttaaatttaaggtgtaagggggtataagggattggttgatgttatagtgcggttttcgttttttttttattttttttttagttattttgtttttgttttttgttgagtttatttttttgggttttttgttagttttttttttttggttcggagagattatttattagttttaatttttttttttaaattaagtaaagagtagcgtaggatagtaaaaggtagtgtttttgggttgagtgtagtagtttatatttgtaattttagtattttgagaggttgaggtgggaggattgtttgagtttaggagttggagattagtttggttaatacggcgagatgttgtttttattaaaaataattaaaaaaaaaaattagttaggtgtggtggtatatatttgtagttttagttattcgggaggttgaggtgggaggatcgcgggagttttggagtttgaagttgtagtgatggcgttattgtattttagtttgggtagtatagtgaaattttgttttttggttttgaaaaattcggtttaatagtttgggtttatttacgttttttttttttttaatttttttatatttttttttggtgagaaatttgtatggtatttttttattgaaattaggaggatgcgtttttgagttgggttttataggattcgttttagtggatgtttttattgttgagtttggattttgtttttttagtagtgggtaggttttttttgtttttttgtttttttttttgtattggttattattatgttaggatattagtaggtggggaaagggatagtcgtagggaagaggtggtagtagtagttagataggcgggggagatgggaggtgttgggaagtgtttttagtaaggtagttaaggggttgtgaatttttgggtttagtttaggggtacgtattttagttttgtttttttatagtcgtttgatgatagttgtttagtttgttattgtttgttaagtgtttttacgtttttgtatttgattttttttatattttattgtatgtgtatttacgtgtttattgtatatagaatattgaagtttagggaggtaaagtgatttgtttaagtttatatagtttgatggtggtaattagtgtgggaatttggattatattggtagagttgttagaagaattatatttttgtaaatgatgtttagatttattaagagagttttattttgtttttaaataagagatcgtgtgtatgtgcgttttaataagttttttcgcggtaattttagaaaggatagaatattttgttatgtgttttttagttagttagttgtttttgttttgatttgagtttaggttagtgtttacggggatattagttagtgggattgttatgggttatatgttattcgagggtttttttattttatatagttttttagtcgaggtttatgtagataggtcgtgaatgtatatcgggtttttttgttttggttaataaatttttttggttaacgtgttattttttgaagttagttttttaaagaattagtaatttttttattttttgaagttagttcggacgaaggtttttaaagaattagtgattttttttttgttttcgttatttaggtcggtttgtatagttgagttttttgtaagttcgattttttatttttgaagtaagtattttggtaatttagattcgtgttgggagttggtaggggtgttagttaaggttgataatgtagttgcggggaatgtgttaagcgtttcgtttaaggttgtagttgtttgttaaggttttgtagtttagtatgcgggagaagaggagagggaagttagggtggtggttgaagtttaggggttttttttttgaatttgtagtttggtttatattcgggatgttttttttcgtggaattcggggataagtttgtttttttgttggtgtatagttagtgagataaggttttagggtaagaggttatttgatttagggagtatatataggttttcgggggatggatgttattgtgtttttttttttaagaagtattggggaatcgaaattgagtcgtagagagtagggtttaaggtagttgtaattttaggtacgaggaaggggaggggttgaggcgagataaagggagtattgatttggagtaattttttttagcgtttgtttggttcgtcggtttcggtttattagggagttaggagatagatagggttggaaggatagttacgttaggagtaggaagtgtgtttcgtcgtagtggcggtttgggttcggtatttttggtttgggggttcgggaaggtagttgagttagttggtagttaggtaggtttgtgggtttaggcgggggtggttttgattttaagttttattgttgtgttgggcgttgtttattaattttcgtttgggttgagttatgtttataatgtcggtttgtttggttagttagttttgttggacgtcggtttttaaagggtttaagggtttaggaggggttaggtagtaggttgcgtttttcggttttcgtttatgaatggtaggcgtttttttttggttggttgtaggagtggggcgggtaggagttttcgaggtttaaatcgttaggatcgtagttttaaggttaggataatttttttgaggaggagaggaagtagaagtggtttcgagcgtgtaggtaattagtataggatagtttttatttagtttttttgtttttttattgtcgcgtttgagtttacggttgtttaaaggttttgtttattttagttcggtttttttatggtttgtttatatttttggtattagtttcggttcgttttagattgtttttatcgtttacggttgtttgttttcgggtttttttgttatacgttttttttcgtgttcggtattttaatttgttttattttatggtttttatagaaggcgatttttttcgagttggttattatacgcgagtgtatgtagcgtagttttttttttcgtcgcgttttttttgttattagtttttcgaatttgggcgagaaggttcgtagtacgttggtcgtgaggaatattacgaggtcggcgatggtcgagggttaggttgtgtcggttttacgggagcgggtcgttcgaagtagggtgtaggaagttatagttacgtttaggagtggtttggttaggttggagtagaggtgggttatagaggtcgtaaaggttattacgtttttcgttagagattggttagggttgcgaagtcgttcgtttatgttgttgattcggtagtaggtttgttgggagaagtagaggcggtaggcgtgggttattagacggttgcggaacgatagggttagttggttttttaggtaacggatggtattgttgacgaaggtagtagggagggcgatgaggagttattgtagtagttgttagttaaaagttcgcgggtttttgcggacgatgtagcgggttagtttttcgtttaggcgggttatatatatcgataggaaggtgcggtttattaaggcggtcgagtgtagggttagtagtttcgtttttcggtataggattcgggggaatagtagtcgtaggagttataggagtcgttgtaggaatattcggtttatgttagttttggtcgtcgcgatttcggaggttttttgcgtgggtttttcggcgggcgtttgaagatttttggtcggggttaggtattggcgtattaaggggtagattttgtgggttttataggtcgcgagggttaggagtacggtcgtgcgttttagcgtgttttttcgttagggtcggggtttggagagtatcggtatgttatttgggttggttgtcgcgtagggattggggttggtgtttggggtagtagttgaggtaggtggttggaaggattgttgttttgattttgggtttgttgtttaggtaattggaaattttgcgatggtttttgagattgtcgttttaggttttcggggtggtgttggggtttttggtgcggtgggtttagggttttttagggtcgcggttttttcgggtagtttaagtggaggaatttggtttttttgttttgttagtgttttggtttttgaggttagggttttgagaggtttcgggtagagggggcgtttttttttttttattttttttttttttttttttttcggtggcgttttttttcggggtattaggcgcgttcgttcgtttcgtagtttggttgaagcgatagtgatttttttatcggtttagaatttttatttatttttttttaggggcgagtcgggggaaggggaggaggcggaggaggggcgaggggcggagttcgggcgcgggagttttattttgttttcgtttttcggcggggttcgtttatatttttatttttcgttttcgtttttcggcggggtttttttcgtattatagagacgtgggacggtcgcgcggattagagaagcggttttcgtcggttcgataaagtttcgtttcgtttcgttcgcgtgttcgttttatttcgttttgttcgttcggagttcgaggcgtttttttttttttcgttcggagcgtcggtttttcgtttcggggcggggtgggaagcggaggtgggcggagttttcggggtttcgcgagggttggtgggcggtgttcggcgggcgttttcggttttcggtcgcggtatgaggggcggggtcggggttgttgtgggagagttttgttgttgcggcggggtttgtacgttgattgtgggaaattcggtgagcgggtttcgcgcgtcgggttgggtttcgggatcgcggaggtttttcggtttatcgacgagggagagaggcgagcggcgcggggaggttcgggggtcggggaatttcggggttcgtagtttatttgcgtgtgagaggtaggggcgaggggaaatcgggcggcgtttttagaagttggtttcgggggcggggcggggggcggtgaagttttatttggaggagcggtcgggatgggttttcgggacggtgtgttaggtcggggttaagtcggaggtttttcgttttgggtgggcgttggggttcgcgagggttattgtaaggatttttggtttttgaggatattgcgtttagaatttttttcgtatggggttttgaggtgtttggtcgagatttgtttttgcgtttggtttcgaattttgttttttaggagtcgtttttgcgggtttttagtttatcggaggcgaagcggtttcgggcggaaggtcgttggattttcgagggaggtgtcggttttttttcgcgggcgtcgtggggacggtgggaggcgggggcgtcggtagcgtttggattaggtgcggttttgggtttgtttggtagcggggatttgggttcgtagagcgttcgtttttgcggttgagttttgtttggcggggaagggagcgttcgatgggtgtcgaggcgttttttttttggtgttttggtattgtttttttcgaagaacgttttttagttaaacgggcgtcggaaatttcgggttttttggggtagggatcgtcgggagaggtcgttttggacgtgttgatatacgtgttggagggggtaggtaattgattagcgaacggaagtttgtggggtttgtgaacgttgttggttaagaggttttgtcgagtggagttttgttttcgttagcgtattagagattttgaagtaaagtgtagggggttagggtggagagtggcggttttagtttcgtagggtaattgaattggatgtttttggttgtttagcgtttataagtttcgtattttttgtgttttgttaggaaataagtttatatttttttgtgggaaattttttagtaataggatgagtttgtagtggattgtagttgttatttttttttatgcggaggtttttgttgtgttgtttttttgtattttttttattttttttaaaaggtatggtttatggagtaagtaggcgagttaggtaggagggtgtttgtgttttagttttgggattggtgtgtgtagttggtggattttggaattgggattcgatggaataggtagaatttgtttggggtgggggtggtaggggttgtgtttgttattgttaattttttttagggttttgtttcgttatgatttgtttagtttttttttttgtgttttttgttttttggtttttagaatgttttcgagaggtaggaagatttatgttatagttttggaaatgatgtttttttatttatttttggtttacggggtgttgggatggtagcgtgggattcggaagatttgtattattgggttacgttgttgttgatttggtgatttttgtttttttaattagttttattggtattgcgtagtggttgtatgaatattatttagtttgtggaggatgaagttatatttttttttaatgaatagaggatttgttaaaagtgaattggagattaattttaattatgtataatatttgaatatatttttatttaaattacgatattataaataaggttaaatttttataggtatttttaaaagtcgttttttcgtgaaaaattatttttgatgtgatattatagaaagtatgtagtgttgtttgaggaggatttttgtagaaaattatattttcgtatagttgataagacgtgtagagatagagggtttcggggagttttaatttgggaagttttagaggatagataatttgatttttatataaaggaaattggaaaagtaaatgaaagagggagagggaagggggagtttttagaataagttggatttaagacgtttatttatcgaatgttaaatcggtattttgttgggttcggatttaaataaatattattgtttttagtgattggtatatttaattttagttttgatgatgagggttttttgttgatttgaataatatgtaaatatttttgaagtttttttttagagttgtattttaaagtatttgtggatggaaatgatgtgaggtttggggtttattttattataatagggtcgggggatatagataaattaaggtttattatgtggaaagatagtttaaagaaataacgtgtatggggtaaatatttgaatattataaaggggagtataatgaaaagtaagtttttttttttagagattattagtatgttttttttttgttgttgtggtttttttgtttgtttttgtttttattttgagatagagttttgttttgttatttaggttggagtgtagtggtgtggtgttcggttgatagtagtttttatttttcgggtttaagtaatttttttgttttagttttacgagtagttgggattataggtgtttgttaatatgtttagttaatttttttttatatatatatttttagtagagatgggagtttattatgttggttaggtcggttttgaatttttgattttaggtgatttgtttattttagttttttaaagtgttgggtttatagacgtgagttagtgcgtttagttaattgtttacgtttaagattagttttttaggttgggcgcggtggtttatatttttgtattttagtttgggtaatagagtaagattttgttttaaaaaaaaaaaaaaaagattagttttttagatattttgatttatacgtggattagtatttttttttttttttttttttgagataaggtttcgttttgttatttaggttggagtgtagtggcgcgatttcggtttattgtaattttcgttttttaggtttaagtgatttttttgttttatttttttgagtagttgggattataggtgtttattattacgtttggttaattttcgtatttttagtagagatagggtttcgttatgttggttagtttggttttgtatttttgattttaagtgatttatttattttggttttttaaagtgttgagattataggtgtgagttattgtatttggttttttttttaatagttttgaatggatgttaaattagagaattgtaagttattgaggttgattttgtatgggttattcggttattggagaagagtataaagttggatttttattttgtttagggttttagagttcgtgtgtgtgttttttttttaatttttgttttttttgttttttttatagatggtagaagatttttaagtttcggttggtggagttgttagtgttttatggtaatattttttttgtggtttttattgttatttttgtgttgttggttatcggtgagtgagttatggttgagggtagttatttgatttagattttggtttttgttgtaaaattttttgttatttttgatgtgtagtatttagttttggttgttaggagatagattaatgaaatgttgtgttttttttttgagggagggaagaggttttttttgtttatgttgttgatcgttagtcggttttttattttgaggtttttttaggtcgtatatggtggtttatgtttgtaattttagtattttgggaggttgaggtcggtggattatttgagatgaggagttcgagattagtttggttaacgtggtgaaattttatttttacgaaaaatataaaattagttgggcgtggtggcgggtatttgtaattttagttatttgggagattgaggtaggagaattgtttgaatttacgaggtagaggttgtagtgagtttaaatcgtattattgtattttagtttgggtaataagagggagattttattttaaaaaaaaaaaaaagaggtttttttagtagtgggcgtgggtttatattaagtagtttgtatgtagtttatgacggttattttatattgtttttttttaagattttggaaggagggacgtttaaggtttttgaggttgttttttaggttattttagaattgaagttaagagaagttaattggtttgtgattttggtttgagtagtgttgtttattagttatttaaatagtagaattgtttggagtagggtttttaatgggggattgagtaattaagtatatagtgaagttttgttattttttgtagtagtaggaggagaatatagagatgtgtggtagtatattttggggagagattttagatttttttgtatttgggttagatttgaggtttttttaggtcgttttagttttgtagttttgtaaattttgatattgaggtgtatattagtaggtgtttgaaagataaattggtttaagggtaagtaggttttgggataagg

SEQ ID NO: 77 - DNA, 17869 bp, Artificial Sequence
  chemically treated genomic DNA (Homo sapiens)
  unsure 14284, 14405: n is a or g or c or t
tttataattttaatattttgggaggtcgaggcgggtggattatttgaggttaggagttttagattagtttggttaatatagtaagattttgttattatttaaaaaaaaaaaaaagaattgtaggcgcgtggtggtggtgaagagtttcgtgtgtaggttgtgtaggtggggtacgagttttagttagaaggttattttgttggcgcggtagttgttacgtacgcgtggttttaggtttatgtgtagatattgtttttttttgttgttgaatttgttttatattattttttcgaagcgattgggtttggtgtggatgaatttggtattttgcggtatcggttggttggggtttttgtgggtataggagggtagggaaaggaggagtgagggtaaggttttgaaggagggtggatggtagtgggtagggagatagatagagatgtagagagataggaggatagtaagaaagttagagaaaaagttatagaggtagagagatatagatggatatgaagagatagagaaattgtttgtttttttaggtaaataggtaaatagggatggagatagattggtagagatagttagaaatgcgggtagaggggtagggatatatatagagatagttagggagaagtagaagttgagtttgaatgaaatatagatagggttaaagatacgggagggatagttagagatagatatatagttaggttgaaattagtcggtagttagagaaagcgaaaagtaagtagataaaagagagtagtagagggaggtggagagttgttagtggatttttagagagatagagatagaagtagagatatataaatttttatatatatttagatatatatatttgagtagttagttagagatgtagagttttaggggggtcgggtaggggggattaggtaaggaggagggagagatagacgttaagttaaagttattgagtgggtttttaattttttagaaaggatagcggtttttttgtttgatattgttgagtttttaacgtttaatttcgtgtttggtatagaggtgtttgggttggttttattcgagtaagagggtaggttagagtgagtgttttaatagaggaacggcggttatgtgaaggagggagggtttcgtttagtttcgtttagtttttttggtttttatttagttttggcgaagttggtttagtaggttatgattacggtattgagtatgacgttatttttggagaagttataggggaagaggtcggtggtatttattatgggtacgttaaagatatagggtagtttattttcgtgcgtcgtatttgtttatttaggtcggtttttcgtttggtagtggtggtagaaggtgtaaaagtagacgggagattggtagtcggcgtgtagtttggtagtggttatagttggtgttatttattggtggttagtaaagagcgttagtagggttttgcggcgtatttcgttattgtttcggtcggtttagtttgtgtatataaatttgatggtttttcgaagtatatttttgtttttcgggtagttatataggttgtttataaagttggagatagtgaagttaaaggcgttggtagatatatcgttttcgttttttgtagagttttttacgaatttgaggttttttttttggttgacgtcgatgagtatgtcgtagttgaggaattttttttgttgtatgaggattttagggttatcggggattacgtcgttatttattacgggtttaaaggcgatgtggtagtggggagaaggggttagggttttattatttgtttattggtttttttttggtttgtggtttgttaagtttatacgtagatgtttttattttttataaattatttagttttaagtatgtttttattagtagtatgggaatggattaatatattttttaaaggttttattttttaatattattatatggggggttaggattttaatatatttattgtgattggataaaaaaaatttagtttattgtagaagttatttttaatttattatatgattttttttaatatttttttaaaaattttaagttttgggtggtagattaggttttttttatttttttaggaattgaggattggacggagttttggagatgtttgttgtaaaatgaaagagtagttttaagaatggttgaagttataatttatatgttttttggtataatgaaagtttttataaatggttggagaagttaaatttaagagatgaataaattatttttttatgttttttgtttttttttttatatgtgtgtgtgtttgtgtgtgtgtgtgtgtgtgatttagtttgtttataaggaggaaaaagaagatgaaatattatttgtcgattatttttaagttaaagggatagttttttttttgttgtatagttttggtatattataaaaacgtataattttgggtttagttttaaaatgtgtaattttggtttttaggtttttataaaagttattattttttttgtaaggaatagaagtagtttgatgaaattttttttttatatgtagtaatttttagaaatatgttattttataaaataagtttttagggtaggatgatgtttattttaaaaatataggttttaggttttgtggtttttaggtagaaaagatttgtttaagtgaggttagggttaaagaattatggatgtataaatgatatttagtaaatatttgttgaaattaaatgggtaggtgtggtaatttgtttttaaagtaattttttttgtttatatttaggaatgtttggtataaagggattgtttttatataattatttaataaaatataattgagaatgattatataagaagtgagatgataagttaagtatgttatgaagttttgagtttttatcgtttggatattaaataaattagtatttgaatttataaataattgtgattttgggagaagaaagtagtaaaatatagttgtttgggtatggggggagcgttatttttaagttatgtaatagttgttgtgtaattgtgtatttaatttaaaatatatttttgagagagaaaataattagattttttaaaaagaaagaaatagagaaatgttgaaagaatatagaagtttttatttggttattaaatataagatacgggggagttaaaggtattgggaatgatattgttttagaatttagggagttggttcgtgtattaaatttggtttgttttttgtttttttaaataaagttttataggaaaataattatatttattaatttatttattatttatagttttttttaaatagagttaagtaaattatattagaaattatttagtttagaggttgaaaatatttatagaaaaagttttgtaaatttttgttttagatgaataaaaagttatgtttaaatgtttgtaagggtgattatttattgagaaaattaaagtagttgatgtttgaatttatgtaggagtttttttgtggagaatagggtagaaatagtaaatagaaataagagtttaggtttgggagttagattggtttgaaatgaaattttggttttgtattaatagatttgtgattataagtaagttatttattttttgtatgtttttaaaatggggatatgaaatgagggtagaaagggaaataagtgttgtatttgatttgggtaaataatttagaaatttttagtttttttatgtaagttttatatttaggggaattggtaagttttattagaaaaaaaaaaattggttgattttttataattagagtatttagagtattttattttgtttttattgtaacgtttgttagagttataatataataaagtattgtatttaaaatgggagtaatattgtttaaaaaattgttttttagttaaatattaatttaagaatttgaattgtttggaagttttgtttaaatttagtttttgtatattgtttatgttgataaatatagataatttttaaaattaggattatttttattttaaatgagtattaatagatgatattgttatatttttaattgtggtgattgtgtgtgatagtgtgtttcgaattttttaaaagttttgttggtttttttgtttatatatagaaaataaagataatttagggtttttgagattatagtaggtttatttatttagtattgaaaatatataagattgatacgatattttaaaattaatttagggtagggtgtagataaagggttttttttttttaaatagtattttgattttttgggagatggattgattttttgaaagttttgttttgaagatatttggttagggttttttttttattagtttttattgagaataagtgtttttttagattttttttaatttttaaattttttgattttaagtttgttagagaatagaaagttatatagtagtattaaaaagtatgagaagttaaaaaaataataattggttttagtggttagagtagttgttgtatatatttattataggtttcggttttgtaaattaatttatttgtaaatagtgtattgtttttaggtataaattcgatgttggagtattggttttttaaggatttaagtttaaagttaaaggttttttgttttaggtgttataaataagtagtgtcgttttttttttttgttttgagtttgtttatttaatcgtattcgagtatgtaaataaattttagttcgtgtagataaaaaaggaataaataaagttaagtgttttattagaattaaattgttgagttagttatttgtgttttaggagtcgaattagaaatgttatttttaggtacgttagatttatttgttttatttatcgatttgaagatttaatatattaaggtgagtaaaatttttattttttgttttgattcgggtttgtaaaaattgtatttatgtaaagtattaaaggttaatttaagtaaatttgtgtaaagagttttttgtaaatataaaaataaaaggtatgtaaaatgtaggttttagtttagtgttttgattaaatatgatttaaattatattagataattttttataaatttattttttaaaatatttttaagcgaaaggaatttttttttgtgtgaaaggatttttatattaggatttagaggattttattaagtatttttattaattttattatagtcggtatgtatgataagagagtaaaatatttattagagaagtttattggaaagaattaaacgagtaggaataatagaaagtaaataaggagaaagagagtatattgaaataatataattttttaatatgtttaataaaatgagtgttaaaatagggggatttaagtttgataattggattcgaaaatttttagatggatttgtattattttgtatattttggtgggaggaagaaaagtattatttttttagttaagtttgttgttattggagtagatgtgtaattgttaattgataaatatttagagaaataagagtaggagttagatttagattttaaaattcgtagttggggggaattaggaaatggattttgtttgagtcgttttgagagtaattttgaattttgtttgttttatattgtttttttgttagattttagaattttaaaataaataaatgaataaaatataatttaattaaaattatttgaagttatttttatggtgtgatgtagaaagtatggtaagaaattaatttttgtaaattaagagagagttattttgttgtttgaattagttaatagaaaaataaagggtattataatttaatgataaagtaaaagtttttattgttatatatttatttttttatttgtaattatggatggttttgaaattttaaggtttgttgtatttttatttttataaagtataataaatgaggaagttgtttagttgattggtttttttttttaggaaagtagtagtagagattagattgtgtttttaatatggttgattagtagttatgaagtgtattttaaggtattgttattacgaggttttgttaaagaggaaagattttttttatttagttttattataaatggtagtatgaaaaatgtagtaaatttatatcgttaaataatttatatttggtaaaggtatgtttaaaaggttgtaagagtttagttttttttatttttttattttaagtttgttatttataagaaattttaattgaaagtgggtatatttaaaaatatattttatgaagtttaaaattgtcgataatgtttagattattgtattattattattaatgggattttttttttaataatattatttaggaagatattttggtagtttggatgtttttgtttttttatttttttggttttgtagaagtttgtaaagttttttttgtgtgtgtattttaaggaagttttaatgtaaataatttttttgttaaattaagttttatttagtagttattaattaagtatgtaagaagcggtattagataaatgagatggttttaaaaatttaatatataagtatagatttaatgaatttttaatatagagagatgattttgagattgaaatttatttatttcgaagttattgtgtaataatttttttttagggaaagtgattgatttaagtgtttaaaagaagggtagatttaagagtaggcgttttgttttgtgtttaagaatttttttggtaaaaatattttaaataagttagtgaattttgatttttcgtgtattttttatataaaatttgtttgtttaatagtattgttaaattaagttttatttagtagttattaattaagtatgtaagaagcggtattagataaatgagatggttttaaaaatttaatatataagtatagatttaatgaatttttaatatagagagatgattttgagattgaaatttatttatttcgaagttattgtgtaataatttttttttagggaaagtgattgatttaagtgtttaaaagaaggtaagatttaaagagtaggcgttttgttttgtgtttaagaatttttttgggtaaaaatattttaaataagttagtgaattttgatttttcgtgtattttttatataaatttgttttgtttagatagtattttattgtttaatttattggttatagcgtttttatatttgggaggacgttagttatgtatgtaattaaatttaaatgggtgaatttttttaaatgttttcgtattttttgtttattatgttttagtgaagaattggattgaatttgtttttgtaagaggagttaaaaaaaaaaatgatggttattaattataaaaagttttttggttataaattaagtaagtaaggagtttatagtgtttgaggaattattttttattattagttttaaagttttgtgttatttttttgttattattttaatgtttttttttattattattatagttagaagtatattggttgttaggataagttggagagaatagatagggttgagtaaaaaaaaaaatattataattacgatagaaaagttatatatttttaagtttgggattgttttttatttaaataaaagaatttattgatgtatatgtttttatgatttattttttagtatagtttgattatttttttgttggggtagattaaagagagattagagtttaagaaatgttttttaaaattatataaaagtttttggaatttaaaattttaaaaatatcgttataaatttattaatatgaatttatattttatttttatttttattatttttttttttaattttaaatgaattttatattttttattttattgagtttttaaatgaagagattttttgaaagttatgtgattattgggtaagttatattatttttttttgtttcggtttttttatgtttaaaatggggatgataaaggtacgtattttttaaggtcgatgaaagtattaaacgaatttaatgcgtataaagtttttgaaataatgtttggatatgggaaatgatttaacgttagtgattttagttttatttttttgaattttttttagtttttttagaatttttttttttatttaattttttttagatttgttttttataagtatgttttacgtttttttttagtttttttgttatttttttttgtatagttatgttttatttgataaagattgtattagagtgaagttttaagggttttttaagattttagggattaaaaatttttttttataggattcggtaattttgtttgttattttttttttataatattgttgttttattttttttttttttttttttttttttataaaaggaaataggaaatttaagaagataagtatttttagatagaatttaaacgttaaaatgtttaatttaattagtaagttttatttattaaattatggtttgtttatgttataaaagatttttattagttaatgatattttatttatatatatatatatatatatatatacgtatatatatatataataaataattataggtaaaatttattgtgtttattttgttatgattgtttaagtttttgataatgattttatttattttttataataattttatgaggaggttattatttttgttttatagtttagggaattgaggaatagagcggttatgtaatttattaaagttatatagtaagtaagtgataaagttatattgttaatgttggtagtttgagttaatatattagtaagagatttgtttaaggttaattttattattttgggatattgatttgttagaatttttttgtatttttttttattttgatttttatttgtttattgttgattattatggtttttttagttgttgtttagttgtttttaggttaataagagaaagtttgtagttaatttagaaaaagagaataatagggaaattgaaaggaaataggttttttgttttgattgaaaatgtgacgtttgggttaggagaggttatgaggtagaggattttgatatggatgtgaaatgtttgtgtgaattatatttttttaatttttatggaatcgattttggttagagtaggagattgtttttttagatttttggttttgtttaatttttttgggttaaagagatatttttaatggagaagagttatgaattattgaataatacgttttaggtacgatttgaagtgtttttttttttttatgattatttttttaaatttttataataaataaatttagttatatgaatttttaaatattttttttgttttttttgtttgttttttttttttgtttttcgttttttttatattttttttttttttatttaataaggttttgaatgagtgttttatgttagtttttatgatataagagggttaatatgatttacgttttatgtagtttttgtttttggaaggtgtgtggaatagtgtggggtagaaaataagagaatgttttaattagaaattaggataaatgtttaaagtaaaataattgaaagttgagaggatatgagtagaagagtttttgatgaggatttttgggaaggtgttttaaaggtaagtttgagggatgtagagaataaggtggttaagagtagggaagaataaagatttagaggttttattatatgtaaagatttcgaggataagagtatgttatgtttaaagaattatttaaaggttaatttggttggagtaaagtgaataagggagagaatggatgagatgaaattgaagtataggttggggttagatcggttggcggattttgaggaagattattgagaggtgtttaaaataggaaaggatttatgtttaacgtaaagttgattgtgttgtgatgttgtttttatttgggaaatgtttttaatttttttttaattgaagtaatattttgtttgttttgggtttggaagtaggtgaaaaaaatagttgattggttgtaaggtgtagtgattgaataagttaaatttggttttaatttttagttattttatgtatttaattatatgattttggttaagttttttattttttggagttttagtttttttgtttgtgaattgggaatgagaatgattattttggaaagtggttgtgagaattaagtgaggtaatttgtggaatgtggttggtatttattaattatttagttttttttttttttgatttttttttttaagatgatttttagaattatatgattattttgtttttaatgtaagttatatttatattgtttattatagtttaaaattgattttatatattttttttatttgaggtgtattattaattattgagaggagttagaaaagatgttagtagagttttattttaaagttgaggagttcgagtttagagattatgattgatttaaggttatatagtttttaaaatgtaaaagtagaataaattggattttaaatttttttattttggatttgatgtttttttatatgatatttttttttttttaaatattaaaattagtagtattagaattttatttaagaaaatttaattaagaaaaaaatttgaagtaaataatatatattttaagagaagagggtattattttttttttttaattagttttaataattgtttttatatttattattgtatttttattatttattttttattgtggttgaaagaatagatttaggttgaagtttgagattttgtgtttttaatagttttttagtttttgttgatgttattaaaatgtttgttgattagtagtaagggtttaaaagttttaggtgagtgagttttataattttaatgtagtaattattttttagttattttataatagagtttttagttttttttagaaattagtatttagttatattagaaattttttttttagaaagtgttagagttaagtagaaatatgatgatggttataaattagtgatagaattaattattgattttaatagtgggagataattatttattaatatttagaatgtttatttttgaggattgttgttttggtaagttgttttgttttttggtatttgtttgattgtaagaaaatggaattaataattttaaagtaaagaatatatgttttaagagagggtattgtttttattttataagggtttttagtataattttttatataattttgtaatagggattttaatttattgaatttgttattatatatttgttagaatgagggaaatatttttagagaatatgaaaaataatttatttgaagattaatttaaagtaaaggtaatgattttgaaatggtatggataatttataggatgatatgttgtaaattagtataaaataaattttatagaaatatagatattaaatagagatatttgaaaatagtaattatttggtttgggatggtggtgtgggggggtgtattttggtttgatttattatgatgttattataattatagttaggggatatattatatgtttataaagtgtaagtgataatatagaattatgtttaaaagaatttgagtaaggattgttttataaatttttatttagaatttaataaattagaaaagtaaatttgtgtaatattggtttttttgacgttgatatgttttgggtgtatagatgtatatagtaaaagtatttataaatttagaagtattgtttgagaaggatgtgaagtgttgttaatattgggttttttgatattatttttatttgatttattgtaacgtttgatttattaatggaaatttgtttattggggaatttgtataaattttatatttttaaaaattttgtttgaatcgtttttttttttaattttggttttatttttattgattatttttattgttttatcgatatttttttagatgttaaaggaatataaataattattgaattatgttttatatttggtatttttttagaaggaagagggtttatatgcgagtaattttattattaggttttgatattgttaaaaatgggtagaattttttatcgtttttatattttaattttgatatagaaaatatatgatgtatagaagttgttgataagttttgttattatttttaggatatagtgatggagtggtttaaaataaatgttgtggtattttttttttttttttgatataattgaaaaggttgatggggttttgtaaataataagaaaaaagagtatatatttatattattaaagttagattattatttaaagtaaatgaaaggaaaattttattttttttattttttgttttcgttattttgttattttgtttttatttatttgatgatagttaaaaattttttttttttttgttattttttttttaatttttttttatattttttaattttgagttttaatattttgtttttttgttttagggttagggtgtaaagtagttgttagagatttagttttgatttttttaaatgtttaatattttatttgatttttgtttagttttttttttttattatttattttcgattttatattttttgatttttagcggtttttagtattttggtaggtttttaagttgagaaaaggttgatatatttatagtatatattagtttttataggtttatattattatttatgtagtttatgttgtgatttagtttttaagtttgaaaatttatatggatgatattaaatggggatttttattattttttttttcgtttggaaaattttaaaagaaattttttgtgtattgaaaatgtgattttttaaaattttttttttattaagaaagtattgtttttttttatagattttagggttgttggtttagttgttgttttgtcgagataatattaatttaaggtattttgagtattttttgtaaggagttaggggttttttattttagtttatagattttaaaattttatattagtagataaggtaaatagggttttattttgttattagttaaaattagttttatttaagttagaaatattttgagaaaattatgtttatttatttagaattgtagatttatatataatatattaagatataataatttttattttggaaaggtaattttttttataattatgattaatttttggatattagttgaatttaggaaatggttatttgtttattaaaggtaaaatgatgtattttttaaaatgtggtatatttaaaatttgaagtgtaaaaatttatttttaagttgttttaatatttttattgattgtttttttatatagaaagtatttggagtttaagagtatgtataggtatttataatttttaattaatattttaaatagaaggttgatgtttattttatatatatattatttaaaagttatttaagtttaaaatttataattagaattgagttaatatataatggttatatagaatttaagaatattttatttttatagtattatttttttttttttaagttggttaaaggtaaaaaataaatggaaaataatattgttattattatagaatattaaataagtttaatgtaaattttataattattataataaatatttattagtttagatttttttatataattattaatataattataggaatagtgattatataaaaacgtttggttatatagttagttggaaggtaaatgtttaatgtaaagtttttataattaaaatagaaaaaaaatgtatttgaggtaggttttatgaataaattatttgtagttaaggggaagaaaaagattgggtaatatttggttttttaattatttaggttattatattatttatgttaaattttttttttatgttgaaacgtttttgtttgtgggagaatggtataatttataatttgtagattgtattgttatattatttttttttaaaagtttgtgattttatgataggattatgaaattagttttaaggttaattttttggattttggttggtttattttaaatttatttgggatattttaaaattagtatttttaaatatttatttgatttggtttttttttttttttatatttagaatatagtttaaatttttttttttggggattaggatttgttataaattgattttatttttaatgttaggttttatttgtgatttatgtttattgtaattttattttgttgggagttgttttgtttattgtgttataaatttttaaagatttgtttttttttttattttttttttttttttttttttattaatttagttttattttttaaagaagtatttttttagtttatgtttttttatattatttattgataatatcgttgttttggttattntgttttatagtttttaattttgtattggcggtttttgatatgaatatattttttttttagatataagtttttgagagtagagttatggttaatttattttttaattttttataataattgntagattatgttttaagtatttatttattattggataaatatttttttgataaagtaaaagttattaattatgattatataaatgttaatataagtttaaatataagttgggtttatagtgtttttttgttttaaaggttaaaattgaataatgtagaatagtgttggtaatttggggttttttatagttgatttttttagttgtttgtaggttgttagataaatatgtgttattattttaggttaatgtttatttataaaatatttattggttttaatttaaagtggtagttttatgtatagtttagatgtaaattttgattatggaattagatggtatatatatattgtaataatttttttataaaaaagtgtgtaaagagagtaaaataagttataatatattgagagtatattattgagaatttgaaattatagattattatagatttaaggataagaggattcgggcgagaattagaaagttcgattataggtttagtaaaatgtaattgattttgtatgttgttttattttatttttaatgaaattatattgtagaagggtgaaattttggatttttgttaaaatgaaatttgtgtttttttagtttataggtataaaatttaaggtggtaatataatttttaggtagagagaaggtagaatttttaagtgaataaatttgatgtaggttttgaaagattgatttaaaagtttacggtaggtatcgtaatatttttagttttttgtttggaattttatgggttgatatgtagatatttaatattaatataaagtagaatataagtaatttattagtaggatattaatatgttatgttggaaagaagaaaaaagagattaaatttaattggagtaattagttaaatttttatgaggagatgacgtagtaagttagaatttgaagtaaaaatagaagaaaatagtggaattttagtttaaagaatagtgtgaataaaagtatgttgtaaaaaatagtatggtgtttgaggtagtagaatgaggttggaataaagggtaaattgagggaatggtagagtaaaagattggaaaagtatgttggagtaagatcgtgaattatttttagtgttatgttaagtagtttgataatagaggattattaaagtattttgaggagggttgtagatagaatttgaggaagattatgatgataaggtgaaaattaaattttaattaggtagaggtagggggtaaagagaatagggaaagtttttttatatttgtatagaataaagtgatataaaagggtatttagggattatttgtgttattaatagaagaaggaaagtgtgtgagagatagggttgggggatagtgtgtatgagtaagttttagaattttggggtgagagtagtataaagttagagatgatagtgagttgagttcgggataagttgattaagtttttttttagttattttttgagaagaaaaatattaagttgtaagggtataaatggaaatattttaagaataattatgggattttgtaaaatgtatttttgatagttagagtgttgatttattttaagagatattgggtaaattagtattttcgtttgaatttatttttttttaagttgatttaagagtttagtgtttttttttaaaagataatataatgaattttatggtttttatttgtatttagttaattttgtttttgtaatttgatagggttttttgatattttttttattttttttatttttttatatatgtatttttgtatatttagtttttttatttgaatagttttgggttttttttttttttatttaggtatgtttatgtgttttattattaattttaggttagtattataatttttttgaatgtttttaattatataggataatttttttgtatggaaataatgttgtttttttgtatggaaaattatattggtatgaatgggtaaataagacggtttatttttttttttattttgtaggaaattataagtgttatagagtatttatttgtagaacgttatagattttatttatgagtagttgatggattatagatttttgatttaattaagttagttatttaagaattttttattgaggttaaaattgtttgagggttgttggatattgaagatagattggaaaattatatatagtttttgatggaaggtagatatttaaaaatgattatttaaaaagtgataaattgtttaatggaagtatagaggagattagggaagtatattttgtttaaataataaattatagaatatagaatgaattatatttaggtatttagggatatatagtaatatatattttattattttgatagaattttaagttatgttagtgattatcggggaatttttaataaataagtaatttgtatttagtatagtagttaatttaaattttggaggagtgttttattatattttttttcggggttgaattattaataatttatttttagatatttagtaagaagggatgtttgaattaggatatatgttataatttagtatatatgttatttttttttattttttgtgttagttatttttgatttaaaatagaataaattagtttattttgttataagtttaatagaaagttatatattatttaagattgtatttatgattgtttttatattttaaataattagaaatgtgaaagttggttttttaagaaaagataaatttagtgatatgaaagttgaaattgagatgttttaaatgatatattgatgtttttaagtatttttattttatagtatatatagataaaattttatattttttagtgtttattgtttttttagttgtatgtttattttttatagttattattaagaaattttgtttttgattttgtttgaagataacgaaattattaggtaattttttgaaaaggagaataaaattatatgtttttaaaaagttaatgaaataatgtgattagttaattttttttaagtgaattttttttagaattttttagtaaaattttttttttaattttaaaatattaaaggattagaaaatagttttttatgattttaaattattagtagtcgaaaatgaggatgtttagaatttaaagtggaaaatagaagtaattattaataaagattaagtttataaaagtttttgttttgttttaaatttatggttattttaggtaaaagtattgttttttagattgttttttttagtatgtattttttagtgttgaattgattgtatattttaaatttaaaagtattatgtattttattttagtatatgtttatgtatgtgaatataaaatgttttaaatagttagaaagttttgagaggtgaagagatgtgtattatttaggtatggtgaaatgttttagtttaagtttatgaaaatttttaaaattttttgtatatttaagcgttttgtatgtatttttttt

SEQ ID NO: 78 - DNA, 17869 bp, Artificial Sequence
  chemically treated genomic DNA (Homo sapiens)
  unsure 3465, 3586: n is a or g or c or t
agagaaaatatatataaggcgtttaaatatgtagaaaattttggaagtttttataaatttaaattaaagtattttattatgtttaaatgatgtatatttttttattttttaaaattttttggttgtttgagatattttgtgtttatatgtatagatatgtattaaaatgaagtatataatgtttttaagtttaaggtatgtaattagtttaatattagaaaatatatattggagaaaataatttagaaaataatgtttttatttgaaatggttatgaatttgaggtaaagtaaaggtttttgtgggtttggtttttattaatgattgtttttattttttattttaaattttgaatatttttattttcggttattggtgatttggaattataagagattattttttaattttttaatgttttaaagttaaaaaaagaattttgttaaaggattttaaaaggagtttatttagagaaaattagttagttatattgttttattggttttttaaaagtatatggttttatttttttttttaaaagattatttggtaatttcgttgtttttagataaaattaggaataagattttttaatggtaattatgagaaatagatatgtaattaaagaaatagtaagtattaaaaaatatgaaattttgtttgtgtgtattataaaatagaaatatttaaaagtattagtatgttatttaaaatattttagttttaatttttatgttattgaatttgtttttttttgaggagttagtttttatatttttaattatttgaaatatgaaaataattataaatatagttttggatagtatataattttttgttagatttatgataagatggattagtttattttattttgaattagaggtagttaatatagggagtaaaggaaggtgatatatgtgttggattataatatatattttaatttagatatttttttttattggatatttaaagataagttattaatagtttaatttcgagggagaatgtaatgaaatatttttttaaggtttaaattagttattatgttaaatgtaaattatttatttattaaaaatttttcggtgattattagtatagtttaaaattttattagagtaataaaatgtatattattatatatttttaaatgtttgaatataatttattttatattttgtgatttattatttagataaaatatatttttttggttttttttatatttttattggataatttgttattttttaaatagttatttttaagtgtttgttttttattaagggttgtgtatggttttttagtttatttttagtgtttaatagtttttaagtaattttagttttagtaaaaaatttttgaataattaatttaattgaattaaagatttataatttattagttatttatggataagatttataacgttttgtaaatgaatattttatgatatttgtgattttttataaaatggggaagaggataagtcgttttgtttgtttatttatgttaatataattttttatataagaaaatagtattatttttatataagaaaattattttgtatagttagaagtatttaaaggaattgtagtattagtttgaaattgatggtaaaatatatgggtatgtttaaataaagggaaaaggggtttaaagttgtttagatgaagagattagatgtgtaaaaatatatatatggggaaatgagaaagatggaagaagtattaagaaattttattagattatagaaataagattaattgaatatagatgaagattataaaatttattgtattattttttgggaaaaaatattaggtttttagattaatttgaggaaaaataaatttagacgaaagtgttgatttgtttaatgttttttagagtgaattaatattttagttattagaaatatattttatagaattttataattatttttagagtgtttttatttatgtttttatagtttagtatttttttttttaagggatggttgggaaagaatttaattaatttgtttcgaatttagtttattgttatttttagttttatgttgtttttattttaaagttttgaagtttgtttatgtatattgttttttagttttattttttatatatttttttttttttgttaatgatataaataatttttaggtatttttttgtattattttgttttatataagtataaaaaagttttttttgttttttttgttttttatttttgtttaattaaaatttaatttttattttgttattataattttttttagattttgtttatagttttttttagaatattttagtgattttttattgttagattgtttaatatggtattggaggtggtttacgattttgttttaatatgtttttttagttttttgttttattatttttttagtttattttttgttttagttttattttattgttttaaatattatgttgttttttgtagtatgtttttatttatattgttttttagattagagttttattatttttttttatttttattttaaattttagtttattgcgttatttttttatgaagatttgattagttgttttaattgaatttaatttttttttttttttttttaatataatatgttagtattttattgataaattatttatgttttgttttgtgttaatgttagatatttatatattagtttataaaattttaaataaaaaattaaagatattgcgatatttgtcgtagatttttaaattagttttttaaaatttgtattagatttatttatttgggaattttgttttttttttgtttaaagattgtattattattttagattttgtatttgtaaattaagggaatatagattttattttggtagagatttagaattttatttttttataatgtaattttattaaaaataaaataaaataatatatagaattaattatattttgttaggtttgtggtcggattttttagttttcgttcgagtttttttatttttaggtttgtgataatttgtggttttaagtttttaataatatgtttttaatatattatagtttattttattttttttatatatttttttgtaaaagaattattatagtatgtatgtattatttagttttatgattagaatttgtatttaagttgtatataaaattgttattttagattaaagttagtgaatgttttgtaaatgagtattaatttgaagtaataatatatgtttatttggtagtttgtaggtaattgaagagattagttgtagaggattttaaattattagtattgttttgtattatttagttttaatttttaagataggaggatattgtgagtttaatttgtgtttgaatttgtgttgatatttatataattatgattagtaatttttgttttattagaaaagtgtttgtttaataatgagtaaatatttgagatatagtttgntagttattgtggaaaattgagagatgagttagttatggttttgtttttaggggtttatatttaagaggagaatgtatttatattaagagtcgttagtatagaattaaagattgtggagtanaatggttaaagtagcggtgttgttaataaatggtgtagaggggtataggttgaaagaatgtttttttgaaggatggaattggattggtggaaagaaggaaaaaaaaagagtaaagggagggataaatttttggaggtttgtaatatagtaaatagagtagtttttaatagaatggagttgtagtggatataagttatagataaggtttgatattgaaaataaagttaatttgtggtagattttgatttttagagaaagaagtttaggttgtattttggatataaaaagggagagagattagattaaatggatgtttaggaatattgattttaaagtattttaagtagatttgaagtagattaattagagtttaagaaattagttttgagattaattttataattttattataaggttataggtttttgaaggagagtgatgtaatagtgtagtttataaattatgaattatgttatttttttataaatagaggcgttttagtatgaaaagggaatttggtataggtaatgtgatgatttagatggttagaaggttaggtattgtttagttttttttttttttttagttatagataatttatttatagggtttattttaaatatattttttttttgttttaattataggagttttatattgggtatttgttttttagttaattgtgtgattaaacgtttttgtataattattgtttttatagttatattaatggttatatggagaagtttaggttaatgaatgtttgttataataattataaaatttatattaggtttgtttaatgttttataatggtgataatattattttttatttgttttttgtttttagttagtttagaggaaaagagatgatattataaaagtaaaatatttttgggttttatgtaattattatatattaatttaattttaattatgaattttggatttaggtgatttttgaataatatatatgtaaagtagatattaattttttgtttgaaatattgattggaaattataaatgtttatgtatatttttggattttaagtattttttatatggggaagtaattaatagaaatgttgaggtaatttagaaatggatttttatattttagattttagatatgttatattttaagaaatgtattattttatttttgataaataagtagttattttttggatttaattggtgtttaagaattagttataattgtgaaaaaaattgtttttttagagtaaaagttattatgttttaatgtattgtgtataaatttatagttttaaataaataagtataatttttttaaaatatttttggtttggataaagttagttttgattagtggtaaaataaagttttatttgttttatttgttgatatgagattttggagtttgtgggttaaagtggggagtttttgattttttgtaaaagatatttagagtgttttaaattaatattatttcggtagggtagtaattgggttagtagttttagagtttgtaaaggaaggtaatatttttttggtgggagagagattttaagagattatatttttaatgtataaagaattttttttaagattttttaaacgagagggagggtgatgagagtttttatttaatgttatttatgtgaatttttaaatttgagaattgagttatagtataggttgtatgggtggtggtgtgaatttgtggagattggtgtgtgttgtaaatgtgttaatttttttttagtttaggaatttattaaagtattaaaggtcgttgggagttagggagtatgagatcggagatgaataatgaggaggagagattgaataaaagttaggtggggtgttaaatatttaaaagaattaaagttggatttttggtaattgttttgtattttaattttgaggtaggaaagtaaaatgttgagatttaaagttagaaaatgtaaaaggaaattaaggaggaaataataaagggaaagaaaatttttaattgttattaaatgaatgaaaataaaatgatagaatgacgaaaataaaaaataggagaaataaaattttttttttatttgttttaaatgatagtttgattttagtaatgtgagtatatattttttttttttgttgtttgtaaaattttattagtttttttaattgtgttagggaaagagaaaagatgttatagtatttgttttgagttattttattattgtgttttagagatgataataaaatttgttagtaatttttgtatattatatattttttgtattagagttaagatgtagaagcgatagaaagttttgtttatttttagtagtattaagatttagtaatagaattgttcgtatgtaagtttttttttttttaaaagaatgttaaatataaagtataatttagtagttatttgtatttttttgatatttaaaaaagtatcgatagagtagtggaaatagttagtggaaatgggattagggttgggggagggaacggtttaggtaaagtttttagagatgtgagatttgtgtaaattttttagtgaataaatttttattagtaagttaaacgttataatgaattaggtagagataatattagaaaatttaatattagtaatattttatattttttttaagtaatgtttttaagtttgtggatatttttgttatatatatttatatatttaaaatatgttagcgttaggaaaattagtattatatagatttatttttttgatttattggattttaagtaagggtttgtgaagtaatttttgtttaaatttttttgaatatggttttatgttgttatttatattttgtaaatatataatatattttttggttatagttataatagtattatgataaattaaattaaagtgtatttttttatattattattttaagttagataattgttatttttagatatttttgtttgatgtttgtatttttgtgagatttattttatgttgatttgtaatatattattttatagattatttatgttattttagagttattatttttattttgggttggtttttaaatgagttattttttatattttttaagagtgttttttttattttggtaagtatgtagtgataaatttaataggttaaagtttttgttataaagttatataaagagttgtattgagagtttttatgaaatggggataatatttttttttaggatatgtgttttttattttagaattgttaattttatttttttatagttaggtaggtgttagaaaataaaataatttgttaagatagtagtttttagagatgagtattttaaatattagtaaatgattattttttattattaaaattaatgattggttttgttattggtttgtagttattattatgtttttgtttagttttggtattttttgaaaggaaagtttttgatgtggttgagtgttagtttttggaagaaattggaagttttattgtgaagtaattggaaggtggttgttgtattgaagttataaggtttatttatttaaaatttttagatttttgttgttggttaatagatattttggtagtattagtaaaagttgaaagattgttaagaatatagaattttagattttagtttagatttatttttttaattatagtaaggaatgaatgataaaaatgtagtaataggtgtgaaaatagttgttagagttaattgggaaagggggataatattttttttttttaggatatgtgttatttattttagattttttttttgattaggtttttttgagtgagattttagtattattggttttgatatttaaggaaaaaaggatattatgtgggaaagtattagatttaagataaaaagatttagaatttagtttattttatttttgtattttaagagttatgtgattttaagttagttatgatttttgagttcgggttttttagttttgaaatgggattttgttaatattttttttagttttttttagtggttaatgatgtattttaaatgagagaaatatatgaaattagttttgagttgtgataagtaatataaatataatttatattgagaatagaatgattatataattttaggagttattttgggaaagagaattaaggagagaaaggattaagtagttaataagtgttagttatattttataaattattttatttaatttttatagttattttttaaggtagttatttttatttttaatttatagatagaggaattgaagttttaggggatgagaagtttggttaaggttatataattaaatatatagaatagttggaaattgaagttaggtttagtttgtttagttattgtattttgtagttagttagttattttttttatttgtttttaagtttaaagtaaataaaatattgttttagttggaaggaagttaaaaatattttttaagtgaaagtagtattatagtataattagttttgcgttgaatataagtttttttttgttttaagtattttttagtgattttttttaaaattcgttagtcgatttggttttagtttgtattttagttttattttatttatttttttttttatttattttattttagttagattagtttttggatagttttttgagtataatatgtttttgttttcggggtttttgtatgtggtaagatttttggatttttgtttttttttatttttggttattttattttttatattttttaggtttatttttaaagtatttttttaaaaatttttattaaaagtttttttatttatatttttttagtttttagttattttgttttaaatatttattttaatttttgattaaagtatttttttattttttgttttatattattttatatattttttaggaatagaggttgtatgagacgtgaattatattagtttttttatattatgagaattagtatagggtatttatttaaggttttgttaaataagaggaagggaaatatgggagaaacgaaaagtaaaagggagaaataagtaaaggggataaaggaggtatttggaagtttatgtagttgaatttgtttgttgtaagaatttaaagagataattatgggggaaaagaagtattttaaatcgtgtttgggacgtattatttaatgatttataatttttttttattgaaaatatttttttaatttagaagggttaaataaaattagaaatttaggaaagtaattttttattttaattaaaatcgattttataggagttgaagaaatgtagtttatatagatattttatatttatgttaaagttttttgttttatagttttttttagtttaaacgttatatttttagttaaagtagaaaatttatttttttttaatttttttattgttttttttttttaagttggttgtaaatttttttttattggtttgggaatagttgagtagtagttggaaagattatggtaattagtaatgggtaaatgaaagttaggatgaagaaggatataagaggattttggtaagttagtgttttagagtagtggaattgattttagataagttttttgttagtgtgttagtttaaattgttagtattggtagtgtagttttgttatttatttgttgtgtaattttagtaagttatatagtcgttttgttttttagttttttgaattgtgaaataggaatagtaatttttttatagggttattatgaggagtaaataaaattattgttaagaatttaaatagttatggtagagtaagtataataaattttatttataattatttattgtgtgtgtgtgtgcgtgtgtgtgtgtgtgtgtgtatgtatgagtaaaatgttattagttgatgaaggttttttgtagtatgaataaattatggtttaataagtgaagtttattaattaagttaaatattttggcgtttgaattttgtttgagaatgtttgtttttttgaattttttatttttttttataaaaaaaaaaaaagaaaaagaaaaggtaaaataatagtattgtgaagagagaatggtaaataaagttatcgaattttgtaggagaaaatttttgatttttgaaattttggaagatttttggaattttattttgatgtaatttttgttagatgggatatgattgtataaaaaagagtgatagaaaagttaggagaagacgtgaggtatatttgtaggaaataggtttaggaaaggttgggtaaaagggaaaattttggaaaaattggaaaggatttagaaaaataggattaggattattaacgttaaattattttttatgtttaggtattattttaagggttttgtacgtattaagttcgtttaatatttttatcgattttagaaaatacgtgtttttattatttttattttaaatataagaaaatcgaggtagagagaagtaatgtagtttgtttaatgattatataatttttaaagaatttttttatttaaaggtttaataaaatggaaaatgtggggtttatttagagttggaaagaggagtaatgaggataaggatgggatatgagtttatattagtgaatttatagcgatgtttttgaggttttaaattttaaaagtttttgtataattttagaaagtattttttaaattttgatttttttttaatttattttaataaagaaataattagattgtattagaaaataagttataaaaatatatgtattaataaatttttttgtttgggtgaaaagtagttttaagtttgagagtatgtagtttttttatcgtagttgtaatatttttttttttatttaattttgtttgttttttttaatttgttttaataattaatatatttttagttataataataataaaaaaggatattagaatagtaatagaaaaataatataagattttagggttggtaatagaagataattttttagatattataaattttttgtttatttggtttgtaattagggaattttttatagttaataattattatttttttttttaattttttttgtaagagtaaatttaatttaattttttattgggatatagtaaataaaaaatgcgaaggtatttgaaaaagtttatttatttagatttaattatatatataattggcgtttttttaagtgtgaaaacgttgtaattaataaattaaataataaaatgttatttgagtagaatagatttatatagaagatgtacgagaaattaaaatttattgatttgtttggagtatttttatttagaaaagtttttaaatatagagtaaaacgtttgttttttgagttttgtttttttttggatatttaggttagttattttttttagaggggagttgttgtatagtgatttcgaagtgaataggttttaattttaaaattatttttttgtgttaagggtttattaggtttgtgtttgtatgttagatttttaggattattttatttgtttagtatcgttttttatatgtttagttaatgattattaagtgaagtttaatttagtaatgttattgagtagataaattttatatagaagatgtacgagaaattaaaatttattgatttgtttggagtatttttattagaaaagtttttaaatatagagtaaaacgtttgtttttgagtttgttttttttttggatatttaggttagttattttttttagaggggagttgttgtatagtgatttcgaagtgaataggttttaattttaaaattatttttttgtgttaagggtttattaggtttgtgtttgtatgttagatttttaggattattttatttgtttagtatcgttttttatatgtttagttaatgattattaagtgaagtttaatttagtaggaaggttatttatattagagtttttttgaaatatatatataaggaagattttgtaaatttttgtaaagttaaaggagtggggagataggggtatttagattattaaaatatttttttaggtagtattattaaaaaaaaaattttattaataatagtaatataataatttgagtattgtcgataattttgagttttatgaaatgtatttttaaatgtatttatttttaattgaaattttttgtgaatgataaatttggaataagaaaatgagggagattggatttttgtaattttttggatatatttttgttaaatgtaaattgtttgacggtatggatttattgtattttttatgttattatttgtagtaaaattaaatggaaaaaattttttttttttaataaaatttcgtgataataatattttaaaatatattttatagttgttggttaattatgttaaaggtataatttgatttttgttgttatttttttgaggaaaagagttaattagttgagtaatttttttatttgttgtgttttatgaaaatgaaaatgtaatagattttgggattttaaagttatttatggttataagtgaggaaataaatatataatagtggggatttttattttattattaaattataatgttttttgtttttttgttggttaatttagatagtaaaatggtttttttttgatttgtaagagttaattttttattatattttttgtattatattataaagataattttaagtaattttggttagattgtgttttatttatttgtttgttttggagttttaggatttgataggaaagtagtgtgaaataggtaaagtttagagttatttttagaacgatttaagtaggatttattttttagttttttttagttgcggattttaaagtttggatttagtttttgtttttgtttttttaaatatttattagttaataattatatatttgttttaatggtaataaatttggttgaagaaataatgttttttttttttttattaaaatatgtaaaataatgtaagtttatttgaagattttcgaatttaattattagatttaagtttttttattttaatatttattttattaaatatattggaaagttatgttattttagtatgttttttttttttttgtttgttttttattgtttttattcgtttggttttttttagtaagtttttttagtgagtattttgtttttttattatatatgtcggttatagtgaagttaatagaagtgtttagtaaagttttttgaattttggtataagaatttttttatatagaagagaatttttttcgtttggaaatattttaagaaataaatttatgaaagattgtttgatatgatttagattatatttgattaggatattaaattgagatttgtattttgtatgttttttatttttatatttgtaaagggttttttatataagtttatttaaattgatttttaatgttttatataaatgtagtttttgtaaattcgagttaaagtagaaaatagaagttttatttattttagtatattgaatttttaaatcggtgagtaggataggtaagtttggcgtgtttgaggatgatatttttgattcggtttttggaatataggtgattggtttagtaatttggttttgatagagtatttggttttatttgttttttttttatttgtacgggttaaagtttatttgtatattcggatacgattggatgaataaatttagagtaaaaaaagaaaacgatattatttatttgtaatatttagggtaggaagtttttgattttaaatttaaatttttaagaaattagtgttttagtatcgaatttgtatttggagatagtgtattatttgtagatgaattaatttataaagtcgaaatttgtgataagtgtatgtagtagttgttttggttattaaggttagttattatttttttgattttttatgttttttaatgttattatgtaattttttgttttttgatagatttggaattagagaatttgaggattgaaaagagtttaaaagggtatttgtttttagtagaagttggtgaggagagaattttggttaggtgtttttaggataaggtttttaggaaattagtttattttttagaaaattaaggtgttgtttggggaagaaaggttttttatttatattttattttaagttagttttaaaatatcgtattagttttgtgtatttttagtgttgggtaagtagatttattgtgattttagaagttttaaattatttttattttttatatgtgaatagaaaagttagtaggatttttagggaattcggaatatattgttatatataattattataattagaaatatggtaatattatttattaatatttatttaaaatgaaagtaattttggttttggaagttgtttgtatttattaatataggtagtgtataaagattaaatttaagtagggtttttaaataatttaagtttttaaattaatgtttagttgaaggataattttttaaatagtgttatttttattttaagtataatattttattgtattgtagttttagtaaacgttataataggaataagataaaatattttggatgttttgattgtggagaattaattaatttttttttttttagtgaaatttgttaatttttttgaatatgggatttatatagggaaattaaaaatttttgaattgtttgtttaaattaggtgtagtatttgtttttttttttatttttattttatatttttattttagagatatatagagggtgagtagtttatttatggttatagatttattagtgtaggattagaattttattttaggttagtttgatttttaaatttggatttttatttttgtttattatttttattttattttttataagagaatttttatatgggtttaagtattaattgttttggtttttttagtgaatagttatttttataggtatttaaatataattttttatttatttaagataagaatttgtaaaattttttttgtaaatatttttagtttttgggttggatggtttttgatataatttatttgattttatttaaaagaaattgtagatgataggtaaattaatgggtgtagttgtttttttatagaattttatttaaaaagatagaaggtaggttagatttggtgtacgggttaattttttagattttaaggtaatattatttttaatgtttttgattttttcgtgttttatgtttgatgattagatagaaatttttgtgtttttttaatatttttttgtttttttttttttggaaagtttaattgtttttttttttaaaaatgtgttttgagttaaatgtataattatataatagttgttatataatttgagagtggcgttttttttatgtttaaatagttgtgttttgttgttttttttttttagagttatagttgtttgtggatttaaatattggtttatttgatgtttaggcgatgaaagtttaaggttttataatatatttggtttgttattttattttttatatgattatttttaattgtattttattggataattatgtaagaatagtttttttatattaggtatttttgaatgtaggtaaaaggagttgttttggagataggttattatatttgtttatttaattttagtaaatatttattaagtattatttatgtatttataattttttagttttaattttatttaagtagattttttttgtttagaaattatagggtttgagatttatatttttgaggtaaatattattttgttttgagagtttattttgtagaatagtatatttttgggaattgttgtatatgaggaaaagattttattagattatttttattttttatagaggaaataatggtttttgtgagaatttagggattaaggttgtatattttagaattggatttaggattgtacgtttttatggtatgttaggattatgtagtagaggaggagttgtttttttaatttgagagtaatcgataaatgatgttttatttttttttttttttttatgaataaattaaattatatatatatatatatataggtatatatatatatggagagagaagtaagaaatataagaggatagtttatttattttttgaatttgatttttttagttatttgtgaaagtttttattatattaagaaatatatagattatgattttaattatttttgaaattatttttttattttataataaatatttttagaatttcgtttaatttttagtttttgaaaagataaaaggaatttaatttgttatttaggatttaaaatttttaaaaaaatgttgaaaaaagttatatgatgaattaaaaatagtttttgtaatggattgaattttttttgtttagttataatggatatgttgaaattttaattttttatgtgatggtattaggagatggagtttttgggaggtgtattagtttatttttatgttattaataaagatatatttgagattgggtaatttataaaggatggaagtatttgcgtgtgggtttagtaggttataggttaagaggaggttagtgagtaggtggtgagattttgattttttttttttattattatatcgtttttgggttcgtggtggatggcgacgtggttttcgatgattttgagatttttatgtagtagggagaattttttaattacgatatgtttatcggcgttaattagggagagggttttaagttcgtggaggattttgtagagagcgaggacggtgtgtttgttagcgtttttgattttattgtttttaattttgtggataatttgtatggttattcggaaggtaaggatgtgtttcgggagattattaagtttatgtatatagattgggtcgatcgggataatggcgaaatgcgtcgtaaaattttgttggcgttttttattgattattaatgggtggtattagttgtggttattgttaagttgtacgtcgattattagtttttcgtttatttttatattttttattattattgttaggcggagggtcggtttgagtgggtagatgcggcgtacggggatgaattgttttatgtttttggcgtgtttatggtgggtgttatcgatttttttttttgtaatttttttaagaatgacgttatgtttagtgtcgtggttatgatttattggattaatttcgttaagattgggtgagggttagaggggttgggcggggttgggcggggtttttttttttttatatggtcgtcgtttttttgttaaggtatttattttggtttgtttttttgttcgagtgaaattaatttagatatttttgtgttaggtacggagttgagcgttggagatttagtagtattagatagagaagtcgttgttttttttggggagttgggggtttatttagtggttttggtttggcgtttgttttttttttttttttgtttgattttttttgttcgatttttttagggttttgtatttttggttgattgtttaggtgtgtgtgtttgagtgtgtgtaagagtttgtgtgtttttatttttgtttttgtttttttgaaaatttattgatagttttttatttttttttgttgtttttttttgtttgtttatttttcgttttttttggttgtcggttgattttagtttggttgtgtatttgtttttggttgtttttttcgtgtttttgattttgtttgtgttttatttaggtttagtttttgtttttttttggttatttttgtgtgtgtttttgtttttttgttcgtatttttggttgtttttgttagtttgtttttatttttatttgtttatttgtttgaagagataggtagtttttttgtttttttatatttatttgtgtttttttgtttttgtgattttttttttggtttttttgttgtttttttgtttttttgtatttttgtttgtttttttgtttattgttatttatttttttttagagttttgtttttattttttttttttttgtttttttgtgtttatagggattttaattagtcggtgtcgtaggatattaagtttatttatattaagtttaatcgtttcgaggaggtggtgtggagtaaatttaatagtaaggagaagtagtatttgtatataggtttgaagttacgcgtgcgtgataattatcgcgttaataaggtggttttttggttggagttcgtgttttatttgtataatttgtatacggagttttttattattattacgcgtttgtagtttttttttttttttttaaatagtgatagggttttgttatgttggttaggttggtttggaatttttgattttaggtgatttattcgtttcggttttttaaagtgttgggattatagg

SEQ ID NO: 79 - DNA, 19972 bp, Artificial Sequence
  chemically treated genomic DNA (Homo sapiens)
tgttttaataatgaaaggttttagagtagttgaaagttaggaatttgaatattttagaggaagttaagtggtttgaggtgtttttatcgaaggttttagtattatgagaatgtttgtgtttttgtcggttttatttttgttagtgagtttatagataaggggcgatgaagaattaggaaatagatggaaagaaacgtggaagagaggaaagttttagattgttagggtgaaatttaggttgagagttaagttttagtttattttttggagagattgagttataaggagttataattataatagcgttttagtatatttaggtgattttggtttgtagtatttggttgaggattgtgtgaaagtagttgaggttaaatgtggtggtttatatttgtaattttagtattttgggaggttgatttgggtggattatttgaggttaggagtttgagattagtttggttaatatggtgaaattttgtttttattaaaaatataaatattaattaggtatggtagtgtatgtttgtaattttagttatttgggaagtttgaggtaggagaatcgtttgaatttaggaggtagaggttgtagtgaattgagatggtattattgtattgtagtttgggtaatagagagagatttcgttttaaaaaaaaaaaaaaaaaaaaaaaaagtagttaaggaaggttattatggttataaaagattttttagaagatgggatttgggttggattttgatagggaagatttttataaggagagagggtaggatatgggtggaataggtgtattaatagtagggtattagggatgagagagttgttggttaggattatggtgagtattatagattatagataaattagaataaacgaatttgtggattagcgtgttttgtattgagatatatattacgtatattaatagggacgaagtacgttgtttatattgtatcgatgtatgcgaatgtggataagttagtttatttttttttttttttttttataattaagtttattgttgtttttggtttttttattttggggaatagtatatggtaagaattttagtatttattttatttttttcgtttttatttttatatagttatttgttaattttatttttatattttttttgttaattgagttttttttatttttttgtttttggtttgtttttttattataattgagtttttatgtagtttttagaggaatttttcgaaggtatatgtgtaattttattatttttaggttgaaagattttggttaagagaaatattagtataagttattaagatttaggaggttgtcgggtatggtggtatatgtttgtagttttagtattttgggaggttaaggtgggttgattgtttgagtttaggagtttaagattagtatgggtaatataaagagattttatttttataaaaaaaaaaaaaaaaaattagttggtgttttagttcgtttttatgttgttgataaagatatatttgagattgggtaatttataaaagaggtttaggttaggtgcggtggtttatgtttgtaattttagtattttgggaggttaaggtaggtggattatttgaggttaggagttcgagattagtttggttaatatgttgaaattttatttttattaaaaaatataaaaattagttagtcgtggtggtacgtttgtaattttagttatttggaaggttgaggaaggagaatcgtttgaatttgggaggcggagtttgtagtgagttaagatagtattattgtattgtagtttgagtgatagagttagattgtgttttaaaaaaaaaaaaaaagaaaagaagtttaatggatttatagttttatatagttggggaggttttataattacggtagaaggtaaggaggagtaagttacgttttatataaatggtcgtaggtagaaaaagagtttgtgtagggaaattttcgtttttaaaattattagatttcgtgagatttatttattattaaaagaatagtgtagtaaagatttgtttttataatttagttattttttattaggttttttttataatatgtgggaattgtgggagttataattttagatgagatttgggtagggacgtagtgaaattatattagttaggtatggtggtatgtatttgtaattataattatttaggaggttgaggtgggaggattaattgagtttgggaggtcgaggttgtagcgagttgtgattgtgttattgtattttagtttgggtgatagcgagattttggttttggggaaaaaaaataagaagatttagaaagttatagtgatgaaaatagtgttatattggtatacgtatatagagattaatgatatagaatatatagtagtttagaaatagttatttatagttatttagtagtaaaaagatgattggtaggatgtatttgtgttatatatgatagataaaatgttaattgtttggatatatataaagtatttataaattaattttagaaagattaataatttaatagaaaagtgagttagagatatgagtagttagtttatagtagaggaaatatgtatgattttatttaggtagagatgtttaagtttattcgtaaaagagaagtaaattaatgtggtagtgaaatgttattttttcgttttttagattagtaaagttaaaaaaaaaattttgaaatttttattggtgagggtgtaaggaaatttagatatgataggtagtggggtataaattaaatttttttggagggtaatatatttgtatttaaattgtaaatattttttgttttatttttattaatttttttttttttttttttttttttttttttttttttttttttttttttttttttttttttgagacgtagttttattttattatttaggttggagtttagtggtacgattttagtttttggtttattgtaatttttgttttttagatttaagtaattttttgttttattttttggagtagttgggattataggtattgcgattatttttggttaattgtgtgtgtgtgtgtgtgtgtgtgtgtgtgtgtgtgtgtgtgtgtgtgtgtgtgtttagtagagatggggttttattatgttggttaggttggtttcgaattttttattttaagtgatttattcgttttagttttttttttagagtgttgagattataggtacgagttatggtgttagttttatttttattaattttttaagtaaattaagagtatatattgtggtattgtttgtagtggtaaaagattggaaataatttaaatgtttattataggaaatttatgaaataaaattattttatgtatttagaggaatattatgaaattgttgaagagaatggggatatagtttttgtgtgttgtgataaaacgatttttatatatagtattaagggaaaaaaagtatttggtacggtggtttatgtttgtaattttagaattttgggaggtcgaggtgggcggattatttaaggttaggagttcgagattagtttgattaatatgatgaaattttatttttattaaaaatataaaaattaattaagtgtggtggtatgcgtttgtaattttagttatttgggaggttgagataggagaatcgttagaatttgggaggtggaagttgtagtgagtttatatggtgttagtttgggtaataagagtgaaattttatttaaaaaaaaaaagtaaggcgttattgggaaggggaagtggggtttgtatggttgaatttagagaaggaagggagttttggttattagattatttttgtagttgatttttaaatttattttttttttttttggtataggggttatttattttttagatttttttgtatggaggtatggttgtgtgattgaaatttagttaggcgagtaggtttagtttatagaaattttttatgggttatttttatgttttttttttttttggtttgtgtggaatggtgttgagtttttagggcgattttggtggaatttggtgttgaaattagagttttatcgtcgggcgcggtggtttacgtttgtaattttagtattttgggaggtcgaggtaggcggattatgaggtgaggagatcgagattattttggttaatacggtgaaatttcgtttttattgaaaatataaaaaattagtcgggcgtggtggtaggcgtttgtggttttagttatttcggaggcggaggtaggagattggtgtgaattcgggaggtagagtttgtagtgagtcgagatcgtgttattgtattttagtttaggcgatatagtgagatttcgttttaaaaaaaaaaaaaaaaaaaagaataagtaaattatgtaaattattttgttttaaattttgaatcgttgtttttaagatcgtttttgtttttgttttggtcgtttttttttttgttaattgggttttatttattttttttatttttttaatacgtgttaggtggttttattttttggtttttgtttttgttgttttttgttattatttaggttttatttgttattttttgattatggtatttataaaagtagtgtcgtttgttttatttatgttatttcgtttattttttttattttcgaaatgatttcgtttttgggtttacggtcggtttttttatttggagtattagtcgggaaggttagggtcgttttggttcgggtttgtttatattggggttaaaggtatatattgggggtttaattaaggcgagttgcgttcgcggggtcgggttttttcgtataggcggagggcggtggcgggcgcggaggcgtcgcgcgagttagggggtagttacgggtcgggggtatttagcgttattcgtttcgtttgtattagttgcgcgttttatttcgaggaatggtagaggtagtttcgttttcggttcgttttcgtttttttattggttgtcgcgcggggcggggagcggggtcggtttagtggttttgagattttagttttgttttcggttcgttcgttgttcgttagttcgttgcgatgttgcgcgttgtcgttcgtttcgggtttcgtttgggtcgtcgttttttgttagtcgtcgttatttaggtcgtgtttgtttttaattagtagttcgaggttttttgtaattaggtgagtttatcggtcgggttcgcgttttgtttttcggttcgagtttttcgtaggtttttaggaaggtttcgcgtcgtcgtgggttttagtgtatttatttggggttcgaggggtttgtagaggttgatttggaagtatatttgttttttttttttttgtaagtattttagttttttcgtcgtttttgatagttttcgttttattttttcgtgatttgggtttttttttcgttttcgtttagtttcggtttgttttttagggttaattttcggggtttcgttttttttatggtttttgttttcgggttttcgtagggtttttatttttatttatttagaagacgcgattaagtttttttttgtaggaatttttttgttttttttttagttattttttttattttttgatttatgtttttatttaaggagtttaaaaggaaaaattaggaaagaggtgatttgtagttacgttttttagtttattatgggcgaggttacgttcggttgtttttattgttgggagtagggaattttggaggattttcggttttagggggtcgattttaaggggtgtttgcggtttttaacgtcggtttcgattaaattaaggaggagttttttaggataaaattgatttttgtggtttatttattgattgtttaattagtaatattttggaatattttttgttttgatttttgagtttggttaaagttttagattttatagaggttgaaattggttatgaaagagtttgttttgtttgtgttagtgtatgttggttgttttttttgatttaagtttttttttttataaatggaaaggcgttttgagggttaggtttatataggtttttattaattagttattttatagttaattatagtttttgttttgtttgtatagtttttgtgtagtattgttttaagcgtttatttgttttgtaatttaaggtaatttttataatagttttagtaggaagggattgtaattttttattttatagatgaagagattgagttataaagaggtttagtgatttatttaaagattaaagttagtggtatagttggggtttatagttgaatttttaggagtaagtttttaattagaatattttatggtatgttgtgattttgggtgggaataaagggattatcgattttttgggattattgttgatttgggatgttgtagagttggtttttagttagttgtttttaatagtatatttgttggtttggttttgagtgtggttgtaaatttggatataggtgatgggtaaaggtatatgcgtgtgattttaggggatgttataaaggttatttgtaagggaatttttaaaaggataaaataaaattttttgtataatataagttaaaaaggtagtagttatggtttttttggtagtttgtgtaagtttatgtttggaagatttgagtattaaaagatttagtagaggttaggtgtagtagtttatgtttgtaaattttagtattttgggaggtcgaggtgggatgattcgttgagtttaggatttcgagattagtttgggtaatatagtaagattttgtttttagtttttattaaaaaagtaaattagttaggtgcggtggtatatgtttgtagttttagttatatgggaggttgaggtgggatgattttttgagtttaggatttcgagattagtttgggtaatatagtaagattttgtgtttagtttttattaaaaaagtaaattagttaggtgcggtggtatatgtttgtagttttagttatatgggaggtcgaggtgggaggattatttgagtttaggagttcgaggttgtagtgagttatgattgggttattatatttagtttgagtaatagaataagattttgttttagaaatgtttttaaggaatagttatcgttttaggaatttttttggttataggatttgattaaaatttttattttttattatatgtagatgaggtagttgggtttagatatgtatttaggtttataggtaatatattttgttttttagatttattttgtgggtgtaggttggaggagtcgagttaattttttgtggttgtttttttttattagattttttgagattattaaagtaatatatgtttattgtataaaattgtagaggattgatttataattttttggatatggttagttaaggtgatttatgtttgtaattttagtattttgggatgttaaggtgggaagatcgtttgagattagatgtaaggttgtagtgaattatgattgtgttattgtattttagtttgggtaatggagtaagaatttattttttaaaaaataaataaataaataaatttttttggatattttattttattttttttaagagtattgtgaataggtgggtgtgttttttgtagatattttgtttgtatttataagtgtttgtagtaagagagagagagagagaatgtaagtatattagatttttttttttttttaatataaatgagatgtaattatttatattttgaagttcgtcgttttattgaataatgtatttgggttattattttgagtacgtttagattttatttaattttttttaaggattatagagtattttattttggtggcgtcgtgttggaattggattttttagagttttttgggttgtttgtagtgtggttttattgttgatttagtagggaagagggatggtgtatatagtagtggattttgtattttagttgttttatttgtaaaatggggtaaaatggttgggtgtagtggtttatatttgtaattttagtattttgtaagattgaagtaggcggattacgaggttaggagttcgagattagtttggttaatatagtgaaattttgtttttattgaaaatataaaaattagttgggtatggtggcgcgtatttgtaattttagttatttgggaggttgaggtaggagtattatttgaatttgggaggtagaggttgtagtgagtcgagattatattattgtattttagtttgggtgatagagcgagattttattttaaaaaaaaaaaaaaatgtggggggtaaaattttatttgtattatcgaattgttgtgaggattaaatggggtgaggtttttgtagttataggtagtgttggttttatggttattggtgtttttatattgattgtagttttaagtaggagttgggataatagtgacgttgtggatttgtagtgttttggtgattaaattttatttgatatggatgttgttgtatttgtagtttgttttttgaaggggtgagttagattgtggtaaagtagaatgggagtttggggtgaattaaaatttgtatttttatttttattttttttttttgtttttgtttttgttttgagatagggttttttattgttgtttaggttggagtgtagtagtgtttattgtagttttaattttttaggtttagttaataagttatttttttattttagttttttaagtagttgagattataggtatattttattatatttgattaatttttgtattttttattttattttatttatttgagatagatttttgttttgttgtttagggtggagtgtagtggtgtgattttggtttattttaatttttattttttgggtttaagcgatttttttgtttgagttttttgagtagttaggattataggtgtttattattacgtttggttaatttttttgtatttttagtagagatgaggtttcgttatgttggttaggttggttggttttgaatttttggttttaggtgatttatttgttttggttttttaaagtgttgggattaaggtattgtagttagttaattttttataatttttatagagatggggttttgttatgttgtttaggttgggttttgaatttttaggtttaagtaattttttttttttggttttttaaagtgttgggattatagtgtgaagtattgaattaaagagagaattgataggtaattaaggatggattttttaaggttaggtgtggtggtttatagttgtaattttagtatttttagaggttaaggtgggaagattgtttaattttaggagttcgagattagtttgggtaatatagtaaaattttatttttataaaagtttaaaaaaattagttggatatggtggtgagtatttgtagttatagttatttgggcggttgaggtaggaggattgtttgagttaaggagtttgaggttttagtgagttttgattttgttattgtattttattttgggtaatattgtaagtatatataggtattatatagaaatgtttattgtaattttttttatgttagtaaaagtttaggaaataagttagttcgagttttattgggaaatagatgaatatttatgttatagttataggaggaaataattttttgtatgtagtagttataaattattggtttaatttgtataaataatgtattttaaaaataatatgttaaggaggaaaaatgtttagtattttatattatatgaaattatgaaaattgtataaaattttatgttgtatgtagatagatagatttttataaaaaatgtgtaagaatgtgttggaaggaaaattttttttggtgtgagggtggttattgtttgagtgggtaggataggataagggtagtgatgaacgaggattttggttttatttaaatgtttgatttttttaaaaattggttaggtacggtggtttacgtttgtaattttcgtattttgggaggttgaggcgggtagattgtttgagtataggagttcgagattagtttgattaatatggtgaaattttgattttgttaaaaatataaaaattagttaggtttggtagtttacgtttgtaattttagttatttcggaggttgaggtatgagaattattttaattcgggaggtagaggttgtagtgagtcgagatcgtattattgtattttagtttgggtgatagagtgatatttcgtttgaaaaaaaattttttaaaaaataaaaaaaatttaatattttatgagtagatattaaaagaaaaaagaaaaaatataatggttttttgatgtgttatttttgtagataattattgttaacggtatatttgaagtagaaatttgtttttttttgtttgtttgggagatttttatagaatgagttaaaatttgtgttttggagtgattttgtgttgattgaatttttttattgattgtataggttgatgatttttttaggagtgttttttgtttttgtttttgtttttgagatgtagttttattttgtcgttcgggttggagtgtagtggtacgattacggtttattgtaatttttgtttttcgggtttaagcgatttttttgttttagttttttgagtagttgggattacgggtgtcgttattatgtttagttaattttgtatttttagtagagttggggttttattatgttggttaggttagttttaaatttttgattttgtgatttattcgttttggttttttaaagtgttgggattataggcgtgagttattgtatttggttttttttttttttggtttttttttttttttttgagatagggttttgttttgttgtttaggttggagtgtaatggtatgattataatttattgtaattttaaatttttgggttgaagcgatttttttgcgttagttattagaggtattgggattataggtatgggttataatatttagttaggagttttaagagtttttatagaaatagatttaggtggtcgggtatggtagtttatgttttggtataagagtgaggtttagtgatagagtgagatttcgttttaaaaaaaaaaaataaaaagaaatagatttaggtaggttgggtgtggtggtttatgtttgtaattttagtattttgggaggtcgaggtaggcggattattttaggtggagattagtttgattaatatgatgaaatttcgtttttattaaaaatataaaaattggtcggtgtggtggtatgtatttgtaattttagttatttgggaggttgagataggagaaacgtttgaatttaggaggcggaggttgtggtggggtttagtgatatcgttcgttttagttttttaaagtgttgggattataggtatgagttatcgtggtcggttcgtgtttttaattagagaatataaatgggtatttaatattttttgtttgtttagaatttgtgggatatatttgagttttaggtgatagggttataataatgtttgtgtttttgaggttaagttgagttgagaatttatatgttgtggatatgtgtatgtattttttgttttagtaattatgattatttattatttattttttattaggttttttattgaggatttttatttgtattttattttttattttattcgtaattttataagtttggtagtattgttgtttcgttttgcgggtgaggaaattgaggtttagggaggttaagtttatattaagtataattaagggtatgtgtgtgaaggttgggtagggtagaatttgaagtttatttttaaatttataatttaatgtgaatttgatttttttgaataatgattagattataagaatgtattaataaatatttaagggataattgaatagaattttaaaattagagaggaggagttatgtttgtattgtttatttttgtatttttggtatttagtattttagtataggattattgttgggtaaatatttattgaataatgaatggttgttatttacgaaattatgtttatagttttgtgttttagaagtgaggtaaagggttgtttaatgagaatttagtatttttatttaaaaggattttattgtaaagtatttggaagtttaaaagagtgggaatatggggacgtatagggagtggtgaaattggtttagggaaagtttattgtagtaagatagaggttgttaaatcgtaagtagaataagttgaaatcgcgtttgtttggtaaatagtttaaagtggaattgaaatttttatttttgaagtggtgaaaaaaggttttggggtgggggagtggggtagagggttggcgtttgtttgtttgggttagttttggttcgggagtgtttcgagtaagtttggggagatgattgtttttcgttttgatttttaattaatttggggttttggattatgtgtggggaagagggaatgtgtgtggtatttcgtgtttgttttgaattttattttttggaattttgtaatataagtaatggtatttgttttttatcggatataattatttaatcgtagattagtaagtgaaagagtatatgtcgttgggattattttaggttgtaaaatcgcgttattagtttgtttattttttgggaaaatacggtgttttagggacggggattttttaggtaatatgtttagtttttttatgtattaaagtttgaattgaaatttttttagaatgtattttgtttttttaaattagaattattgaatatagtttagttttttattggagattttgggtagatgattattgaatatagtttagttttttattggagattttgggtagatgataattatttattgttatgaggtttgggggtggtggttagaattttatttttttttggttttggtttgattttcgtttttaaggtttagttgttttgttttgggtattgattttgttttagtttttgagtttttcgattattataattattattaagtttttgtttggtatggagaataagatagttaaggtgaagagggattttgttattttttaatttagtagttttaatttttatatagtaatttgttttatgtttggaaaaacgtatgtgaaagggttcgttatagttgttgttggaatggcgattatttgttttaaaagtgtatttgtaggaaatcgttaaataaattatggtttgatcgtgttgaggaacgttatgtggtttaatatgaggtagagttgtttgtggaataacgtttaagagaaattgagaaaagcgagttagtaaatagtaagtttattatttttatttagaaaggatacggtagtgtttcggttttttggttttttgggtttttttagtattaagtgtagattttggtatatagtaggtagaatcgcgagtttttcgttttttttttatttatattttgtagttattttttttgtttttaggttttttttagtagttattttttagattttttagttggttaagtttttttttgttttttatttgtttggttttgtttgttttttgcgttttttttttattaggattttagtttttataagttaggatttggtttttggattttttgtgttggagtggttagggttgttagtgaaagtttatggaatgcgtgggtgaatgaatttaatttttataaaataaagtgagatgtatttattaaaatatgtaggaattagagtattttgatagaaaatttttatgttttgtttatagtttagattgaaaatgttaattttagatattattgtgtttttggaaattataaagaggaagtgggagttaggatatttttttattacgtttcgtttaagagcgtttacgtgtgttatgtaagtcgagtttcgggtttttggttaggaggttataaagtatttggtttagagtttggtttggtgtttatttaggaaaattgttttttatttgaagtagaattttggtagaaatttagtgtgagaatagtttttatttagttttttatcggggagggaagttattgagtttggttttgggagaagggaaatgggaaatgtaaatcggaggaggtttttagcgttttatagtagatttaggtttattttattagtggagaagggaggatgggttgttgaaaatgtagtttggtttaatagtgaagggtgattgagaatattttgggttttgaaaggtaaatatgttagggagtggtttttttaggattttaatttaaattagaggggttagtttagcgaggaaggggtggggttggtggggttttagttagattggtttattttttttttttttattttttgatttttgtaaaataaagtttaaaatttaggataatttagtatgttttggtgtagggaataatataaagagtatagatttggttttcgtttttaagaatttttaagttacgagagagttgtaggatttagaatattgtaggattttttgcgggtaaggttttagtttaggaattgtatattcgtttttgtatttaatttttatattagtttttagaagtattcgatgaggtatttgggaagtgaagggatttgtttagggttaaatttgtgagggatggagttagaatttaaatttaggtcgggtatggtggcgtatagttgtaattttagtattttaggagtttaaggtaggaggattatttgagtataggagtttgggattagtttggttaatatggtgaaagtttatttttataaaaaatataaaaaaaattttatttttatttaagaaaaaaaatttaaatttagatttgtttggttttgaggttggtgttttttataatatttagaataaaattttttttttttttgagattttgttgtttaggttggagtatagtggtgtaattttggtttattgtaatttttattttttaggtttaagtaatttttttgttttagtttgtcgagtagttgggattataggtaagtgatattatgtttagttaatttttgtatttttagtagagatagggttttattatgttgtttaggttggtttcgaatttttgattttaaatgatttatttgttttggttttttaaagtgttgggattatagggatgagttattgtgtttggtttagaattaaaatgtgaaattaacgtgtgttgagttagtaagtaaattataaagatggagatttgggaattagaattttaatttttttgaaggtagatttgggttatggttggaggttggagttgggaaaaatataggttttggagttttaaagatttggttttaaagtttggttttgtttttgttgttgtgtgatttagagttaagtggttggatttttttgtgtttagtattttttgttgtgaagtggagaggatgaagtttattttttaggtttgttatgaggtttaaatgggaataatttaagtatatagaatcgttggtgtggggttggtttttgaggggtagttagtgaatgttagttatgtttatgatacgtagagggttgagtggattttttttttgggtgggggaggaagaagtttggggatagtataaggttaattagatttatttttatttagtttagtttagtgtttttttgtatttttttaattttgttgatttaagtgttttgttgtgaggtagttgtgtgtgaggcgtgaattttgagtttgtgttatagggggaaggagagaaggatgtttatttaatggttgtaagttgtttgttcgttttttacgttcgtgagtttttattttttagtaggtagattcgggaattttttttttttttacgggtatttcgaggaggagttgatttttagagtcggggagtaaatatttaggatttgttgtttaggtacggtatagtttaatttgaatttaggtttggtagttttttggttttgaatttgagttttttattgttatatttgtttttatattggaaatgatttagttttttcgtggaaagaaagaagggtgttatttttttaaaaattaacgattgattaattaatatgaaattatataagtacgtttttagaattttagttaatgtttatttatgttttttttcggtgttaagagttttttttgtgggtgtataattgcgggttttattatagagattatgcggaataaattttagtttgggaatatgatttttgttaggtttttatttgaacgatttttttttggggtattttgtttttattttgttatcgttatggcgttgggtatttattttatgtttggcgtagagattgtagatttttatatggttttataaaaagggggttttagggtgatttttattttatagatgaggaaataaagatataggggtgaggtgtttgttttatgtgataaaattaggagtaaaagagtttatattcggttaggcgcggtggtttacgtttgtaattttagtattttgggaggtcgaggtgagtggattatttgaggttaggagttggagattagtttggttaatatggtgaaatttcgtttttattagaaatataaaaattagtcgggtatggtggtaggtatttgtaattttagttatttaggaggttgaggtaggagaatcgtttgaatttgaaaggcggaggttgtagtgagtcgggatcgttttattgtattttagtttggggaataagagttagattttgtttaaaaaaaaagaaaaaaaaaatttttatatttgtaattttagtattttgggaggtttagacgggcggattacgaggttaggagattgagattattttggttaattcggtgaaatttcgtttttattaaaaatatagaaaaattagtcgggtatggtggtaggcgtttatagttttagttatttgggaggttgaggtaggagaatggtgtgaatttgggaggttggagtgtagtgagttgagattgcgttattgtattttagtttgggtaatagaatgagattttgttttaggaaaaaaaaaaaagtttatattcgtttagattttttttttttttttaagagtttttttttgttatttaggttggagtgtagtgatgtaattacggtttattgtagttttaattttttaggtttaaatggtttttttattttagttttttgagtagttgagattataggtacgtaattatatttggttaattttttattttttgtggagagagggttttattatgttatttatgttggttttaaatttttgagtttaagtaatttttttattttggttttttaaattgttaggattataggcgtgagttattgtgtttggttatttagatttttgttttgaatttttgtttttttttgtgtttttttttttgagagagggttttgttttgttatttatgttggaggtagtggtgtgattatggtttattgtagttttaattttttagatttaagtaagtgattcgtttattttagttttttaagtagttgggattataggcgtatgcgattatatttggttaattttttattttttgtggagatggaggttttattatgttatttaggttggttttaaatttttgagtttaagtaatttttatgttttggtttttaaaagtgttgggattataggtgtgagttattgtgttaggttaaatgtttgtttttgattagtgagtttggttatttttttttagttttgttgtgagttttattttaggttttgtttggtagttcggtattttttatggttcgagattttggtttagagtgattatggatgttttattggagttttaggttagggttaggatatgtagggatgttggggttaaagggatttttaaggaaggtaggtagagaggtagatgtttttgtttttacgttatttgtagtttttgttttagtattggtgaggtgattatggattttgttaggatattggtttattaagttcgaagggaatagtttgttgggagatgttttttttgtattttttaagattatcgtttagtgtttggaaagtagagggcgaattttggtattttatgtatgtatttatttttattttttgagacggagttttattttcgttgtttaggttggagtgtaatggcgtgattttggtttattgtaatttttgttttttgggtttaagcgatttttttgttttagtttttcgagtagttgggattataggcgtttgttattatatttggttaattttttgtatttttagtagagatggggttttatcgtgttggttagattggttttaaattttggatttaaggtgattcgtttattttagttttttaaagtgttgggattataggtatgaatatcgtacgtagtttcgtattttaataggtgattttaggtaataagtaaggattttttttttgagtaaatggaggggttttggttttttgatattggttttatgaggaaggaagttttttttttagatgtggtttggttgggtgatggtttggtttgaattatattttagaggcggaatcgttttgggattcgtttttttttttgatttcgttttttattattttttttttggtttattagtaattttggttatttttgtttttttttaaatttattagatttatttttgttttggggtttttgtatttgttattttatagtttggattgttggtttttcggttttttttgtggattttttttttttattatttcggattcggttaaatgtttattttttagggtgatttgtttttattattacggttggagttttttattttttattttagttattttttttggatttttttttttttttcgtttttatttgtatagtttgaggtggttttttgtgtttgattgtttttttattttttgggtattatgagagtatggtttttgttggtttttggttgtattgtgtttttagttttagaattgtgtttggtttatcgtaggtgtttattaagtgtttgttgagtgagtgaagtaataatttagggttgggtatggtgatttatatttgtaattttaggattttgggtggttgaggagggagtatcgtttgagtttagtttggggaatatagagggattttatttttataagaaatataaaaattagttaggcgtagtggcgtgtgtttgtggttttagttatttaggaggttaaggtaggaggattatttgagtttaagaggaagaggttatagggagttatgattacgttattgtattttagtttgggtagtggagtgagattttgttttaaaaaagaaaaaaaataataaaaagaataatttaatttagtttttataataaatttgtgtgggagtggaatagaatgaaggtggttgtaaattgtttgttattttttttagggagaaggggaggttttttttttaatttgggattttggattgagtttgtgatttattttgattaatagaatttggtggtagaaatgaggttaagtgatttttgaagttagattttaggaagttttttagtttttatttgggtttttaggaatattgttttaggggaagttagttgttatgtgggaagtcggattagtttgagttagttatgtagttaggaagtttaagtagttatgtggtgttagacgagtaagtgtagaagttattttgtatatttagttttagaggtggatgattattggttttagttgtttttatattgtagttatataagggaattttgtttagatgagtttaattaggggattttattgtgggagataagaaattattttaagttattaagttttagggtgttttgttatatagtaatggataattagaataagtatgaatattttttttattttttaaagaaattaaggtattgagaagttaagtgatttatttaaggttatttggtagagtgagtattttggtttagattgtttgtaaggtttgtgttttttatttgtaggttatattattttgaaattaatttatatttgtttttttttgtttttttttttttttataatattggtagttagtattaggttgatagttggttttgagaattttttttttttttattgtaga

SEQ ID NO: 80 - DNA, 19972 bp, Artificial Sequence
  chemically treated genomic DNA (Homo sapiens)
tttataatgagaaggaaagaagtttttaggattagttgttaatttaatattgattattagtattgtaaggaaaaaaaaaaataagaaaaagtaaatatgaattaattttagagtggtgtagtttataaatgaaaagtataggttttgtagataatttaggttagaatgtttattttgttaagtgattttgggtaagttatttgattttttagtgttttggtttttttaaaaaatgaagagaatgtttatatttgttttagttatttattgttgtgtaataaagtattttaaaatttggtggtttaaaatgattttttattttttatagtagagttttttggttgggtttatttgggtagagtttttttgtgtggttatagtgtgaggatagttggggttaatagttatttatttttgaggttggatgtgtaagatggtttttgtatttattcgtttggtattatatggttgtttgggttttttgattgtatggttggtttaagttagttcgattttttatatggtagttggttttttttgagatagtgtttttagagatttaggtggaagttgaaaggttttttaagatttagttttagaagttatttggttttatttttgttattaaattttgttggttaaagtgagttataggtttagtttagagttttaggttgaggagagagtttttttttttttttagaaggaatggtaaataatttgtaattatttttattttattttatttttatataaatttgttgtgagaattaaattagattattttttttattgtttttttttttttttgagatagggttttattttattgtttaggttggagtgtagtggcgtgattatggttttttgtagttttttttttttaagtttaagtgatttttttgttttagttttttgagtagttgggattataggtatacgttattacgtttggttaatttttgtattttttgtagagatgaggtttttttatgttttttaggttggatttaagcgatattttttttttagttatttaaggttttgggattgtaggtgtgagttattatgtttagttttagattattattttatttatttagtaaatatttaatgaatatttgcgatgggttaggtatagttttagggttgaggatatagtatagttaaaagttaataaagattatgtttttatggtgtttaggaaataaagaggtaattaaatatagaagattattttagattgtatagatgaaggcgaagggaagaagaggatttagagaaggtgattaaggtggggggtagagaattttagtcgtggtggtaggggtaggttattttgaggagtggatatttgatcgagttcggaatgatgaaaaggaggggtttataggaagagtcggaggattagtagtttaggttgtggaatagtaagtgtaaaggttttagggtaggaataagtttggtagatttgagaaaaagtaaaggtggttagagttattggtgaattagaaaggaagtgataaaaaacggggttagggaggagggcgggttttaagacggtttcgtttttagaatgtaatttagattaggttattatttaattaagttatatttgggggaaagatttttttttttatgaggttaatgttagagagttaaagtttttttatttgtttagaggaagggtttttatttattatttaaagttatttattaaagtgcgaggttgcgtgcggtgtttatgtttgtaattttagtattttgggaggttggggtgggcggattattttaggtttagagtttgagattagtttggttaatacggtgaaattttatttttattaaaaatataaaaaattagttaggtgtggtggtaggcgtttgtagttttagttattcgggaggttgaggtaggagaatcgtttgaatttaggaggtagaagttgtagtgagttaagattacgttattgtattttagtttgggtaacgagagtgaaatttcgttttaaaaaataaaaataaatatatatataaagtgttagagttcgttttttgttttttaggtattgggcgatggttttggggagtgtagagaagatattttttagtaagttgtttttttcgggtttggtaaattagtgttttggtagggtttatggttattttattagtgttgaggtaaaggttataggtgacgtgaaggtaaagatatttgtttttttgtttgttttttttgggggtttttttggttttagtatttttgtatgttttggttttggtttagaattttagtgagatatttatggttattttgggttagagtttcggattataaagaatatcgagttgttaagtaaagtttggagtgaggtttataatagggttggggaggggtggttaggtttattggttaaaagtagatatttggtttggtatagtggtttatatttgtagttttagtatttttggaggttaaggtatgagaattgtttgagtttaggaatttgagattaatttgagtaatatagtgagatttttatttttataaaaaatgaaaaattagttaagtgtggtcgtatgcgtttgtaattttagttatttaggaggttgagatggacggattatttgtttgagtttgggaggttgaggttgtagtgagttatgattatattattgtttttagtatgggtgatagagtaagatttttttttaaaaaagaaaatataaaaaggagtagaggtttaagataagaatttgggtggttaggtatagtggtttacgtttgtaattttaataatttgggaggttaaggtgggaggattgtttgagtttaggagtttgaaattaatatgggtaatatagtgagattttttttttataaaaagtgaaaaattagttaggtgtggttgcgtgtttatagttttagttatttaggaggttgaggtgggaggattatttgagtttgggaggttgaggttgtagtaagtcgtgattgtattattgtattttagtttgggtgatagaaaaagatttttaaaaaaaaaaaaagaatttggacgaatatgggttttttttttttttttgagatagagttttattttgttgtttaggttggagtgtagtggcgtaattttagtttattgtattttaattttttaggtttatattatttttttgttttagttttttaagtagttgggattataggcgtttgttattatgttcggttaatttttttgtgtttttagtagagacggggttttatcgagttagttaagatggttttaattttttgatttcgtgattcgttcgtttgggttttttaaagtgttgggattataggtgtgagggttttttttttttttttttttagataaagtttggtttttgttttttaggttggagtgtaatggagcgatttcggtttattgtaattttcgttttttaggtttaagcgatttttttgttttagttttttgagtagttgggattatagatgtttgttattatgttcggttaatttttgtatttttagtagagacggggttttattatgttggttaggttggtttttaatttttgattttaggtgatttatttatttcggttttttaaagtgttgggattataggcgtgagttatcgcgtttggtcgaatatgggtttttttgtttttgattttgttatatgggataagtattttatttttgtgtttttgtttttttatttgtagggtgggaattattttagagttttttttttataaagttatgtgagggtttgtagtttttgcgttaagtatggagtgaatgtttaacgttatgacgatggtagggtggaaatagagtgttttaggaaggagtcgtttaggtaagggtttagtaggaattatatttttaggttgaaatttgtttcgtataatttttatggtggaattcgtagttgtgtatttataggaaaggtttttggtatcggagaagaatatgggtaaatattaattggggttttggaggcgtgtttgtgtggttttatattagttagttaatcgttaatttttagggaaatggtatttttttttttttttacgggagggttgggttatttttagtgtggggataggtgtggtaataaagagtttaggtttaaagttaggaaattgttagatttaagtttaagttggattatgtcgtgtttgggtagtaggttttgggtgtttatttttcgattttgaaagttagttttttttcggggtgttcgtggaggagaagggagttttcgggtttgtttgttggaagatgggggtttacgggcgtggggggcgggtaggtagtttgtagttattgagtaggtatttttttttttttttttttgtagtataggtttagggtttacgttttatatataattgttttatagtaaagtatttgggttagtagggttaggagagtatagagaagtattaggttgggttgggtggaagtaggtttggttggttttgtattatttttaagttttttttttttttatttagggaggaagtttatttagttttttgcgtgttatggatatggttaatatttattagttattttttaagaattagttttatattagcggttttgtgtatttggattgtttttatttaaattttatagtaaatttaggaggtgaattttattttttttattttatagtagaggatgttgggtatagaagagtttagttatttggttttaggttatatagtagtaaaggtagagttaggttttgaagttaggtttttgggattttaaggtttgtgttttttttaattttaatttttagttatagtttaggtttgtttttaaggaggttggaattttgatttttaaatttttatttttatggtttatttattgatttaatatacgttgattttatattttgattttgagttaggtatagtggtttatttttgtaattttagtattttgggaggttaaggtaggtggattatttgaggttaggagttcgagattagtttggataatatggtgaaattttgtttttattaaaaatgtaaaaattagttgggtatggtgttatttgtttgtaattttagttattcgataggttgaggtaggagaattgtttgaatttaggagatggaggttgtagtgaattaagattgtattattgtattttagtttgggtaatagagttttaaaaaaaaaaaaaattttattttgaatgttgtaaaaagtattaattttaaagttaaatagatttgggtttgaatttttttttttaaataaaggtgggattttttttgtattttttgtagagatgggtttttattatgttggttaggttggttttaaatttttgtgtttaagtgatttttttgttttggatttttaaagtgttgggattatagttgtgcgttattatgttcggtttgggtttgaattttgattttattttttatagatttgattttgggtaaatttttttattttttagatgttttatcgagtatttttgggggttgatgtgaaggttaaatgtaagaacgagtgtatagtttttaagttaggattttgttcgtagggggttttgtagtgttttagattttgtagttttttcgtagtttaaagatttttaggagcgagggttaggtttatattttttatgttgttttttgtattaaagtatattaaattgttttggattttaaattttattttgtaaagattaggaagtaggaaggggagaggtgggttagtttggttaaaattttattagttttatttttttttcgttgggttggtttttttgatttagattaggattttggaaagattattttttggtatgtttgttttttaaagtttagaatgtttttaattattttttattgttgaattaggttgtatttttaataatttatttttttttttttattgataagataaatttgggtttgttgtaggacgttggaaatttttttcggtttatattttttatttttttttttttagagttagatttagtggttttttttttcggtggggggttgggtaggaattgtttttatattgagtttttgttaaagttttgttttaagtgaggagtagtttttttgaataaatattaggttagattttgggttaaatgttttataattttttgattagaaattcgaagttcgatttatataatatacgtaaacgtttttgggcggggcgtggtggggggatgttttagtttttattttttttttatagtttttagaagtatagtgatgtttggagttgatatttttaatttagattgtaggtaaaatataaagattttttattaaaatattttaatttttatatattttaataaatatattttattttgttttgtaaaaattggatttatttatttacgtattttataagtttttattgatagttttggttattttagtatagggagtttaagagttaagttttggtttgtgggagttgaagttttggtgaggagagggcgtaggaaataagtaaaattaagtaagtgagaagtaggaggaggtttggttagttgaggggtttgaagggtgattgttaggaagagtttggggataggaggagtggttgtagggtgtaggtgaggggagagcggggggttcgcgattttatttgttgtgtgttaggatttgtatttgatgttgggaggatttaggagattagagaatcgggatattgtcgtgttttttttaagtgggggtaatagatttgttgtttgttaattcgttttttttagttttttttggacgttattttataggtagttttgttttatgttaagttatatagcgttttttaatacggttaggttatggtttatttaacgattttttataaatgtatttttaggataagtgatcgttattttagtaatagttgtggcgaatttttttatatgcgtttttttaaatatggggtagattattgtgtagaaattagaattattgagttagagggtaataggatttttttttattttggttattttgttttttatgttaggtagagatttagtggtgattgtggtggtcgaggggtttaggagttggggtagggttagtgtttagagtaggataattggattttgggggcggaggttagattaaggttaggagagaatgaaattttggttattatttttagattttatgataatgggtggttattatttgtttagggtttttaatgaaaggttaaattgtgtttagtaattatttgtttagggtttttaatgaaaggttaaattgtgtttagtagttttgatttaaggaggtaggatatattttagaaagattttagtttaagttttgatgtatgagagaattggatatgttatttaggaaattttcgtttttggaatatcgtatttttttaaagagtgagtaagttaatggcgcggttttgtagtttgggatgattttaacggtatgtgtttttttatttgttaatttgcggttaggtgattatgttcgatggaaagtagatgttattgtttgtattataagattttagggagtaaagtttaagataaatacggaatgttatatatatttttttttttttatatataatttagaattttaggttagttggggattaaggcgaggggtagttatttttttaggtttgttcgggatattttcgaattaagattaatttaggtagatagacgttagttttttgttttatttttttattttagggtttttttttattattttaaagatgggagttttaattttattttggattgtttgttagataggcgcggttttaatttgttttgtttacggtttggtaatttttattttgttgtaatggattttttttgagttagttttattattttttatgcgtttttatgtttttatttttttaaatttttaaatattttgtaataaggtttttttgagtagaaatattgggtttttattaagtaattttttattttatttttggagtataaaattgtaaatatggtttcgtaaatggtaattatttattatttaataaatatttatttaatagtgattttatgttaaggtgttaggtgttaggaatgtaaaagtgaataatataaatatggttttttttttttgattttaaaattttatttaattgttttttaaatgtttattaatatatttttatggtttgattattatttagggaggttaagtttatattaagttataagtttgaaagtgggttttaaattttgttttgtttaatttttatatatatgtttttagttatatttaatgtgaatttgatttttttgagttttagtttttttattcgtaagacgggatagtaatattattaggtttatagagttgcgggtaggatgaaaggtgaaatgtaggtagaagtttttagtagagggtttgatggaaaataggtgatgaataattatgattattggagtagggaatatatatatatgtttataatatgtaaatttttaatttagtttgattttaggagtataaatattattatagttttgttatttgaaatttaagtgtgttttatagattttgggtaggtaggaagtattgaatgtttatttgtgttttttgattaaaaatacgggtcggttacggtggtttatgtttgtaattttagtattttgggaggttgaggcgggcggtgttattgggttttattataattttcgttttttgggtttaagcgttttttttgttttagttttttaggtagttgggattataggtatatgttattatatcggttaatttttgtatttttagtagagacggggttttattatattggttaggttggtttttatttgaggtgattcgtttgtttcggttttttaaggtgttgggattataggtatgagttattatatttagtttgtttaaatttatttttttttgttttttttttttgagacggagttttattttgttattaggttttatttttatgttagggtatgagttgttatgttcggttatttaaatttatttttatagaggtttttaaaatttttagttggatgttgtggtttatgtttataattttagtgtttttagtggttgacgtaggaggatcgttttagtttaagagtttgaggttgtagtgagttatgattatgttattgtattttagtttgggtaatagagtaagattttgttttaaaaaaaaaaaaaaaaattaaaaaaaaaagaggttaggtgtagtggtttacgtttgtaattttagtattttgggaggttaaggcgggtggattataaggttaggagtttgagattagtttggttaatatggtgaaattttaattttattaaaaatataaaattagttgggtatggtggcggtattcgtaattttagttatttaggaggttgaggtaggagaatcgtttgaattcgggaggtagaggttgtagtgagtcgtgatcgtgttattgtattttagttcgggcgatagagtgagattatattttaaaaataaaaataaaaataaaggatatttttaaagaagttattaatttgtataattaatagggagatttagttagtataaagttattttaaaatataggttttggtttattttgtaagaattttttaggtaaataagaaaaagtaaatttttgttttagatatatcgttaatagtgattatttgtaggggtggtatattaggggattattatattttttttttttttttttaatatttgtttatggggtattaagttttttttgttttttggggagtttttttttagacgaagtgttattttgttatttaggttggagtatagtggtgcgatttcggtttattgtaatttttgtttttcgggttaaagtgatttttatgttttagttttcggagtagttgggattataagcgtgggttattaggtttagttaatttttgtatttttagtagagttagggttttattatgttggttaggttggtttcgaatttttgtgtttaagtaatttgttcgttttagttttttaaagtgcggagattataggcgtgagttatcgtgtttggttaatttttaaagaaattaaatatttaaatgaagttagagttttcgtttattattatttttattttgttttgtttatttaggtagtaattatttttatattaaggagaattttttttttagtatatttttatatattttttatggagatttgtttatttatatataatataaagttttgtatagtttttatggttttatatggtgtagagtgttggatattttttttttttgatatattgtttttgagatatattatttgtataggttgagttaatgatttgtaattgttatatgtagaggattatttttttttataattgtaatataggtgtttatttattttttaatggagttcgagttggtttattttttaagtttttattgatataaaagaagttgtaatgaatatttttgtatggtgtttatgtatatttgtagtgttgtttaggatggagtgtagtggtaagattaaagtttattgaagttttaaattttttggtttaagtaatttttttgttttagtcgtttaagtagttgtgattataggtgtttattattatgtttagttaatttttttaagtttttgtagagatggagttttgttatgttgtttaggttggtttcgaatttttggggttaagtaatttttttattttagtttttgaaagtgttgggattatagttgtgagttattatatttagttttgggaaatttatttttaattgtttgttagttttttttttagtttagtgttttatattgtaattttagtattttgggaggttaaggagggaagattgtttgagtttagaagtttaagatttagtttgggtaatatggtaaaattttatttttataaaaattataaaaaattggttggttgtagtgttttaattttagtattttgggaggttagggtaggtggattatttgaggttaggagtttaagattagttagtttggttaatatggcgaaattttatttttattaagaatataaaaaaattagttaggcgtggtggtgggtatttgtaattttagttatttaggaggtttaagtaggagaatcgtttgaatttaggaggtggaggttagagtgagttaagattatattattgtattttattttgggtaatagagtaagagtttgttttaaataaataaaataaaataaaaaatataaaaattagttaggtgtggtggggtatgtttgtagttttagttatttggaagattgaagtaggaggataatttgttgattgagtttgggaggttgaggttgtagtgagtattattatattttagtttgggtaatagtgagagattttgttttaaaataaaaataaaaatagaaagagagggtaagaataaagatgtaagttttaatttattttaaatttttattttattttattataatttagtttatttttttaggaaataaattgtaaatataatagtatttatattaaatggagtttgattattaagatattgtaagtttatagcgttattgttattttagtttttgtttaaggttgtagttaatatggaggtattagtggttatgaagttagtattgtttgtggttgtagaagttttattttatttggtttttatagtaattcggtgatgtagatggaattttattttttatatttttttttttttttgagatggagtttcgttttgttatttaggttggaatgtagtagtgtgatttcggtttattgtaatttttgttttttaggtttaagtgatgtttttgttttagttttttaagtagttgggattataggtgcgcgttattatgtttagttaatttttgtatttttagtagagatagggttttattatgttggttaggttagtttcgaatttttgatttcgtgattcgtttgttttagttttgtaaaatgttgggattataggtgtgagttattgtatttagttattttattttattttatagatgaggtagttgaggtgtagagtttattgttgtatgtattattttttttttttgttgagttagtaataaggttatattgtaaatagtttagggggttttaagaggtttagttttagtacggcgttattagagtagaatgttttgtggtttttggaaagggttaaatgagatttgaacgtatttagaatgataatttaggtatattgtttagtgagacggcgagttttagaatataagtggttgtattttatttatgttaaaaaaaaaaaaaagtttggtgtgtttgtatttttttttttttttttttgttgtaggtatttgtaaatgtaaataaaatgtttataagagatatatttatttgtttatagtgtttttggagggagtaaaatggggtatttagagaggtttatttatttatttattttttaagagatgggtttttgttttattgtttaggttggagtgtagtggtataattatagtttattgtagttttatatttaattttaagcgatttttttattttggtattttaaagtgttggaattataggtatgaattattttgattgattatgtttagagagttgtaagttagttttttgtaattttatatagtgggtatgtgttattttaatgattttaaaaagtttgataaagaaaagtagttatagggaattgattcggtttttttagtttatatttatagagtaaatttggagaataggatgtgttatttatgggtttgggtgtatatttggatttagttgttttatttgtatgtgataaaggataaagattttaattagattttgtggttagaagggtttttagggcgatggttgttttttgaggatatttttgagatagggttttgttttgttgtttagattaagtgtagtggtttaattatagtttattgtagtttcgaatttttaggtttaagtgatttttttatttcggttttttatatagttgggattataggtatgtgttatcgtatttgattaatttatttttttagtagagattagatatagggttttgttatgttgtttaggttggtttcgaaattttaggtttaagggattattttattttagttttttatatagttgggattataggtatgtgttatcgtatttaattaatttatttttttagtagagattagagatagggttttgttatgttgtttaggttggtttcgaaattttaggtttaacggattattttatttcggttttttaaaatgttgggatttataggtatgagttattgtatttggtttttgttagattttttgatgtttaagttttttaagtatgaatttgtataggttgttaagggagttatagttgttgtttttttagtttgtgttatgtaaaagattttattttatttttttaaaaatttttttgtaaatgatttttgtaatattttttaaaattatacgtatgtgtttttatttattatttatatttagatttgtagttatatttagggttagattagtaggtgtgttgttgaaagtagttggttaggagttagttttatagtattttaaattagtaatagttttagaggatcggtggtttttttgtttttatttagagttataatatattatggaatgttttggttaggggtttatttttggaagtttagttgtgaattttaattatgttattgattttggtttttaggtgagttattaaatttttttgtgatttagtttttttatttgtaaaatggagaattatagtttttttttattgaggttgttgtaaaaattattttaaattgtaaaataggtagacgtttagaatagtgttgtataaaggttgtgtagataggataggagttgtgattaattatgaagtgattggttgatgagggtttgtgtgaatttaatttttagagcgtttttttatttataggagaaaaagtttaagttagagaaggtagttaatatgtattggtataaataaaataaatttttttataattaattttagtttttgtgaagtttagaattttaattaaatttaaagattaaaataaaaaatattttaaagtattattgattgagtaattaataaatggattataggaattagttttattttggaaagtttttttttggtttggtcgaagtcggcgttggaagtcgtagatattttttggggtcggttttttggggtcgaaggttttttaggattttttatttttagtaatggaagtagtcgagcgtggtttcgtttatggtgaattggagaacgtggttgtaaattattttttttttggtttttttttttgaattttttggatgagggtatgagttagggggtaaaggggatgattaaggaaaagataggaaagtttttgtaaagagggatttggtcgcgttttttgagtgggtgagggtggggattttgcggagattcgaaagtaaggattatggggagaacggaatttcgagagttggttttggaaaatagatcgaggttgggcgaagacggagagggggtttaagttacggggaaatgggacggggattgttagaggcggcgaaggggttaaaatgtttgtaggagaggagggggtagatgtgtttttaggttagtttttgtaaatttttcgagttttagatgagtatattaaggtttacggcggcgcggggtttttttaggggtttgcgggggattcgggtcggaaaataaagcgcgagttcggtcggtgggtttatttggttgtagaagatttcgggttgttggttgggggtaggtacggtttgggtggcggcggttgataagaggcggcggtttaggcggggttcgaagcgggcggtagcgcgtaatatcgtagcgggttagcggatagcgagcggatcgagagtagagttagggttttagggttattgagtcgatttcgtttttcgtttcgcgcggtagttaatggaaaggcgggggcgggtcgggggcggggttgtttttattatttttcgggatggggcgcgtagttgatgtaagcgaagcgggtggcgttaggtattttcggttcgtggttgttttttggttcgcgcgacgttttcgcgttcgttatcgtttttcgtttgtgcggaaagattcggtttcgcgaacgtagttcgttttggttgagtttttaatgtgtgtttttgattttaatgtgaataggttcgagttagggcgattttgattttttcggttgatgttttaggtgaagagatcggtcgtaaatttaaaagcgagattatttcggaggtgaaggagatgaacgaggtgatatggatggggtagacggtattgtttttataagtattatggttaggaaatgataagtgagatttgaatgatgatagggaatagtaagggtaaaggttaggagatgagattatttggtacgtgttagagaaatggaaagaatgaatggagtttagttaataaggagagaggcggttagggtaagggtagggacggttttggaagtagcggtttagagtttagaataggatgatttgtatgatttgtttatttttttttttttttttttttttgagacggagttttattgtgtcgtttaggttggagtgtagtggtacgatttcggtttattgtaagttttgtttttcgggtttatattagttttttgttttcgttttcggagtagttgggattataggcgtttgttattacgttcggttaattttttgtatttttagtagagacggggttttatcgtgttagttaggatggtttcgatttttttattttatgattcgtttgtttcggttttttaaagtgttgggattataggcgtgagttatcgcgttcggcggtgggattttgattttaatattagattttattaaagtcgttttgggggtttagtattattttatataaattagaggaagaaaaggtatgggggtggtttatgggaggtttttgtgggttgagtttgttcgtttggttggattttaattatataattatgtttttatgtaaaagagtttgggaaatgagtggtttttgtgttaggaagaagggaaataggtttggagattagttgtagagataatttgataattaagatttttttttttttttgaatttagttatgtaggttttattttttttttttaatggcgttttgttttttttttttagatggggttttatttttgttgtttaggttggtattatgtgggtttattgtaatttttattttttaggttttagcgatttttttgttttagttttttaagtggttgggattataggcgtatgttattatatttggttaatttttgtatttttagtagagatggggttttattatattggttaagttggtttcgaatttttgattttaggtgattcgtttatttcggttttttaaagttttgggattataggtatgagttatcgtgttaggtatttttttttttttaatattgtgtgtggagatcgttttgttatagtatataaggattatgtttttattttttttaatagttttatggtatttttttggatatatgaggtagttttattttatgaattttttatgatggatatttaggttgtttttaattttttgttattataaataatgttataatgtatgtttttgatttgtttaagaaattaatagaaatgaggttggtattatgattcgtgtttgtaattttagtattttgggggggaagttgaggcgggtagattatttgaggtgaggagttcgagattagtttggttaatatggtgaaattttatttttattaaatatatatatatatatatatatatatatatatatatatatatatatatatatataattagttaggaatggtcgtagtgtttgtaattttagttattttagaaggtgaggtaggagattgtttgaatttgggagatagaggttgtagtgagttaagagttgagatcgtgttattgaattttagtttgggtgatagagtgagattacgttttaaaaaaaaaaaaaaaagaaaaaaaaaaagaaaaaaaaaagaaagaaaagaaaagaaagaaattagtagaaatggaataaagaatatttataatttaaatatagatatattattttttaaagaagtttaatttatgttttattatttgttatgtttgagtttttttatatttttattagtagaagttttaggattttttttttagttttgttaatttgagagacgaaaaagtggtattttattattatattaatttgttttttttttacgagtgagtttgagtatttttgtttagatgaagttatgtatgttttttttgttatgaattagttgtttatgtttttggtttatttttttattggattgttggtttttttgaaattgatttgtaggtgttttatatgtatttaggtaattaatattttgtttattatatatggtataaatatattttgttagttatttttttattattaagtaattgtaagtagttatttttgaattattgtatattttgtgttattgatttttgtatgcgtgtgttagtatgatattgtttttattattgtagttttttaagtttttttgttttttttttttaagattagggtttcgttgttatttaggttggagtgtagtagtataattataattcgttgtagtttcgattttttaggtttaattgatttttttattttagttttttgagtagttgtgattataggtgtatgttattatgtttgattgatatggttttattgcgtttttatttaaattttatttagaattgtaatttttataatttttatatgttatgggaagaatttggtgggaggtgattgaattatgggggtaggtttttattgtattgtttttttgatagtgaatgagttttacgagatttgatggttttaaaaacgggagtttttttgtataagttttttttttgtttgcggttatttatgtaagacgtgatttgtttttttttgttttttgtcgtgattgtgaggtttttttagttatgtggaattataagtttattaaattttttttttttttttttttttttgagatatagtttagttttgttatttaggttgtagtgtagtggtgttattttggtttattgtaaatttcgttttttagatttaagcgattttttttttttagttttttaagtagttaggattatagacgtgttattacgattggttaatttttgtattttttagtagagatggggttttaatatgttggttaggttagtttcgaatttttgattttaggtgatttatttgttttggttttttaaagtgttgggattataggtatgagttatcgtatttggtttaaattttttttgtaaattgtttagttttaggtatgtttttattagtagtatgaaaacggattaaggtattagttaattttttttttttttttttgtagagatagggtttttttatgttgtttatgttggttttgaatttttgggtttaagtagttagtttattttggttttttaaaatgttgagattataggtatgtgttattatgttcggtagttttttaagttttaatagtttgtattaatattttttttaattaagattttttagtttggaagtgatgaggttgtatatgtgttttcgagggatttttttgagaattgtatggaaatttagttgtagtggggaggtaggttagaggtagagagatgaggagggtttagttggtagaaagagtgtgaaggtggaattgataggtagttgtgtggagatgagggcgagaggagtggagtgggtgttgaggtttttattatgtgttattttttaggatgggggagttaggagtagtagtaaatttggttgtggggaggggaaggagaaaatgagttgatttatttatattcgtatatatcgatataatgtgggtaacgtgtttcgtttttgttggtgtgcgtggtgtgtgttttagtgtaggatacgttggtttataggttcgtttattttggtttgtttgtggtttgtggtgtttattataattttaattagtagtttttttatttttggtgttttattgttggtgtatttgttttatttatgttttgttttttttttttatggaaattttttttattaagatttagtttaagttttattttttgggaagttttttgtgattatagtagttttttttagttgttttttttttttttttttttttttttgagacggagtttttttttgttgtttaagttgtagtgtagtggtattattttagtttattgtaatttttgttttttgggtttaagcgatttttttgttttaagttttttaagtagttgggattataggtatgtattattatgtttggttaatgtttgtatttttagtggagatagggttttattatattagttaggttggttttaaatttttggttttaagtgatttatttaagttagttttttaaaatgttgagattataggtgtgagttattatatttggttttagttgtttttatatagtttttaattaaatattgtagattaagattatttggatgtgttgaaacgttattgtaattatggttttttgtggtttagtttttttaaagaatgaattaaaatttaatttttaatttagattttattttgatagtttgaggttttttttttttttacgtttttttttatttgttttttggttttttatcgttttttgtttgtgggtttattggtaggaatggggtcggtagaagtataggtatttttatggtgttgagattttcggtggaagtattttaagttatttaattttttttaagatatttaaatttttagtttttaattattttgaaattttttattgttagggta

SEQ ID NO: 81 - DNA, 8467 bp, Artificial Sequence
  chemically treated genomic DNA (Homo sapiens)
  unsure 747: n is a or g or c or t
ttagtgttttgttttgttatttaagttggagtatagtggtgtgattatgatttattgtagttttgattttttaggtttaaattatttttttattttagttttttgagtagttggaattttagttatgtattattatatttgggtaattttttattgtttattttgtgtagagatagagttttgttattttgtttaggttgattttaaatttttggttttaagtgagtttttcgttttggttttttaaagtgttgggattacgggtgtaagttattgtatttggtttttttgtttgagtttttaaagttttgggtttttttttagaattggggttttattgtgttgtttaggttggttttaaatttttaagtttaagtaattttttttttttagatttttttattttagttttttgagtagttgggattataggtgtgtgtttagaaaaaatattgataggggggtgtttagaaaaaattattgatatatatattagtatatataggtgatggtttatatttgtaattttaatattttgggaggttgaagtaggaggattgtttaagtttagaagttcgagattaatttgggtaagatatgagattttttttttaaaaaaattaattttattaagaaaatttggtttttcgggtatatatttgtttttttaggtatttaggagtttgaagcgggagattgattgattttaggatattgaggttgtagtgagaagttttttattttttntttgtttttagtttggatgatagagtgagatttttttttagaaaataaaaattatattttttttttaaaaaaattttttgaattttttatttttatattttatatatttggaagagttggaataatttttatataatgttattgttttagataatagatagattttaaatttttttgtaagtttagtagtttttagtttttagttgattattaattttaagaataaattttaaagttaatgattttgaattttatttgagaaaaatacgaaggtattgtaaattatgaatattgttattataatagtaattgtatagtgttttttaatttttagattatttttatatattgttttatattattttaggtttataaattaaatttatttttgaaaatatgagtattatagtttaaaaagttgttaaaaatgaaaaagattagattatttaagtagagatgtttaagtagtattaggggatatttttattagcgtagtgattttaaagttttggtttgtaatatttgattgatgtgtttatttaataaatatttattaaggatttaattttagtgttaggttgtttagattaggaaatttgttaggtttttagtgagaaaattatattttgtatatgaagaatgtgaggatatttaggtttaaaataaaatttaatttgtaaattattgttaagtgaaaggttttgttaaaatgggtaggaataggattttgagtaatttttttttttttttttgtgtggatggttttttggttttttattgaaggagttgtaatagtagtaaatatattattgtttaggaaataaaaataaatgtggtgtgtgtgtgtttgatgtattaatagttttagaggatagattaagagttagtattttttaaagattttttttttttttttttttttttttttttgtttttggagagcgagttttgttttgttttttatgttggagtgtaatgttgtaattttggtttattgtagtttttgtttttaggtttaagcgattttcgcgttttaattttttagtagttgggattagaggtgtgcgttattatatttggtttttttttttttttttttttgtatttttagtagagataggggttttattatgttgtttaggttggtttggaatttttgagtttaggtaatttatttattttcgttttttaaagtgttgggattataggtgtgagttatcgtattcggtatttgtttttattttggaggttgtgtttaagaagagtattgttaatggtgaaattaagttaaagtaataaattgataattggatgatttgagggagaggttagtgaaggattttggattatatagtatgggtttttaaggatttttttttttaggagatttggaggtggtagaaggggatttagttgttttttttttttttttttggttgtttggggaaggaaatgtggaaaaggagggggttttagtggtatttaagtttggttttaagtaagttgtgaggtaggtagtttttttttggattttttatttttttagtaatgattttattttttttttatttttttttatttttaaatttgttttttaatatatatttatttaagaggtgttttttttttggtattttttttgttttttgtggtatttttgtttttttgaattttattttgaatttgtaaattggttagtattttttgtgatttttgggttgtttattgggtagtgttgataaatattttaagaagtttatatgttttttaaatttttttagaattagatttttgggtttttgataaatatttattaatataagagtgaattttgatagtaatttttatggggttaatatttcgatttggtgtagtaagaagaaatttattttggatttgtatagagttggattttagttttagtttttttatggggaagttttacgatttttttattagtttttttatttgtataatggggatgataaaatttattttgtatgattgttattgagatatttgataaagtgttatatattattttttagtttaatttttgttagttttttttttttttgtagggttattatgagttttatgtgagaaagtaaatgtgaaagggttttgtaatttataaagttttttttatatgttggattttgttaatgaaaaataatatattaataatttaataataagggtggaaggagggagaggattaggaaaaataatttatgggtattaggtttaatatttgggtaatgaaataatttatataatatatttttatgatataagtttatttatgtaataaatttttatatgtatttttgaatttaaaagttaaaaataataatttaataataaaagtatagataggtaagaggaatagttagatatttaaaaggtagatattttggaggagatttgttttttttggggaagggttttattttgttgtttaggttggagtagtggtgttatgatcgtttattttagttttgaatttttggttttaagtaattttttattttagttttttgagtagttaggattaacgtttgtgttatatgttcggttaatttttaaaaatattttgtagagatagagtttattatgttgtttaggttggttttgaatttttggttttaagcgatttttttgttacggttttttaaagtgttgagattataggtgtgagttttgtgtttggttagaggtttgttagttttattatttatgaattaatttaatagatattacgattatatttttaaaataaatattaggaattatgatgtgataagttaaaatgtattggttggggatagaattttttaaatagaaattgttttataaaatttgagacgtatagtttttgtatttaaatgattatttagtgattttggaaatttatagtgttgttcgttattaatttttgatatgttttaattttgtttgtaatggataataataaaataatatgtgagtgtggttttaggtattttgagtttgggtattgttgtttttatttgaggattaagatttatatattttagtagtattgaaaaagtgaataaattggtatagagtgttagaaaatttgattagaatatattatatatattttaaatttgaaaattatattttttaatattgcgttggtgagttggtaggtaaaggaaaaaatattgagaaagatagtagtttttagaagagaaataattttaaaagaaatgtttaaattgttaattattttttgtttgttaaagtttttattggaggtgtatggaagtttggtgagaagaatgaatttttgtgtaagattttttagttgatagatttgtgagtgtttttgggtggttgttttgttttatagaaggtattttgttttttgatatttttttttgtggtttttgtttttcgtattttgtatgttaggtttttgtttttattaatatttgttattaatagtatttatattgtttttttagaatttatttattttgagatagggtttcgttttgttgtttaggtttgagtgtagtggtacgattatagtttattgtaagtttggattttcggggtttaggggatttttttattttagtcgtttaagtatttggggttataggcgtgtgttattatatttggataattttttttttttttgagttttatttttgttatttagattggagtgtaatggtatagtttcggtttattgtaattcgtttttcgggtttaagcgatttttttattttagttttttaagtagttgggattataggcgttcgttattatatttagttaatttttgtatttttagtagagacggggttttattattttggttaggttggtttcgaatttttgattttaggtgatttgttcgttttggttttttaaagtgttaggattataggcgtgacgatcgcgttcggtttaatttttattatttttattttatttttttatagatacgggatttttttttgttgttcgtaaatttttgggtttaagcgattttttagttttggtgagagttatagcgtttagtttttttttaagaatttaaaaagtagttttagattataatattatttatttcgtttatagtttttttgttttttattgttattttttaaaaagtattatataattatagaaacggtggtttagtagtgaagtaattattaaagatttttggtattttaattttttgttttttttaggcgataggattaagaatgggattttaggatgtttatatgtaatgatgaattcgaaaatatttgtaaagtgttacgtaaatattgattacgaagaaggaagtttttttttcgtttggagattgtgtggggtatggcggggtggtggggagaatgtggtgttttgttttatttttttggcgaggggagggtttggtttggatcgtagaggaatcgagtgattgtttttaaaattttttagaatcgatttcgcggtttcgtttttttcgcggtttcgtttttttcgcggttcgttagtttttgtcgcggacgtgcgttcgttatttatgttttttcgagtaggtttggtcgcgtttttttcgttttttcgtagttttcggtttttttttgtcgtcgttatgagtattggtattttcgtcgtgtcgtagtcgtttaattatcgcggcggggttcgcgtggagtcggcggacgttttcggtatcgagaaagttttcgagttagtaatcggtaattgtaacgagtcggggaggttggggcgttttggggtcggatgcgcggatttttcggttagttttcgttttttgtgttttgtagcgttgatttgagtataagatagtgatagtggagagtttaaggttgtgtgtgtaggtaattagcgattttggggtaacgcgagtgttttcgggtagggatgggtagggaggaaaagtaaagttgatgagttgcgtggtaggatcgtgagttgttttattcgggttagaatagagttcgtaaagtattggtgggggaagtcgtgtttttgttaatttttttttttgtttgttttgtttgtttgtttgttttttgtttgttttgagatagggttttattttgtcgtttaggttggagtgtaggggtattattttagagtttattgcgttttttattttacgggtttaagtgtttttttcgttttagtttttttggtagttgggattataggtttttattattatgttcggttaatttttgtatttttagtagagacgggtttttagtatgttatttaggttggtttcgaatttttgagtttaggtgattttttcgttttagttttttaaagtgttgggattatagtcgtgagttattaagtttagttaattgtttttttttttaaaattaggattgatgtattattgtttttaaatgtgtgtataggagaggaattttaaaagaacggggcggggttgtggggaagataattatttgtgttgggaatgaaggaacgtttatagatagtttttaatgattacgaatgaggattttgtttttatattttaatattaaaatatttttgtatattaattagaattgggaaaggaaaaaattttatttttatttagtatttttttttttagttttattgaagtataattaataaataaaaattgtatatatttaaggtgtaaaacgtgttgtaatgtatgtatattttgtaaaatggttattacggttaatttaattatttattgtttttgtatagttaatggttttttttggatagtgaaatatttaagatttatttttttagtaaattttaagtatatgatgtagtattggtaattatagttattatggtttacgtgagttttttataatttatttattttgttgaaataaaattttttaatttagtgtttaatgtgtgttaagtattgtgttaggtattggatttattttgggaattttgaaggttatagagataaggaagaaggggttttttgttttggttttgtgttgtgtttattttgttgggttttatggaatatatgtggggagaaaaatgtaaatattttgtgtaaaatgtagttagagtaataaaattgatttgtaggggattggagaatttagtatttgattatttatattaaattatagagtagtgatttggtagagttagaaggtattattatattttttttttatataggaggaaatagtttttttatttcgatttaattttgatataaaagaaagaaaaattgttttttgttttaattgtttatagtgtgtgtgatttttagttatcgtttttattagttggttatttaagtttgtaatagaaattgtagatttgtgaaatttttttggaaagagttttaggagtttttgtgaagaggatttgttgagttggtaaatttaaagaatttttgttggtagaggtagtatagtttttgggttatgggtttagaaaaattgattgttttataatttgtattagaatagggagagggaataaaggtggaataagaaaaggaaatttgggaatttttgagaaaaaaaaaatgtttttttagggttgttttattttgatattattgtttattaattatatttattaagtattaagtagtatgatataatttatatagaatatagataagggatttatagttagagtttataatttaatagattgattatttttgatttttattttataagatttttgagattttgagataatgtttaggagtgttgtaaaatttaattagaagttaatgttagtaaatttaattgtaaaatagtagagggtaggggtttttaattttaaatttttgatgagtttagggtaggggatatgatatttttgtaattttgttatatgtttaagtagatttttttggagagaggtttgtaatttttattagatttttaatgttaatgatcgtaaaatatagttaagaattgttaggtcgggtgtggtggtttatggttgtaattttagtatttggggaggtagaggtgggtgaattatttgaggttaggaatgtaagattagtttggttaatatgatgaaatttcgtttttattaaaaatataaaaattagttgtgtgtggtggtaggcgtttgtaattttagttattcgggaggttgaggtaggagaattgttggaatttaggaggtaaaagttgtagtgagttaagatcgtgttattgtattttagtttgggtaataagagcgagatttcgttttaaaaaataaaaaaataaaataaaaaaatttgttagtatagagatggttattaaattaaattatatataaaaataagaagttacggtagtttacgtttgtaatttcggtatttcgggaggttgaggcgggtgggttataaggttaggagattaagattattttggttaatatggtgaaattcggtttttattaaaaaatataaaaaattagttgggcgtagtggcgtgtattggtagttttagttatttaggaggttgaggtaggggaatcgtttgaatttaggaggtagaggttgtagtgagtcgagatcgcgttattgtattttagtttgggtgatagagtaagattttattttaagaaaaaaaaaaaaaaaaaaaaaaagattattattaagagaatattgatagataatattttatttaaatatgtggtaataatttgagttaaaattgatgttttcgttttttatagg

SEQ ID NO: 82 - DNA, 8467 bp, Artificial Sequence
  chemically treated genomic DNA (Homo sapiens)
  unsure 7721: n is a or g or c or t
tttataaagagcggaaatattagttttaatttaaattgttgttatatatttaaataaaatattatttattaatatttttttagtagtagttttttttttttttttttttttttttttgagatggagttttgttttgttatttaggttggagtgtagtggcgcgatttcggtttattgtaatttttgttttttgagtttaagcgatttttttgttttagttttttgagtagttgggattattagtgtacgttattacgtttagttaattttttgtattttttagtagagatcgggttttattatgttgattaggatggttttgattttttgattttgtgatttattcgttttagtttttcgaagtgtcggaattataggcgtgggttatcgtaattttttgtttttatgtatggtttgatttagtgattatttttatattagtaggtttttttgttttgtttttttgttttttaagacggagtttcgtttttgttatttaggttggagtgtaatggtacgattttgatttattgtaatttttgttttttgggttttagtaatttttttgttttagtttttcgagtagttgggattataggcgtttgttattatatatagttaatttttgtatttttagtagagacgggattttattatgttggttaggttggttttatatttttgattttaagtgatttatttatttttgtttttttaagtgttgggattatagttatgagttattatattcggtttagtagtttttaattgtattttgcggttattgatattaggagtttgataaaagttgtagatttttttttagaaaaatttatttaaatatataatagaattataggaatgttatgttttttgttttaaatttattaaggatttagagttaagaatttttgttttttattattttatagttgagtttattaatattaatttttgattaagttttgtaatatttttaaatattattttagaattttaggggttttgtaaaatgaaagttaaaagtaattagtttattgggttataaattttgattgtaaattttttgtttatattttatgtaggttatattatattatttgatatttgataaatatagttaataagtagtaatattaggataaggtaattttaaaggaatatttttttttttttaaaaatttttagattttttttttttattttatttttattttttttttttattttggtgtaaattatgaaataattagtttttttaggtttatagtttaaggattgtattgtttttattaataagaattttttaagtttgttaatttagtaaattttttttataagaatttttgggattttttttagggagattttataaatttgtaatttttgttataaatttgaatagttagttggtaaaggcggtggttgaggattatatatattgtaggtaattaaagtaaagagtaattttttttttttttgtattaggattaagtcggggtagagaagttgtttttttttatataaagaagagatgtgataatgttttttggttttgttaagttattgttttgtggtttagtgtggatggttaaatattaaattttttagttttttgtaaattagttttattgttttggttatattttatataaaatatttatatttttttttttatatatattttataaaatttagtaaaataaatataatataaaattaaaataaaaagtttttttttttttatttttgtgatttttagagtttttagagtaaatttagtgtttagtatagtgtttagtatatattaagtattggattaaaaagttttattttagtaagatgaataaattgtggagagtttacgtagattatggtgattatggttattaatattgtattatatatttgaaatttgttaaaagaatagattttaaatattttattatttaaaaaaagttattaattatgtagaagtaatggataattagattgatcgtggtaattattttgtaaggtatatatatattataatacgttttatattttaagtatatataatttttatttgttaattatattttaataaagttggggaagaaagtattgaataaaggtggggttttttttttttttaattttgattaatgtgtagaaatattttaatattagaatgtggagataaagtttttattcgtagttattagaaattatttgtgagcgtttttttatttttagtataaatgattattttttttataatttcgtttcgtttttttagaattttttttttatgtatatatttgaagataataatatattagttttggttttaaaagggggaatagttggttgggtttggtggtttacggttgtaattttagtattttgggaggttgaggcgggaggattatttaagtttaggagttcgagattagtttgagtaatatgttgaaaattcgtttttattaaaaatataaaaattagtcggatatggtggtgggagtttgtaattttagttattagggaggttgaggcgggagaagtatttgagttcgtaaggtagagggcgtagtgagttttgagatggtgtttttgtattttagtttgggcgatagagtgagattttgttttaaaataaataaaaaataaataaataaataaaataaataaaaaaggaagttaatagaggtacgattttttttattagtattttgcgaattttgttttggttcgggtaaaataatttacgattttattacgtaatttattagttttgttttttttttttatttatttttgttcggaggtattcgcgttgttttagaatcgttagttgtttatatatataattttagattttttattgttattgttttgtgtttaagttaacgttgtagaatataggaaacgggggttggtcgggaaattcgcgtattcggttttagggcgttttagttttttcggttcgttgtagttatcggttgttggttcgaaagttttttcggtatcggaggcgttcgtcggttttacgcgggtttcgtcgcggtaattgagcggttgcgatacgacgaaggtgttagtgtttatggcggcgataggagagggtcgaagattgcgaagaagcggggagagcgcggttaggtttgttcggagaaatatgagtggcggacgtacgttcgcggtagaggttgacgggtcgcgggaggggcggggtcgcgggaggggcggggtcgcgggatcggttttaggagattttaggggtagttattcgatttttttgcggtttaggttaggtttttttttcgttaggagggtggagtaagatattatattttttttattatttcgttatattttatatagtttttaggcgggaagaggattttttttttcgtgattaatatttgcgtagtattttgtaagtgttttcgggtttattattgtatgtaagtattttaggattttatttttaattttatcgtttgaagaaggtagaggattggagtgttaagagtttttggtggttattttattgttaaattatcgtttttgtaattgtataatgttttttaaagggtgatagtaaaaagtaaggggattgtgaacgagatagatgatattgtgatttgaaattgttttttaaatttttaaagagagattgggcgttgtggtttttattaaggttggaggatcgtttgagtttaggagtttgcgggtaatagagagagatttcgtgtttataaaaaaataaaataaaaataataaaaattgggtcgggcgcggtcgttacgtttgtaattttagtattttgggaggttaaggcgggtagattatttgaggttaggagttcgagattagtttgattaaaatggtaaaatttcgtttttattaaaaatataaaaattagttgggtgtggtggcgggcgtttgtaattttagttatttgggaggttgaggtgggaaaatcgtttgaattcgggagacgggttgtagtgagtcgagattatgttattgtattttagtttgggtgataagagtgaaatttagaaaaaaaaaaaattatttaggtgtggtggtatacgtttgtggttttaggtatttgggcggttaaggtgggaggattttttgagtttcgggggtttaagtttgtagtgagttataatcgtgttattgtatttaggtttgggtaatagagcgagattttgttttaaaataaataaattttgaaggagtaatgtaaatgttattaatgataaatattgatagaaatagaagtttaatatatagaatacgaagagtaaaggttataggaaaaagtgttaggaaataaaatgttttttgtaagataaagtagttatttagaggtatttataggtttgttagttgagggattttgtataaaggtttattttttttattaaatttttatgtatttttagtagagattttgataaatagaaagtaattggtaatttggatattttttttaggattgttttttttttgggggttgttgttttttttaatgtttttttttttatttgttagtttattagcgtaatattagggagtgtggtttttaggtttagagtatatataatgtattttgattaagttttttggtattttatattagtttgtttatttttttagtgttattgagatgtgtaggttttggtttttagatggaaatagtagtgtttaaatttagaatatttgaggttatatttatatattattttattattgtttattgtaaatagaattgaaatatattaggagttggtgacgagtagtattatagatttttaagattattgaatggttatttaggtatagaaattatacgttttaaattttatgggataatttttatttaaaagattttgtttttaattaatgtattttgatttgttatattataatttttgatgtttgttttggaaatgtggtcgtgatgtttattgaattaatttatagatgataagattgataaatttttggttaggtataggatttatatttgtaattttaatattttgggagatcgtggtaggaggatcgtttgaggttaggagtttaagattagtttgggtaatatagtggattttgtttttataaaatatttttaaaaattagtcgagtatgtggtataagcgttagttttgattatttaagagattgaggtggaggattgtttgaggttaggagtttaagattggagtgagcgattatggtattattgttttagtttgggtaatagagtaagatttttttttaaagaaaatagattttttttaaaatatttattttttaaatatttagttgttttttttatttatttgtgtttttattattaaattattatttttaatttttaggtttaggggtatatgtaaagatttgttatataggtaaatttgtgttatgggggtgtgttgtatagattattttattatttaggtattaagtttagtatttatgagttattttttttgattttttttttttttttatttttattattagattattaatgtattattttttattagtaaaatttaatatgtagaaagagttttataggttatagagtttttttatatttatttttttatatgaagtttataataattttataaaagaaaaggaaattaatagagattgagttaggaggtagtatgtggtattttgttaaatattttagtgataattatgtaagataggttttattatttttattgtatagatgaggaaattaatagaaaggtcgtagagtttttttataaaggagttaaggttggagtttagttttgtgtaagtttaaagtaaatttttttttattatattaggtcgagatgttgattttatgaaggttgttattaaaatttatttttatgttggtggatatttattagaaatttagaaatttggttttagggagatttaaaggatatgtaaattttttaggatatttgttagtattatttagtaagtagtttagaagttatagaggatgttggttagtttataagtttagggtgaaatttaaagggataaagatgttataaggagtagaaggaatgttaaaagagaaatattttttagatgggtgtgtgttggagggtagatttgggggtaaaaagagatagaaaaggagtggaattattgttaaaggggtagaagatttaaggagaaattgtttgttttataatttgtttaaagttaaatttgggtgttattaaagttttttttttttttatatttttttttttagataattagaggaggaaaagaaaagtaattggatttttttttgttatttttaggttttttaaaggaagaagtttttgggaatttatattgtgtgatttagggttttttattggttttttttttaggttatttagttgttaatttgttgttttggtttagttttattattagtagtattttttttggatataatttttagagtaaaagtaaatgtcggatgcggtggtttatatttgtaattttagtattttgggaggcggaggtgggtggattgtttgagtttaggagttttagattagtttggataatatggtgagatttttgtttttattaaaaatataaaaaaaaaaaaaaaaaaaagttaagtgtggtggcgtatatttttagttttagttgttggggggttgaagcgcgaggatcgtttgaatttggaggtagaggttgtagtgagttaagattgtaatattgtattttagtatgggagatagagtaagattcgttttttaaaaataaaaaaaaaaaaaaaaaaagaaagaaaagatttttagggagtattagtttttagtttgttttttagaattattaatatattaaatatatatatattatatttatttttattttttgaataatagtatgtttattattgttgtaatttttttagtggggagttagaaaattatttatataaaaagaaaggaaaaaattatttagaattttgtttttgtttattttaatagggttttttatttaataataatttatagattgaattttattttaagtttgagtgtttttatattttttatatatagaatgtaatttttttattgaagatttaataggttttttaatttaggtagtttgatattaggattaggtttttaatgaatatttgttgaatgaatatattagttaggtgttataaattaggattttgaaattattgcgttgatgaggatgttttttaatgttatttaggtatttttgtttggataatttagttttttttatttttaatagttttttaggttataatatttatatttttaaaaataggtttaatttataaatttgaggtaatatgaaatagtatgtgaaagtggtttaaaaattagaaagtattatataattgttattataataataatgtttatagtttgtagtgttttcgtgttttttttaaatgaaatttagggttattgattttggaatttgtttttggagttgataattagttagaggttaaaggttattgagtttatagaaaaatttagaatttgtttgttatttaagatagtagtattatatagaaattattttaatttttttaaatgtataagatataaaaatgagagatttagaaggtttttttaaaaaaaggatatgatttttgttttttgggaaaggattttattttgttatttaggttggaggtaganggggggtggaaaattttttattgtagttttaatattttgggattaattaatttttcgttttaggtttttgagtatttggggagataggtatgtattcggaaggttaaatttttttaatgaaattaatttttttagagaaagggttttatattttgtttaggttggtttcgaatttttgagtttaagtaatttttttgttttagttttttaaagtgttgagattataggtgtgagttattatttgtatatattgatatgtatattagtggttttttttgggtatttttttgttagtgttttttttgggtatatatttgtagttttagttatttaggaggttgaggtgagaggatttgagggggaaggattgtttgagtttaggaatttgagattagtttgggtaatataatgagattttaattttaaaaaaaaatttaaaattttaaaaatttaaataaagaggttaggtgtagtggtttatattcgtaattttagtattttgggaggttaaggcgggaggtttatttgaggttaggagtttgaaattagtttgggtaaaataataaaattttgtttttatataaagtaaataataaaaaattatttaggtgtggtggtatataattggggttttagttatttaggaggttgagatggaaggatggtttgagtttgggaggttaaggttgtagtgagttatgattatattattgtattttagtttggatgatagagtaagatattgg

SEQ ID NO: 83 - DNA, 4836 bp, Artificial Sequence
  chemically treated genomic DNA (Homo sapiens)
  unsure 2, 8..9, 28, 83, 91, 170..171, 176, 199..200, 206, 237..238: n is a or g or c or t
  unsure 641, 643, 648, 655, 665, 670, 672, 685..686, 1737, 1747, 1749: n is a or g or c or t
  unsure 1751, 1771, 1773, 1780..1781, 1788, 2984..2985, 2988..2989: n is a or g or c or t
  unsure 2994, 3026..3027, 3033..3034: n is a or g or c or t
tntatttnnagggcgcgttcggcggggntttttttcgggttagcgcgggcgtcgtttaatttcgcgtatataattaatatatnatcggggnggggcggtagggtttcgaaaatttagtttcgttaaaattcgagaaaaatagattggcgtaaattagggaggcggaggtnngtagngagtcgggattatattacggtannatagtntggtggtagagcgagatttttttttaaaaannnaaaaaaaaagaaaaaaaaaagaaaaggattaattggtttgaatattgtgtatttgttagtattagttattttagagtttgaggtagtaggattgttgtagtttaggagtttgaggttatagtgagttataattatgttattgtattttagtttgtgtaatatagtaagatattgtttttaaaaaaaaagttgtttaggttgttggttattatggagttgtaatttgaaagttttttaagatttttgtttaattttgatttgaatgttataagtagtaagtgttattttaatattaggggaaaagttagtagatttaaagtaggtagaaaaaaaaaaaggagagaaagagaatttagaagtttttttatgttaattgtatagttgattttaaagaattttcgngnttatngatgggnaatcgagttnaaaananttttttttttttnnttcgtttttttttaatcgtcggggagaaatattgcgtgatgtgatcggtgttgttggtttatcgcgagtattttataatcgagttttttagggatgttatagtcgtagtttattttttaaatatgttttaggtcgattttgagagtggtaaaagaagttgcgttttttatgcgtgggtgtaagtaattcgattagtttaggttggcgcgatattggtgatatttcgtgtttttttcgttaaaaattataaataatagtttcggagtttgtgtgtttagtatttgataatttttagttattttagaaagggtttaggtaggaaggtatcgtttaaattttggaagggagtggtttttattatatttgagatttatgtttttgtatttaaggtttggttaatagaataaaattgtttttaaaaaaaaaaaagaaaatatatatatatatatattagaaaattttggtagttcgttttttggtttaggtttcggttagatgttaatttttttaatttttagaataattttgtgaggtgttggtttattttatttttggtaatttaaaatatgttttgggttaggtatggtggtttttgtttataattttagtattttgggaggttgaggtaggaggatcgttggagtttaggagttgaagataagtttgggtaatttagtgagattttattttttttttttttttttttttttttaagtgtttagtattatttgggagtttgttagaaatgtaaaatttcgggtattattttagggagacggagattaaatttatatttttataagattttttaggttatttgtgtatatattatagtttgagaagtttgttatatatttgttgtatttgtttgtagagtagggaaggtattgaggttaagtttaggggtgtttataatatgattagggtagaatgagtttttttaatatgagttgtggtttttagttcgtttagtaaagttggtttttgtatattttgttattattatattttatgtttaaaagtgatttttttttttgtaggagtattttanagaattcgtngngnttattgaatgatttttaggntnaaaaagnngcggggntcgtttttaaagaaaatttggttttttatagaggcgttataaattttaattttttttttttttaaggaattttttatttagttttttttttttaaaaaattgtgaaggtttcgcgaaaaattttcgggtttgggtaatttcggttattagggttttgtttttaggggtaaataaattgtgttgtcggggtttgtaaaagaaatgttgttaatttttaaattttttttaaaaatggttatttcgtagagggtttttaaaagaggtttttgtttaaacggttatatcgttttattttcgtcgtattaggtatcgtcgggtttttttttttaagaaagtttggtttaaaaatatttttttttttttaaggggttgttttcggggttttaagagaaaaacgttttttttgtttaggacgttggagggcgtatgggttttcgaagttattgacgtttggatttaagttgcggtataaattttaacgcggagattttggtattagtgttcgttggggagtttgttgagtgtcggtttagtaatgggttttttttttttttattttcggtagttttttgttttcgtgggtggttggcgcgtttgcggagttagagtcgttgtgtggatcgtgggattgtagttttagttaaagggttgttacgtttggtcggtttcgttatttacggtttcggtttttagtcgttaagggtttagtagtttgttaagtagttttttgttttttttggaagtttggttagggaaggttattttatttttgagttttaggtaggtaaggttttggtttagatattatgttttatttgattgaataataaaataaaataaaatataaattttagattagtgttttttaaacgtttagttttgggattttattagttttaaaaaatgaggtttttagtttgggcgtggtggtttacgtttgtaattttagtattttgggaggtcgaggtaggtgtattacgaggttaggcgtttaagattagtttggttaatatagtgaaaatttttttttattaaaaataaaaaaattagtagggtgtggtggtaggcgtttgtatttttagttattggggaggttggggtaggagaatcgtttgaatttgggaggtggatgttgtagtgagtcgagattacgttattgtattttagtttggggaatagtgtattaaattattttnnngnngtttnttgagtcgttatagtgatataaaatttttcgnnttcgtnntttttttttttttttgaatttaagattagtttggttaatatagcgaaattttgtttttattaaaaatataaaattagttaagtgtggtggtatatgtttgtaattttatttatttgggaggttgaggtaggagaatcgtttgaatttagaggtggaagttgtagtgagtggagattacgttattgtgttttagtttgggtaataggagtgaaattttatttcggaaaaaaaaaaaaaaaaatggtcgggtatagttgtttatttttttaattttagtattttgggaggttgaggtaggtggattatttgaggttaggagtttcgagattagtttgattaatatggtgaaatttttatttttattataaatataaaaattagttgggtgtggtggtttacgtttgtagtttagttatttagaaggttgaggtagaattatttgaatttaggaggtggaggttgtagtgagttaagatcgtattattgtattttattttgggtaatagagtgagattttgttttaaaaaaaaaaaaaaaattaaaaataggtaaattgttatttttaaagatatttgtaaagatttttaaaattatttatgaatgcggtttgttcgttgtatagagtagatgtttaaaaatggtgaatgagattttttattttggttttatgttgaagaagtttataaagtttataagttatttttatgatggatagaaaaatgtgtgtgttttttttgtttattgttttaattgtatagatttcgggattgtagtagaattattttttgagtttgatatcgggaggtttaaattttagtacgggatttagggttagttgttttttggtttttagtttttttatttataaaatgggaaggagagaattttgaattattgtttttagtttttgaatttagttgtttagaataaggatttattgttgattttttaatagtatagggaattgtattgtttttgggaatgatggatagtattttttgttttattgggtaagtgagattttttaggtttttttgtttttttttttttttagagagtaatagacgtggttttattttattttttttaattttttttttttttttttaggattgggtatttcgttgttttcgttgttgtttattttgcgattgtgtttgtacgtgttagtttttcgattgttagagttttaattgtttttgtttcgagattaagtttcgatgaggatttagggtttttgttttttggggagcggttagtttttagggtttatgtgtttttttttttgaagagtttttttttacgttattggaattatagatggtttgtcgagtatttaggtttgggaattggaagtggtagcgtagggtttggttttttgtagggtaggatttttggtcggttggacggtagtttttttggagggttagaaaagagaggggttagtgttcgggtaggtgttttggtttttttttttttttatacgttaacgattttatttgaagttgggtaggggggtggcgttgtttattatatataagtgttataggaggagtttggtttttgagtatcgggtacgtagggtgttttaatatatttcgtttacggatttttcgttattttaggaggtgagtgtagtgttagtatttatttttttttttaaaaaaaattaggttttagagaattagaatagttattattatcgtagggagttaagggaggagggagattagagaaggagttaggagggtggtagggaggttacgtgattcgagtttttttattttttttttttttatagg

SEQ ID NO: 84 - DNA, 4836 bp, Artificial Sequence
  chemically treated genomic DNA (Homo sapiens)
  unsure 1803..1804, 1810..1811, 1843, 1848..1849, 1851..1852, 3049: n is a or g or c or t
  unsure 3056..3057, 3064, 3066, 3086, 3088, 3090, 3100, 4151..4152: n is a or g or c or t
  unsure 4165, 4167, 4172, 4182, 4189, 4194, 4196, 4598..4599, 4631: n is a or g or c or t
  unsure 4637..4638, 4661, 4666..4667, 4746, 4754, 4809, 4828..4829: n is a or g or c or t
  unsure 4835: n is a or g or c or t
tttgtgggaaggaaaggggtgaggggattcggattacgtggtttttttgttatttttttggttttttttttaatttttttttttttttgattttttgcggtgatggtggttgttttgattttttggagtttggttttttttaagaaggagagtagatattggtattatatttattttttaaaataacggagagttcgtggacggagtgtgttgaggtattttgcgtattcggtatttaagggttagattttttttataatatttgtgtgtggtgagtagcgttatttttttgtttaattttaaatagaatcgttgacgtgtggaggggaagggaagttagggtatttgttcgagtattagttttttttttttttggttttttagaggagttgtcgtttagtcggttaagagttttgttttgtagggagttaggttttgcgttgttatttttagtttttaggtttgggtgttcggtaggttatttgtggttttagtggcgtggggaaaggttttttagggaggagggtatatgggttttgggggttggtcgttttttagagggtaggggttttgggtttttatcggagtttgatttcgaagtagagatagttgaggttttggtagtcggggagttggtacgtataggtatagtcgtagagtgggtagtagcgggggtagcgaggtgtttagttttgagggaggagagagagggttgagggaggtgggatggggttacgtttgttgttttttaaggggagaagggaatagagaggtttgggaaattttatttgtttagtggaatagagggtattgtttattatttttaggaatagtgtaattttttgtgttgttgaaaaattagtagtgagtttttgttttgaataattgagtttagaagttagaagtaatgatttagggtttttttttttttattttatgggtgaggagattgaggattagagagtaattggttttgggtttcgtgttagaatttgggtttttcggtgttaagtttaaaagatggttttgttatagtttcggggtttgtgtagttgaggtagtagatagagaaagtatatatatttttttgtttattatgaaaatgatttgtgggttttatggatttttttagtatgagattaaaatagagggttttatttattatttttgagtatttattttgtgtaacgaatagatcgtatttatgaatgattttaaaaatttttataggtatttttgaaaatggtaatttatttatttttaattttttttttttttttgagatagggttttattttgttgtttagggtggagtgtaatggtgcgattttggtttattgtaatttttattttttgggtttaagtagttttgttttagttttttgagtagttgaattataggcgtgagttattatatttagttaatttttgtatttgtagtagagatgggggttttattatgttggttaggttggtttcggaatttttggttttagatgatttatttgttttagttttttaaagtgttaagattaaaggagtgagtaattgtgttcggttattttttttttttttttttcgagatggagttttatttttgttgtttaggttggagtataatggcgtgatttttatttattgtaatttttatttttggatttaagcggtttttttgttttagttttttaagtaggtgggattataggtatgtgttattatatttggttaattttgtatttttagtagagatagggtttcgttatgttgattaggttggttttgaatttagaaaaaaaaaggggnnacgggnncgaggggttttatattattgtagcgatttagnaggtnntnnngagatggtttggtgtattgttttttaggttggagtgtagtggcgtgatttcggtttattgtaatatttattttttagatttaagcgatttttttgttttagtttttttagtagttgggaatataggcgtttgttattatattttgttaatttttttatttttagtagagaggggtttttattatgttggttaggttggttttgaacgtttgatttcgtgatgtatttgtttcggttttttaaagtgttgggattataggcgtgagttattacgtttaggttagaggttttattttttaagattaatgggattttaaggttaaacgtttgagaaatattgatttaagatttgtgttttgttttgttttgttgtttaattaagtggaatataatgtttaaattagggttttatttatttggaatttaaaggtggaatgattttttttggttaagtttttagaagggatagggagttatttaatagattgttggatttttaacgattggaaatcggaatcgtgggtgacggaatcgattagacgtgatagttttttggttggggttgtagttttacgatttatataacgattttggtttcgtagacgcgttaattatttacggaggtaagaaattgtcgagagtgaagggaaagggagtttattgttgggtcggtatttagtaagttttttagcgggtattggtgttaaagttttcgcgttggggtttgtatcgtagtttgggtttaggcgttaatggtttcgaaggtttatgcgttttttaacgttttggataaagggaacgttttttttttgggatttcgaaggtaattttttgaggggaagggaatgtttttaaattaaatttttttgaaggggagaattcgacgatatttggtacggcgaaaatagggcggtgtgatcgtttaaataaaaattttttttaagagttttttacggggtggttatttttggggaagatttgggaattaataatattttttttgtaagtttcggtaatataatttatttgtttttgggggtaagattttggtgatcgggattatttaaattcgggggtttttcgcggggtttttataattttttggaaggggggggttaaatagggggttttttagaaaaaaaaaaaattggggtttatagcgtttttgtggaaaattaaattttttttgggagcggntttcgtnnttttttnantttaaaggttatttagtagntntngcggattttntagagtatttttgtaggagagaagattatttttagatatgaagtatggtggtagtagaatatgtagggattaattttgttgggcgggttgggggttatagtttatgttggagaagtttattttgttttggttatgttgtggatatttttaagtttggttttagtgttttttttgttttataagtaagtgtagtaggtgtatagtaggttttttagattgtaatgtatatataaataatttggaggattttgtgaaaatgtggatttggttttcgtttttttggggtgatgttcgagattttgtatttttaataagtttttaggtgatgttgggtatttaaaaaaaaaaaagagagagagagggatggagttttattaggttatttaggtttgtttttaatttttgggttttagcgatttttttattttagttttttaaagtgttggaattataggtaggagttattatgtttggtttaggatatgttttgaattgttaagggtgaagtagattagtattttatagggttgttttaaggattaaaagggttgatatttgatcgaaatttaaattagagagcgaattgttagaattttttggtgtgtgtgtgtgtgtgtttttttttttttttttggaaatagttttgttttgttaattaagttttgaatgtaagggtataaattttaaatatagtggaaattatttttttttaaggtttaagcgatgtttttttatttaaattttttttaagatagttgggaattattaggtattaaatatataaatttcggggttattatttgtaatttttaacggaaaaaatacgggatattattagtgtcgcgttagtttgaattaatcgaattatttgtatttacgtatagaaagcgtaattttttttgttatttttaaaatcggtttagaatatatttgaggaataagttgcgattatgatatttttgagagattcggttataagatattcgcggtagattaataatatcgattatattacgtaatattttttttcgacgattaaaaaggggcgggnngagggggaggggntnttttnaattcgattntttattngtagntncggggattttttagagttaattatatagttagtatggagagatttttaagtttttttttttttttttttttttttttgtttgttttgaatttgttaattttttttttggtgttgagataatatttattgtttatggtatttaagttaagattaaataaaagttttaaagggtttttaaattataattttatggtaattaataatttagataattttttttttaaagatagtattttgttatgttgtataggttggagtatagtggtatgattgtagtttattgtgattttaaatttttgggttatagtaattttgttgttttagattttggagtagttagtattaataggtgtataatatttagattagttagttttttttttttttttttttttttttttnnntttttgaaagagagtttcgttttgttattangttgtnntgtcgtggtgtgatttcggtttnttgtnngttttcgtttttttggtttgcgttagtttgtttttttcgggttttggcggggttgggttttcggggttttgtcgttttntttcggtngtgtgttggttgtgtgcgcggggttgggcggcgttcgcgttggttcggggggggntttcgtcgggcgcgttttnngggtgng

SEQ ID NO: 85 - DNA, 9927 bp, Artificial Sequence
  chemically treated genomic DNA (Homo sapiens)
atggagaaatgggggttggtggatattttagattattgtgtaatttttttttgttagttaaatattcgttattgagtgtgaaattattttttgtttattttgtttttgtaatattttaattgtatgtttatatttttttagataaggaaattttttagttttttaatatattttaagtattagttttattttttagttaaaggggtatttttaagttttataatttggatattattgaatttatttattttggatatttgaatatataaggtattttagtgtttttagaatatatagagttcggattttttagtgatgaagagtatttaaaaaaattattataaggaaatgaaatgggatttatgatttttttatttttatatttgttgtattttagtggttgttgtttttggattttatggtggtgttttaaaattatttatatcgttagatttggagtattttaaaaatttattatattttttttataaattgatatttaatattttgattttatgaatagattaaaaaaattattggagtgtatattttaagtgggtgaattgtaattatgtgaattttattttaataaaatcgtaaaagaattgaaagtagagtttaaataaagatatttgtatatttatgtttatagtagtattatttataatagttaaaaggtagaagtaattcgagtgtttattaatagacgaatggataaataaaatgtagtatataatggaatattatttagttttaaaaaggaaggaaattttgatatatattataatgtggatgaaatttgaggatattgtattaagtgaaataagttagatataaaaagataataattttatgattttatttacgtgaggtatatagtgtagttaaattgatagagatagaaagtagaatggtggttgttagggggtggtggggaggatgaatggagagttgttgtttaatggtatagagttttaattttgtaagatgaaaagagttttgaagattggttgtttaataatgtgaatatatttaatgttattaatttgaatatttaaaaatggttaagatggtaaattttgtgttatgtgtgttgtattagaatttattgaaagtagggaggttgtggtttttgtgtattattgtaaggtattatagtttggatttttgtgaaattttaaatgagtaatgatagaagagtttttagaatttagtatagttttagaagaaaggaatgtttatattttatttattatttattttaaagttttttgggatgagaattataagttagttattttagatttttttgagattgatattaatatatatttatattgatatttatatatttattgatttatttattttataaaagttgattggtgtttaggtatagtgttggataatgaggaaatattggtaagatattattattttttatttttttaggttttatagtttgatagattgaattaattgatttggttttgtaaaaaatttcgaatatttgggttttttataggatttttttttaatgttattttatatagttatttataaatgttgtagtgataatagtagtaataataataataattttttggtgtttttatgtatatttttgtatttggtttgattttatttgatttttaattttaatttttttttttttttagaatgtaggttttttgagaataggttagttttatttatttcgtattttttaaaaagtttttatagttaataaaatgttttatatatataatagtaaaatatttttgagagttatgttgagaaaatatagttttatttttagattaaagtaataattattgattttggggttttgaaattattttaattattaaagtagattgtaatatgataaggaaatatttgtattatagtttggaaaatatattttaaaatgttaatcgtgatttttttagttgtattgtgtaatgtggtttttttttatgaaagttttttttttataatattgttaattttatagtaagtgtaattttataatatgtgagatttatttgtatgtagaagtttgtttatgatttagattttatgttatgtattaataatatatttattttatggtttgtggattgatttatatagatattatatttaaattagaagaaatatttagagttgggtagggagtagagaataagcgaggttgttgttagaagtattgattgtaacgattatgaatagtattgttgttatattgtttattttaagattttataattaaaggtttttaaattagttatgtatttagatttagttatttaatgaaaatttattttgtataaagcgttatttatatattattttatttatgttttataatatatttttgatagaggtatttttagtttattttatagatggggaaattgtggattaaggttgaagaattttttagtgttttatagtttttaagtttaatgttgtttttatatataatatttaattttgaatattgtattgtgttaggagatttaataaaaataaaaataaaaataaaaattttgtaagtagtgtatgttggttaagagttgttgtttttttaaggtttagtaagtttttagttttgtttttttgaattttgagttttagttgtatattaagttttagaggtgggtaaatgttgatgttataagaatagtagtaagtggtagtatttagggtaggagtatttatgttgttttgatatttttagttaggttgttgtttatatggagttatgtttagtttattaaggatatttacgtttgttgacgtaagttatttttttttgattaatgaaagtttaatgtttaaggttataaattgttgagaaggtaatagggaaagagttaatttatgagtttgtagttattaaaatgtaagtagttttgttttagattattgttttggaatgagataaattttttagttatttgtattgtgattttagataagttatttgttttttttgaattagagttttgttatgtataaaatgggggtaataagcgtttttttagagagtcgttgatattggagataatttatgaaaagaattaggtatattatagatttttaaaaaaaggatagttattattgttgtataataagaataattagtattagtagtattttttagtaggtagaatgttttagttatggttttgattattttagttttgatttttaataatttttattatatttattttttatttttttattattatttattttttgtttttttatttttttttattaaaaattatagaggatgaaattttatatagttttaaagttggttatattggtttgataaatatggtagtaggtgttttaatgagtttagttgaagatggggaaattaggaaatgtgttattagatattaagtggagttaagggagttgataggatttttttttggtttatttttttattatttttaggatagggtttggtgggaatttttttagttaaatgagttttaatattgtgttttaaatattttaattttttttaatatttatatttagtgatgaatatttattgtttttagaagtttttgtttttaggaaaaatttgatggtggttgaaaatatgatggttttgtttggagggaaatgtttgtttttttttttttaagtataaatgtttatttatattttttttggttttttgagaggtggtaaaatgtttaagattgattgttagttatttgtgttatttgaatgaggtttttgtgagtttttgatttaggaaaaataattaaaattaaattaaaattttttttagattatttagtttcgtttatttttttttttattttgttgatattttatttttttatttataaattttggtgttatattttgtataattaagtattttagttttgttttttattttatgaattattttagaggaatatgtttatgagaatttatttttttttgtaattacggttattttattatttttagattttttttatttatttgttttatttattatttgtttttggaagtatataatatttttatttattttttttggaattaaatttgggttttatatttaggaaaaagttttgtagaatgaatttatatttagatagtattatatttaggggtgttgatggtttagtttaattattttaattttagtttttaattaaatttgaagataaaagtataaaggttaaaagagaatgggaatataaaataatgatttttggtattaaatatattagaaagtttagttaggttttggaggattggagaagatgggagagataatgatttttaaaaatagaatgttttgaattttatttttaatttggataaaatttatatatgggaaatttaaggatttagaattaattttttttattgaaagattatttaaatttaattataaattatagaataaattgttggaattgattattaatgatatattgaagataaataatgaaaatatagtattgattatttaatttggaaataataatttttgaatgtttattgcgtatagatattatataatttatttaatgtttttgtgaaattgagattttattttatagagaagaaaataacggtttagataagtaaaaaataaaattaaaaattcgttattaagtttatgtgttttgtaagtgttatagttatattaatattttttttagtattatttaatggattttagagttttattattgattagttgtatgatttaagggaatttttttattttttttgttttagtttttttatttgtgaaatggagggtttggattaggaattttacggtttaaagatattttttgtagttttaatattttatgagtataaggagtatatgggtatgattttaaggattggttgtttatgagttaattagaggtgttgaataaatatttttttattaggttaaggtagaaaggggagggtaaatattggaaaaaaaaaatatgatgagaagtttataaaaattgtgtgttattaaagatttgttttatttggtagttgttgttttatttatagtttttgatatttaggaggattttttttttttaaattgtaagtaaaaaagttttttttgtatatttggatagtattagtgaataaggggttaataatattattaagtttatagaagggaagattggtttgtttttgttttcgggaaaaatttgatggtggttgaaaatatgatggttttgtttggagggaaatgtttgtttttttttttttaagtataaatgtttatttatattttttttgattttttgaaaggtggtaaaatgtttaagattgattgttagttatttgtgttatttgaatgaggtttttgtgagtttttgatttaggaaaaataatttgaatatttttatcgttaggttttaattagtttttgagatttttgtttattttaatttttaattttttttttataataattatttattttagtgatttatttatatatttattgttttatgttattttttatattttttttttatatttattggtatcgatattgaagtttttttgttatagaaataaatttttggagtattttgtttttcgtttttatttattgtttaaatgaggaaatgtaatagggttggaaattttatagagtatagttattatttgattatgaatttttaaattttttatgtttgatattttttagaatattttttgttggttttagatattgtgaagattttatagtttaagatagtaggaattaaaaggttgtgtattttgatatatttgttttattatttgaaaaataggtattgtgagaatatgttgtttttttaaaaaataatttttttttaaatagttatttagggttttattagataatttggatgtattagagtttgaattttgttattttgttatttattattttagttaaggtatatttgggtagtatttaggtttaggttagagttagagatattggggtagggaatggggaaatgttgaatatttaagaggttttttggttttattttaagtttagaggaaagagtattattttggattcgttttgggttgtttcgcgtgtgttaaagggtattggaaattaggttgttttaggattgttttagattattttattgtatttgttattgggatattggggtggataatgaagttattggtagttttaagtattatgtataaaagtgttgtatgtagtgtttagaaattatgggttattaataaataagtttttttatatttgttttaaaaatttatttgttttgtatatagagaagtaaatgaattttttgttgttttttatttttttaggaattaaatatttatgttataaataattatgtttttatagaatatttttaaggaaggtagaaagaattatattataggattttatttgttattttgttgaaggattagaaatagaattttaagttataagttaataggatgtaatttgtaattttagaatattataatttagaaggtatattagatatagtttttttggttttagtttttttatttttaaagtgatagggttgacgtaggtatttttgaggttatttgtagttttgtttttttgtggttattttttgttgttaatataatttttttttagatttatatatatattatttgttatatatatgtaataaagtgcgtgataaagaatgtataaaatgaaatgtggtcgggtgtagtggtttatgtttgtaattttagtattttgcgaggttaaggtgggaggatcgcgtgaatttaggagtttaagataagtttgggtaatatagtaagattttgtttatattaaaaataaaaaaaaaaatagttgggtatggtggtaggcgtttgtagttttagttgtttggtgtttgaggtgggaagattatttgagtttaggaggacgaggttttagtgagttatgattgtgttagtgtattttaggttaggtaatagagtaagattttgttttagaaaataaaaaagaaagaaagaaaaagaaaagaaatgtgagaatttttttattttattttattttttagaggtaattttagagttgttattttttgtttatatagatataaaaatagtatgggtatatattattttttaattaaaaaataggaggatagtatatattgtatatttttttgaaatttgttttttatttaataatataatgtgaataatttttattatattgaaaaaagttggtttgagatttgagagagtagaggtttaggagtacggaaatcgttttttgttattatttattttaggttgtttttttgtttttttgtggtgaatattggtttgtgattttgttttatgattaatagagaggtgatatttgtgttaacgtggtatagatttttaattttattgtagaagtttaattttttgtaaatagtattagtttgaattattatttttattgttattttggttgagttagtatatttagattgaagaaaatagtttagtaataggtagtaaatagaaaaatggaggttatttaggtgattttttttattaaaaaaagagaattagtaatatattgtattttatagtgttttgtaaagaatttttatgtttattatgtaatttaataaatatattttgagtaattataatgagtagggtgtttatagatggtatttgagttatttggtaaagagataattagaatagttattattattatttaatttatagtaaattgagatttaggaagttgtttgatttgtttgaggttttagttagattaggtagagttggtttttaaaattaggtttgtttgatttgttagtagtaaatttttatataaatgtgttagatgtttatgaataagtaatgtttatggtgtaattatttatagcgtaaggtattttggggtgttattaaggatattaggagttatttaaaggttattttttttattaagtttatttttttttttgaatggaaaggagtattgttttttattttaatttgatgttttattagttatttgtttttggataaataatttatatttttttatatttttttttaatttattaaatgggaggggaaaagagtttaattattttttgggattatttttaagaaaaattatatagtgtatgtaaagttattagtagagtgtttgataatatatgattatttgttgttattattattattgggttgatttttttttttgttttattaagaaaatattttttttttttggtaattgttaatttttttgtataaatgtttaaattgagagagaaagtttgtattttgttttgaagattatatttaggttggttttttttagtatgatgatttggaggttaggtttaaagttaaaagtttttgattttaatattatagttaatatataaatagggtaaatttgttttgttggtggttgggatataatgggttttagaaggttattttttttagaaattgttgtttattagtttgttttattattttagtaatagtattgtagtttcgtttttttggggtaagataagaatttttgttgaaatggagaggtaataatgagattattagttatatttttttatgaattagtttagtggttattgattttttatattaagggatagagtattgatagtttattttgaagggatgtagaaaatgtggagaaatatatttgttatgaggataggattggatagggattttgttttattttagttgggattttgaataagttagttagtttttttacgttttagtttgtttattaattaatgaagataatatttgttataattattttattgttaatggattagatgagatttgaggtgtttttgggttttcgggaagtaatatgtagatatggagtatttattttgtgttgagtgtattggagggagagaagattagagaaaggaggagattttggtattggataggaagttatttaagataatttttattattattttttttttggtaggttaatttatgtaaaaagtattttttgtaatatttaaagtgagggttttttgagtttgtatttttaagattaatttaaagtggtattcgaataggggtaacgattttttttagagtataattattgtggaggttgtttggttagggggtttttaagttagagtttttttttgttaaagtagtgaagttggagtagggattgttatataattttagtatttttataggtagtgagaaatttaagtttagaggtatttaggaaatattttttttggtttgttttaagtggttttatagagggttgaatataaggaaaaggaaatttgtatttaattttttgtagttcgaggttaaatggaagttagttttaagattatgtatagatttttttttttaagtttgttttttggagaataatttgttggaattatagattaatagagtaaagtagaggataattgtagaggttaagagcgatattgttttggttttaagttattaaggaaatttagtggtattaggagtttatagaatagagagatagtttattattgtagttttttttattagttatattttagtgggttattaattagttggtttagtgttttgattagtgattttaaaggtttgttggaaagtattttgtttaggattattatgaatatttagtaatttatttttatttattgtagttaattgtaattaataagtgatgggggaaaaataaattttatttgtttatttatttgtggaaatgggttagaggtgttatagaggtttgtatagtatgtttgtatttttaattgttttggttatgtatttatttgagttatttatggttttgtgtataattttcgtatatttttttttaga

SEQ ID NO: 86 - DNA, 9927 bp, Artificial Sequence
  chemically treated genomic DNA (Homo sapiens)
tttggaaaagagtgtgcgagagttgtgtatagaattatgggtggtttagatggatgtatgattaagatagttgggggtgtagatatgttgtgtagatttttgtgatatttttgatttatttttataggtggataagtaaatgaggtttgttttttttttattatttattagttgtaattagttgtaatgaatgaaggtgggttattgaatgtttatggtgattttagatagaatgttttttagtaggtttttggaattattaattaaaatattgaattagttaattagtgatttattaaaatatgattaatagaggggattgtagtaatggattgtttttttattttgtggatttttggtgttattggatttttttaatggtttgaggttaggataatgtcgtttttgatttttgtagttattttttgttttgttttgttagtttgtagttttaatagattattttttaggaaataaatttgaaaggagaaatttatatatagttttaaagttaatttttatttggtttcgggttatagagggttgggtgtaagtttttttttttttatatttaattttttatgaaattatttggggtagattagagaggatgttttttaagtgtttttgggtttgggttttttattgtttatgaggatgttaaagttgtatggtagtttttgttttagttttattgttttagtaaggggagattttggtttgaagattttttaattaagtagtttttatagtggttgtgttttgaaggagatcgttgtttttgttcggatgttattttgggttaattttgaaaatgtaagtttaaagagtttttattttgggtgttataaagagtgttttttgtataggttggtttattaaagaaaaaatggtaatgaagattattttgggtagttttttatttaatgttagggtttttttttttttttaattttttttttttttaatatatttagtatagggtggatgttttatgtttatatattatttttcggaagtttagggatattttaggttttatttgatttattggtaatgaggtaattatagtaggtattatttttattaattaatgagtaagttaagacgtagagaagttaattgatttgtttaaggttttagttaggatgaagtagagtttttatttagttttgtttttatgataaatatatttttttatattttttgtatttttttagggtaggttgttagtattttgttttttgatataaaaagttagtagttattgagttaatttatgagaaggtataattgatgattttattgttgtttttttattttaatagaggtttttgttttattttaaaagaacgaaattgtaatgttgttattggggtaataggataagttagtgggtaataatttttagagaagatgattttttaaggtttattatgttttagttattagtagagtaagtttgttttgtttatatattagttgtaatattggagttaaagatttttagttttggatttggtttttagattattatgttgaaaaaagttaatttgggtgtgatttttagagtaaggtgtaaatttttttttttagtttaggtatttgtataaaggagttgataattattaagaaagaaagatatttttttaatgaaataaaagggaaaattagtttaataataataataataataagtgattatgtattgttaagtattttgttaatggttttatatgtattatataattttttttgaaaataattttagaaggtggttgggtttttttttttttttatttaatagattaggaaagaatataagagagtgtaaattatttatttaaggataaatagttaataaggtattaagttgagataaggggtagtatttttttttatttaagggaaagagtgagtttgatgaaaaaaatggtttttggatgatttttaatgtttttgatgatattttagagtattttacgttgtgggtgattatattatggatattatttatttataaatatttgatatatttatgtagaggtttgttgttagtagattagatagatttagttttaagaattagttttgtttaatttagttggaattttaggtaagttaggtagttttttgagttttagtttattatggattaaatggtgataataattgttttggttgtttttttgttaggtaatttaaatgttatttatgagtattttgtttattgtagttgtttaaaatatatttgttaaattgtatgataaatatgaagattttttataaagtattataaaatgtaatgtattattaattttttttttttaatgaaaaaaattatttaagtgatttttatttttttgtttattgtttattattaaattattttttttaatttgggtatgttgatttaattagaataatagtgaaaataataatttaaattaatattgtttatagggagttaaatttttatagtgggattaaaggtttgtattacgttagtataaatgttatttttttgttaattataaaatagggttataggttaatgtttattataaggagataggaggataatttgggatgggtaatgataaagaacgattttcgtatttttaagtttttgtttttttagattttaagttaattttttttagtgtgatggaagttgtttatattatattattaaatgaaaaataagttttagagaagtatgtaatatatattgtttttttattttttaattaaaaaatgatatatatttatattgtttttgtgtttatataaataaagagtaataattttggagttatttttgaagaatggggtagggtggagagatttttatatttttttttttttttttttttttttttttattttttgagatagagttttgttttgttgtttagtttggagtgtattggtataattatgatttattgaagtttcgtttttttgggtttaagtgatttttttattttagatattaagtagttgaaattataggcgtttgttattatgtttagttatttttttttttatttttggtataaataaagttttgttatgttgtttaggtttgttttgaatttttgagtttacgcgatttttttattttggtttcgtaaagtgttgggattataggtatgagttattgtattcggttatattttattttatatattttttattacgtattttattatatatgtgtaataagtaatatgtatataaatttggaggaaagttgtattaataatagaaggtaattatagaaaaatagagttataaatgattttagagatatttgcgttaattttgttattttagagatgaggaaattaaagttagagagattatgtttgatgtgttttttaagttgtgatgttttaggattgtaagttatattttattggtttatgatttagaattttatttttaattttttagtaaaatagtaggtagaattttatggtatggttttttttgttttttttgaagatgttttgtgaaaatataattatttgtaatatggatatttaatttttggagaaatagaaggtagtagaaagtttatttgtttttttatgtataagataaatggatttttaaggtaaatatgaggaggtttatttattgatagtttatgatttttaggtattgtatgtagtatttttgtatatgatgtttaaagttgttaatagttttattatttattttaatgttttagtgataagtgtagtgggatgatttagggtagttttaggatagtttgatttttagtgttttttaatatacgcggagtagtttagaacgagtttagagtggtgtttttttttttaaatttggaatgaagttaaaggattttttagatatttaatatttttttattttttgttttagtatttttggttttaatttgggtttgggtgttatttagatgtgttttagttaaagtgatgaatagtagggtagtagagtttaagttttggtgtatttaaattgtttaatggagttttaggtaattatttaaagagaagttattttttaaaaaggtaatatatttttataatgtttattttttagatagtagagtaaatgtattaaaatatataattttttgatttttattattttaagttgtagggtttttatagtgtttggggttagtaggaaatgttttagaaagtgttaaatatgaagggtttggaaatttataattaaatgatgattatgttttgtgaagtttttaattttgttgtatttttttatttgagtagtgggtgaaggcgaagggtaaaatattttaagggtttgtttttgtgataaagaaattttagtgtcggtattagtaggtgtgggaagagaatgtagaaaatgatataaggtagtagatatgtaaataaattattaaaataagtagttgttatgaaaagagagttgagagttgaaatgaataggaattttaaaaattgattagaatttaacgataggagtgtttaagttgttttttttagattagagatttataagggttttatttaggtaatataagtaattggtaattaattttgggtattttgttattttttaaaaagttaggaaaggtgtgaatgagtatttatatttagagagaggaaaataagtatttttttttaagtagagttattatgtttttagttattattaagtttttttcgaaaataaaggtaaattaatttttttttttataagtttagtagtattattaattttttatttattggtgttgtttaggtatataaaggaagtttttttatttatagtttggaagagaagagtttttttagatattaaaagttgtgggtgaggtagtagttgttaaataagatagatttttggtagtatataatttttatagattttttattatgttttttttttttaatatttgtttttttttttttattttgatttagtagggaggtgtttatttaatatttttgattggtttataaataattagtttttaaaattatgtttatatattttttatgtttatagaatgttaaagttgtaaggaatgtttttagatcgtggagtttttaatttagattttttattttatagatgaggaaattaaggtaaggaagataaggaggtttttttaagttatatagttagttaatgatggagttttagggtttattaaatgatattaggaagaatgttagtgtagttgtaatatttataaaatatatgaatttggtgacgggtttttggttttgttttttatttgtttgagtcgttatttttttttttgtaaagtgggattttaattttataggagtattaagtgagttgtatagtgtttgtacgtagtaggtatttaagaattattatttttaaattaggtaattaatgttatatttttattatttatttttagtatattattagtagttaattttaataatttattttataatttatagttaaatttaaataattttttaataaaagaaattgattttgaatttttgaattttttatgtgtgaattttgtttaaattggaaataaaatttaaaatattttgtttttaaaaattattgttttttttattttttttagttttttaaaatttagttgggttttttgatgtatttaatgttagaaattattgttttgtatttttatttttttttaatttttgtatttttgtttttaaatttggttaaaaattagaattaaagtgattgaattaagttattaatatttttaaatatggtattgtttgggtatgggtttattttgtagggtttttttttaagtatgaaatttaaatttaattttagaaaaggtaaataaaaatattatatgtttttagaggtaaatgatgaatgaggtaaataaatgagggaaatttaaaagtgatggaatgatcgtaattataaaaaagggtaaatttttatgaatatgtttttttggaataatttataaaatggaaaataaaattaagatgtttgattgtgtagagtgtaatattagaatttatggatgaaaaggtgaaatgttaataaaatgaaggaaaaaataaacggaattaggtgatttaaaaagagttttggtttagttttggttgttttttttagattagagatttataagggttttatttaggtaatataagtaattggtaattaattttgggtattttgttattttttaaaaagttaggaaaggtgtgaatgagtatttatatttagagagaggaaaataagtatttttttttaagtagagttattatgtttttagttattattaagttttttttgaaaataaaggtttttgagaatagtaagtatttattattgaatgtgaatattgaaggaaattgaagtatttgaaatataatattgaggtttatttggttagggaagtttttattaagttttgttttgaggatagtagagggatagattagggaaaggttttattagtttttttgattttatttagtatttgatggtatattttttggtttttttatttttaattgggtttattgaagtatttgttattatatttgttagattaatgtgattagttttggggttatgtgaggttttattttttatgatttttggtaaaggagaatggaggaataagaggtggatggtgatgaaagaatagagagtgggtgtaatgaaagttgttaggagttagggttggggtagttagaattatagttaaaatattttatttgttgagagatgttattagtattaattatttttgttatataataataatagttattttttttttgagagtttatgatgtatttggttttttttataaattatttttaatattagcgattttttgaagaaacgtttattatttttattttatgtataataaaattttggtttagagagggtaagtaatttgtttagagttatagtataggtagttggagagtttgttttattttaagatagtgatttaaagtagagttgtttatattttggtaattgtagatttataaattagttttttttttattgtttttttagtagtttataattttggatattaaatttttattaattagggaggaatgatttgcgttagtagacgtaggtgtttttggtgagttgggtatggttttatgtgaataatagtttggttaggaatgttagaatagtatgagtatttttgttttgagtgttgttatttgttgttgtttttgtagtattagtatttgtttatttttggggtttgatgtgtaattgaaatttaaagtttaggaaaataaagttaagggtttattggattttagagaaatagtaatttttgattaatatatattgtttgtagggtttttgtttttatttttatttttgttaagttttttaatataatataatgtttaaaattgagtattatatgtggaaatagtattggatttggaggttgtgaaatattgggaagttttttaattttagtttatagtttttttatttgtaaaatgaattaggaatgtttttattagaaatgtattatgaagtatgaatgaaataatatatgagtggcgttttgtatagaataggtttttattaaatagttagatttgaatgtataattggtttagaggtttttgattgtaggattttaaaataggtaatgtaataataatattatttatgatcgttatagttaatatttttaataatagtttcgtttattttttattttttgtttaattttagatattttttttggtttgaatgtgatatttatataagttaatttataggttatgagataaatgtgttattaatgtataatatgaggtttgagttataagtaaatttttatatgtaaataaattttatatattatagagttatatttattgtagaattagtaatattatagagaaagaatttttataaaaagagattatattatataatgtaattggaagaattacgattggtattttaaaatatattttttaaattgtggtatagatatttttttattatattgtaatttgttttggtggttggaatagttttaggattttaaaattagtagttattattttggtttagagatagagttatgtttttttagtatggtttttaaaagtgttttgttgttatgtgtataaggtattttgttagttatggagattttttagaggatacgaggtgagtaagattggtttatttttaagaaatttgtattttaaaaggaagagaagattgaagttgagaattaaataaaattaaattaaatataagaatgtatataaaaatattaagagattgttgttgttgttgttgttgttgttattgtagtatttatggatgattgtgtgaagtaatattaaagaaaagttttatgaaaagtttaaatattcgagattttttataaggttaagttaattgatttaatttgttagattgtaagatttaggggggtagggggtagtaatgttttattaatgtttttttattatttagtattatgtttagatattaattaatttttgtggaataaatgaattaatagatatatgagtattaatataggtgtatattagtattaattttagaaaagtttagagtaattggtttataatttttattttagagaattttgaaataaataataagtagagtatgaatattttttttttttaaaattatattaggttttgaaaatttttttattattgtttatttggaattttataggaatttaggttgtagtgttttgtaatggtatataagaattatagtttttttatttttagtaaattttggtataatatatataatataaaatttattattttagttatttttaagtgtttagattagtagtattaagtgtatttatattgttgggtaattaatttttagaattttttttattttgtaaaattaaaattttatattattaaataataattttttatttattttttttattattttttagtaattattattttgttttttgtttttattaatttgattatattatgtattttacgtaagtgaaattatagagttgttgtttttttgtgtttggtttattttatttggtataatgtttttaagttttatttatattgtagtgtgtgttagaattttttttttttttaaagttgaataatattttattgtatgttgtattttgtttatttattcgtttgttgatagatattcgggttgtttttattttttagttattgtgaataatgttgttatgaatatgggtgtataaatatttttatttagattttgtttttaatttttttacggttttattgagatagaatttatatagttataatttatttatttaaaatgtatattttaatggtttttttagtttgtttatagaattagagtattagatgttagtttgtgagagagatgtggtaggtttttaagatgttttaaatttgacggtataaatagttttaaagtattattatgaagtttaggagtaatagttattggggtgtagtagatatgagaatgaaagagttatgggttttattttatttttttgtggtaatttttttagatgttttttattattaagaaattcgaattttgtgtattttaggaatattagagtgttttgtatatttaagtatttagggtaagtaaatttaatagtatttaaattgtggggtttaaaaatatttttttgattaaagagtaaagttgatgtttgaagtatgttgaagaattggaggatttttttgtttgaggaaatatggatatgtagttaggatgttgtagaggtagagtgaataggaaataattttatatttagtgacgagtatttagttgataggaaagagttatatagtggtttgaagtgtttattaatttttatttttttat

SEQ ID NO: 87 - DNA, 5542 bp, Artificial Sequence
  chemically treated genomic DNA (Homo sapiens)
  unsure 666, 669: n is a or g or c or t
ttttgtgtttcggtttttttatttttataatgggggtaataatagtagttatttgatgggttgttataagaattaaatgagttattgtgaatatatatataagtaaggaatttagaatagtgttaaagtatacgtgttagagtttattgtcgttatgttcgtttttttttgtttatatttttttaaatgagatagagttttgttttattgtttaggttggagtgtagtggtataatttaggtttattataatttgtgttttttaggtttaagtgaattttttagttttagttttttaggtagttgagattataggtgttcgttattatatttagttaatttttttgtatttttattagagacggggttttattatatttgttaggttggttttgattttttgattttaagtaatttatttattttagttttttttagtgttgggattataggtgtgagttatcgcgtttagtttttattgtcgttattgttgtgagttgaggaatttggatggatttaatagtacggtagtttttttttatttggttatttttgtttatgttttaaggttaaggtttataatgttttggttagtttttagtagagttatatgggttagaaaatgtgaatggttataaagagtatgtttgcgagttgttttgttagnagnatttttttttcggggagttgaggtaggagaatcgtttgaatttaggagtggaggttgcggtgagtatagattgtgttattgtattttagtttgggtaataagagtaagatttagttttagaaaaaagaaaaagaaaaaagaaaatttatgatttaatggaggaagttaaaatattaatataataggagtttggaagaagttgattttaatttttatggatgattataaggggtttaagattttttggaggaattaattgtagatgtagtagaaattgaaagagaattagaattagaagtggagtttgggacgggtacggtggtttacgtttgtaattttagtattttgggaggtcgaggagggtagattatttgaggttaggagttcgagattagtttgtttaataagataaaattttatttttattaaaagtataaaaattagttaggtatggtggcgggtgtttgtaattttagttatttaggaggttgaggtaggagaattatttgaatttgggaggtagagattgtagtgagttaagattatgattttattttaaaaaaaaaaaatatatatagaaggtaaattgttttgtaaagagaggtaatgggaatgtgggagttggtttggttattggtatagatagtagggaatcgggagtttgaaagaagatttatatttggtatatacgtgtgtttacgtggttttttttattgtaaagggtgttgataaaattaagtttttgattttttttgtggtatatataagaataaaatggtagttgttagggataaattaaaatttaaaaataaaatggttaggtgtagtggtttatttttgtaattttagtattttgggagggaggttaaggttagcggattatttgagtttaagagtttgagattagtttgggtaatatggtaaaattttatttttataaaaaatataaaaattagtcgggtatgttggtacgggtttgtagttttagttattggggaggttgaggtagtataattaattatttgaatttgggagattaaggttgtagtgagtcgtgatggcgtttttgtattttagtttgggtgatagagtgagattttgtttaaaaataaaataaaataaaaggttgttagttagtttgggttattataataaaatattggttaggcgcggtggtttacgtttgtaattttagaattttgggaggttaaggggggcgggaattatttgaggttaggagttcgagattagtttggttaatatggtaaaattttatttttattaaaaatataaaaattagttaggtatggtggtgcgtgtttgtaattttagttatttaggagattgagataggagaatcgtttgaatttaggatgtggagattgtagtgagttaaggtagcgttattgtattttcgtttaggtaatagagtaagattttattttaaaaaaaaaaaaaattaaaggtttagttttttatgttgaaagtaagggaagagatttttttattttttttttttttagaaaatttgttttagaaatttgaaaagttggttgggtatggtggtttacgtttgtaattttagtattttgggaagtcgaggtgggtggattatttgaggttaggagtttaagattagtttggttaatatggtaaaatttcgtttttattaaaaatataaaaattagttaggtttggtggtgtatatttgtaattttagttatttaggaagttgaggtaagagaatcgtttgaatttgggaggtggaggttgtagtgagtcgagattacgttattgtattttagtttgggtaatagagtaagattttattttaaaaaaaaaagagaagttttttttttgattaagttagttagttaatatagatggttattataattgttaggtgtttttagattgtattatatgtgataaatggtgttatcgagtttttttaaagattatttatagtttattttgagaatatatatgtaatgggttgtatttgtttggttagataaaagtgagatttttttttgtttttgtagttttttagtaaattgtttgtgatgtgtttatattttggtttaatgtttatttaataataaaattgttttttttttttattattttcgtggagaggttttttttgggttgggagaaaattttgtttttaattatatttttttaatatagcgtatgtgtttaaaagggaaataaaagtaggagggggaagggtttagagtgataagagttttagtgagaggttaggtttagagagggatatggagaaatagtatgcggagaggaacggtagaggagtaacgttaatatttagttgtaaataatataattatagtagttaatatatagagggattatacgttaagtattgtttttattgtttagttatatttatttatttagtatgcgtagtagtttgaattcggttttttaattatttattttttttttttgtacgtggtcgtagagtatattagagtgggtagaaaataagttataaaatagtaaagaaatagtgtttttggaagtaggtatgagataaatttttttttaggtaaaagtaatttacgaaaatgtgtgtggaaaggttagattttattattaggtaggatgggaatttgagttattttatttggatattatagaatggggtgattttagaaaattggaagaattggggattagtaaatggtcgatttgtagttttgagtagaggatgtaggttagagtggatttagaagataagaaagggaattgaatttagtaagggatagatattttatttttttatttttatttatttatttatttatttttgagatagagtttgatttggaggttggaaggcggggttaaaatttttatttatttatttttattaataattaggttattaagttatttttgaggattggtttaagaaagtagatttaatttatattggtttagtttaggttattagatgtatttacggagatttaaatgtatataattatttgaattaagatttagatagggacgcgtgtagtaggttttatttgattgatttttgatacgggagagaaagtttaagtttcgaattattttttaatgtttataaaggttttaaatagtagtgggttaattgttgtttttggatttttaggagatttgagatttatgaaggagtaggaaagagtttggggataaaaaattaatttggaatttattggagcggaaggggttgtatttatttggaaaagataaagtttttgggaattggttacgtaggttaggtttttaagtaattttatttcgtattttaatatttcgattggtgtttttgggtttttaatattgtttgtattcgtttcggaggttggataaaatgagttttttattgttttgttttaggtttttattaaaggtttggtttatgatatttggtgtatattgggattttagcgtttagatatttaaaacggggtggggagcgggtgttgagttgttatatttttaggttttaggtattttggggaatttttggtcgttgacgtaagtatagcgtttaagggcggtagagtttaggtattggaggatatatgggtcgcgtcgggtttagtcgcgggatatttttagattttagtacggttttttaggtcgattttttagaagtcggtttattggttttttcgggttttagtttagaaaagcggagattttttttttcgtttggaagatggatttattttttatttttttttggttttttagaagatttggagatttcgggaagtgtttttatttatgttcgttttaattcgggggtttaggtttatttcgatttcgttttttcgggaggtttaggaaggtttcgtcgtatttatttcgttggttttattttggttcgggtttttttattattttgtagttacgtttcgattaggaggtatagttagtttttatagtcggttttatcgttttgttcgtaggtttgggttagtttggggcggggatttgggagcgtttaaaatttgcgaggagggcggggtcgtagatcggttttttaaaggttggaagtggtttcgaggcgtcggtagttttgggcggtttcgggaatcgtataggattcggtttttttcgtttaagttgttggggggcgttatgggtcgttatcgtattcgcgtggttatcggggtttggttttttttcgggtcgtataatcgcgtgtagttttggttggtcgggacgcgcggggaggcggagttggagttgtagttgcggttcgcgcggggcgaggttagcgcggggagcgaggggagttagggtagcggggatttcgggtttaggttcgggtcgagttgggttcgcggcgggagggcgggaggttgggggcgaggtgatagcgcgatttcgcggattgggatttttacgaagttgggacgaggtgggtaagattagggatagggttcgtagttgggatttcgggttgggtttaattttatttttttttttcgtttttggtttcggtagtttttagtttttttttttagtgatttagagttaatgtaagtatgaggttagaggttagacgtgaagtttttttaagaatcggcgcggggagagtttagttaatgggatttacgtgggcgatgttgttttagtattagttttaggcgttgcgggttttcgttttttattcgatttcgggcgtttgagatttaaagagtaggttgtgcgggggcgggaacgaggcgatgttgtttttggaggttttgagaaattgaggttgtataggagcgcggttttgttttcgaaacggttttagtcgggttttttttattaagtttggtttgggttcggtttgtatagg

SEQ ID NO: 88 - DNA, 5542 bp, Artificial Sequence
  chemically treated genomic DNA (Homo sapiens)
  unsure 4874, 4877: n is a or g or c or t
tttgtgtaggtcggatttaggttagatttagtaggagggattcgattgaggtcgtttcgaggatagagtcgcgtttttgtgtaattttagttttttagggtttttaaagatagtatcgtttcgttttcgttttcgtataatttgttttttgggttttagacgttcggagtcgggtggaggacgagggttcgtagcgtttggagttgatgttggagtagtatcgtttacgtgggttttattaattgagtttttttcgcgtcggtttttggaggagttttacgtttgatttttggttttatatttatattggttttgggttattgggagaaggagttgggggttgtcgggattaggggcgggaaagggagatggggttgagtttagttcgggattttagttgcggattttgtttttaattttgtttatttcgttttagtttcgtggaagttttagttcgcgaggtcgcgttgttatttcgtttttagtttttcgttttttcgtcgcgagtttagttcggttcgggtttgggttcggggttttcgttgttttagtttttttcgtttttcgcgttgatttcgtttcgcgcgggtcgtagttgtagttttagtttcgttttttcgcgcgtttcgattagttaaagttgtacgcggttgtacgattcggagaagagttaggtttcggtggttacgcggatgcggtagcggtttatggcgttttttagtagtttaggcgaggggagtcgggttttgtgcgattttcgggatcgtttagggttgtcggcgtttcggggttatttttaatttttaaaggatcggtttgcggtttcgtttttttcgtaagttttaggcgtttttaagttttcgttttagattagtttaaatttgcgagtagagcggtagagtcggttgtggggattggttgtgttttttggtcggagcgtagttgtaggatgataaaggggttcgagttagggtgaggttaacggggtgggtgcggcgggatttttttggatttttcgggaaggcgggatcgaggtgggtttgagttttcgggttggagcgaatatagatgagaatatttttcgaggtttttaggttttttggggagttaggaggaagtaggggatgagtttattttttaaacggaggggaaggttttcgtttttttgggttgggattcggggaagttagtgggtcggtttttggaaggtcggtttgggaggtcgtgttggggtttggggatgtttcgcggttagattcggcgcggtttatgtgttttttagtatttgagttttgtcgtttttgaacgttgtgtttacgttaacgattaagggttttttagggtatttagaatttggaaatgtagtagtttaatattcgttttttatttcgttttaaatatttgggcgttggggttttaatgtatattaaatattatgggttagatttttgatagaggtttgaggtagggtagtgaaaaatttattttgtttaattttcgaagcgggtatagataatgttagggatttaggaatattagtcggggtgttagggtgcgggatggaattgtttagggatttggtttacgtggttagtttttaagaattttgttttttttaggtgagtgtagtttttttcgttttagtaggttttagattaattttttatttttaagtttttttttgtttttttatgggttttaggttttttggaaatttaggaatagtaattagtttattgttatttagggtttttgtaaatattgaaggatgattcggagtttaggttttttttttcgtgttaggaattagttagatgaagtttgttgtacgcgtttttgtttagattttgatttaagtgattatatgtatttggattttcgtggatgtatttggtggtttgggttaggttagtgtaagttaaatttgtttttttgagttagtttttagaaatgatttggtggtttagttgttggtagaggtaagtgagtgggagttttagtttcgttttttagtttttagattagattttattttaaaaataaataaataaataaataaaaataaaaaaataaagtgtttgttttttattggatttaatttttttttttattttttaggtttattttggtttatattttttgtttaggattgtaggtcggttatttgttggtttttagtttttttagttttttggggttattttattttgtaatatttaaataaaatggtttaaatttttattttgtttaatagtaggatttggtttttttatatatattttcgtgggttatttttgtttagaaaagagtttgttttatatttatttttaaaagtattgtttttttgttgttttgtgatttattttttgtttattttagtgtattttacggttacgtgtagagagagggaatgaataattgaaaaatcggatttaagttattgcgtatgttaaatgagtgaatatggttaaatagtgagaatagtgtttggcgtgtagtttttttatgtattagttgttatgattgtattatttataattgaatgttagcgttgtttttttatcgttttttttcgtatgttatttttttatgtttttttttaggtttagttttttattagagtttttattattttagattttttttttttttgtttttgttttttttttaagtatatgcgttatgttgggagaatataattagaagtaaaatttttttttaatttagaaaaaatttttttacgaaagtagtgaagaaagaaaatagttttattattgaataagtattaaattagaatgtgagtatattataggtagtttgttaagagattgtaaagatagaaggaagttttatttttatttagttaagtagatatagtttattatatatgtgtttttaagataaattataaataatttttaggaggattcgatagtattatttgttatatatagtgtagtttagagatatttggtaattgtgatgattatttatgttagttaattggtttaattagaagaaaaattttttttttttttttgagatagagttttgttttgttgtttaggttagagtgtagtggcgtgatttcggtttattgtaatttttattttttaggtttaagcgatttttttgttttagttttttgagtagttgggattataggtgtgtattattaagtttggttagtttttgtatttttagtagagacgaggttttgttatgttggttaggttggttttaaatttttgattttagatgatttatttatttcggttttttaaagtgttgggattataggcgtgagttattatgtttagttagttttttagatttttaaagtaaattttttaagaaaagagagggtggagaagtttttttttttatttttaatatggagaattaagtttttaattttttttttttttgagatagagttttgttttgttgtttagacgggagtgtaatggcgttattttggtttattgtaatttttatattttaggtttaagcgatttttttgttttagttttttgagtagttgggattataggtacgtattattatgtttggttaatttttgtatttttggtagagatggggttttattatgttggttaggttggtttcgaatttttgattttaggtgattttcgttttttttggttttttaaagttttgagattataggcgtgagttatcgcgtttggttagtgttttgttatagtagtttaaattgattagtagttttttgttttgttttgtttttagatagggttttattttgttatttagattggagtgtaaaggcgttattacggtttattgtagttttgattttttaggtttaggtgattgattatattgttttagtttttttagtagttgggattataggttcgtgttaatatgttcgattaatttttgtattttttgtagagatggggttttgttatgttgtttaagttggttttaaatttttgggtttaagtgattcgttggttttggttttttttttaaagtgttgggattataggggtgagttattgtatttggttattttatttttaaattttgatttgtttttaataattattattttgtttttatgtatgttataggaaggattaggggtttgattttgttagtattttttgtagtaggaaaggttacgtgggtatacgtgtatgttaaatgtaaatttttttttaaattttcgattttttgttgtttgtgttagtagttaagttaatttttatatttttattatttttttttgtagaataatttattttttgtgtgtgttttttttttttgagatagaattatgattttggtttattgtaatttttattttttaggtttaagtgatttttttgttttagttttttgagtagttgggattataggtattcgttattatgtttggttaatttttatatttttagtagagatggggttttgttttgttgggtaggttggtttcgaatttttgattttaggtaatttgtttttttcggttttttaaagtattgggattataggcgtgagttatcgtgttcgttttaggttttatttttaattttagtttttttttaatttttattatatttgtagttagtttttttaagaagttttgaattttttgtagttatttataagggttggaattaattttttttaaatttttgttatgttgatattttggttttttttattgaattatgaattttttttttttttttttttttttttgagattgagttttgtttttgttgtttaggttggagtatagtggtataatttatgtttatcgtaatttttatttttgggtttaagcgatttttttgttttagtttttcgaggaggggatnttnttagtagagtagttcgtaggtatgttttttatagttatttatattttttaatttatgtggttttattgagaattgattagggtattgtaaattttgattttgaggtatgggtagaggtaattaggtgggaaagggttgtcgtgttgttaggtttatttaggttttttaatttatagtaatagcggtaatggaggttgagcgcggtggtttatatttgtaattttagtattaagggaggttgaggtaggtggattatttaaggttaggagattaaaattagtttggtaaatatggtgaaatttcgtttttaataaaaatataaaaaaattagttgagtgtggtggcgggtatttgtaattttagttatttgggaggttgaggttggagaatttatttgaatttgggaggtataggttgtggtgaatttagattgtattattgtattttagtttgggtaatagagtaagattttgttttatttaaaaagatataaataaaaaagaacgaatatagcggtaatgagttttaatacgtatattttggtattgttttaagttttttatttatatgtgtatttatagtgatttatttaatttttataataatttattaggtagttattgttattatttttattgtagagatgaggaaatcgaggtatagag

SEQ ID NO: 89 - DNA, 13249 bp, Artificial Sequence
  chemically treated genomic DNA (Homo sapiens)
tttattttagggatgtaaatatggtttaatatatatatattagttagtgtaatatattatattaatagaatgaagaagaaaaattatatggttatgttaattgatgttgaaaaagtatttgagagaattaaatatttttttatgataaaaatttttaaaaatattggagatagaaggaatatattttaatataataaatagatatatatgatagatttatagttagaattatattaaatggggagaaattgaaagttatttttttaagatttggaataagataaggatgtttatttttattagtgttagtggaatatagtattgaaagttttagttagaatagattagagatagaaataaggggtatttaaattgggaagagagaagttaaattatttttgttcgtagatggtatgattttttgtttggaaaaatttagattttataaaaaaatgattagaattgataaatttagtaaagttttaggatataaaattaatatataaaaattagtagtatttttatatgttaatagtaaataatttgaaaatgaaattaaggaagtaattttattttttatttgtaatagttataaataaaattaatataattttatttttttaataagtggtgttgggaaaattgtatatttatatataaaagaataaaattagatttttttaatatataaaattggatttaagttaatatataaaaattaatttgaaatgaattaaagatttaaatgtaagatttgaaattaaaaatttttagagagaaatataggggaaaagttttttgacgttggttttggtaataattttttgggatattatattaaaagtatagatttttgaaaaaataaataagtaggattatattaaattaaaaagtttttgtatggtaaaagaaagttaataatatgaaaaggtaatttatagaatggagggaaatatttgtaaattatatatttgatgagaagttaatattaaaatatagaaaatatataaggaatttatatattttaatattaaaaaaataataatttgttttataatgggtaaaggatttgaatagatatttttttaaagaagatatatagatggttaacgagtgtaggaaaaagcgtttaatattattaattattagggaaatgtaaattaaaattataatgagatattattttatatttgttaggaaagttattatgaaaaatataagagataatgaatattggtaagggtatggagaaaaaagaatttttgtatattgttggtagaaatgtaaattgtaatagtttttatggaaaatagaatggaggttttttaaaaaataaaaatagaattattatataatttagtaattttatttatgagtgtatatttaaaggaattaaattattatgttaaagagatatttgtatttttttgtttattgtagttttatttatagtagttaagataaggaaaaaatttaaatgtttattaacggataaagaaaatggggggaggggtgtgtatgtatatatatataatggattattttttagttataataaagaaggaaattttgttatttgtgacgatatgaatgaatttagaggatattatgttaagtgaaataagttagatatagaaatataaatattgtatgattttatttatatgcgaatttaaaaattttaaatttgaagacgaataagtagaatagtatttattaggagttaggggatgtggggaagaagtaaaatattgggtaaagagtataaatttttagttatgagatgaaggttaggtgcgatggtttatgttggtaattttaatattttggaaggttgaggtagagggattgtttgagattagtttaggtaagaaagtgagattttatttttataaaaaataaaaataaaagaattagttgggagtggtggtatatatttgtagttttagttagttaggaggttgaggggggaggattatttgaaattggaaagttaaggttgtagttagttaagatagtgttattgtattgtagtttgggtgatagagcgaaattttgttttaaaaaaaaaaaaaaaaaaaagatgaataagttttggggattaaatgtatagtatggtgattatagtttataattgcgttattatttgaaattggataagagtagattttaagtatttttagtatttttttaatatatatatatataaatggtaattataggtggtgatagatatgttaatttgattgtgataattagtatttaatatatatatatattaaattattatattttattttttgaaatagaaattttgatttgttaattaaatattttaaaacgaaaataattataatattaatatagtatataggaaaaaatttcgtatttcgattgatatagaaaattttatgataaaaatattttaaaataaaagaaataaaagggaatttttttaatttgataaatggtatttgtggaaatttttagttagtattaaatttaatatagaaaggttgggtgtttattttttgaattaggaataagataaagatgtttgtttttgttatttttatttgattttgtattgaggttttggttagggtaattatttttgaaaaagaaataaaaggtttttaaataaaagaagaagtaaaattatttttattcgtttatgatatgattttgtatatagaaaatgtgtatatgtatatatatataaattattagaattaataaataagtttagtaagtttgtagaatataaaatgaatgtataaaaattaagtgtttttttatatattagtaattaataattttaaaatgaattaaaattttatttataatagtattaaatataaattatttagaaataaaaagtgtattgaaaattataaaatattttgaaataaattagaaaagatttaagtaaatggattatttgaatttgggaagtagaggttgtagtgtgtcgagattgtattattgtattttagtttgggtaatagagggagattttaaagagtcgaaaagaaaagaaaagatttaaataagttgaaatatattttatggattagaagatttaatattgttaaagtgataatattttttaaattgatttatagttttaatttaatttttattaaaattttagtttgttttttggttgaaattgataagttgattttataatttatatggaattttaaaggatttagaataattaaaataatattgaaaaataaagaatagcgttggtggattaatattttttaattttaaaatttattatagtattgcggtaattaagtagtgtggtattgtatagtatgtatattatagattagtggattagaattaatgtttagaaataaatcgttatgtttataatgaattattttttaataaggtgttaagataacgtaatgggaaaagaataatgaatttaataaatgatgtatggataatcggatatgtatatgtaatataatgaatttgaatttttttatcgttttatgtataaaaattaatttaaaatgggttacggatgtaaatgaaaagttaaaattataataattttagaggaaaatttaggagtaaatttttaagatgttattgtaggtagtggttttttagataggattttaaaattataagcgataaaagaaattggatttaaagttaaatatttttgtgttttaaatattattaagaaagtgaaaatataattcgtagaagtaataaaaatgtttgtaagttatgtattcgattagagatttttatttaggatatataaataatgtaatttaatgataaaaaagataaatagtttagttttttaaagagttaagtatttgaatatatatttttttaaaaatatatagatatttaataagtatgtgaaaagatgtttaaagttatttgttaggtgtataaatttaagatagtatgaggagatgttatagggattttgttgttttatagatatgaagcgttggtgagaatgtaggtagtcgtttttggggattttatattttcgtcgttttacgtacggtgagttagtgtttaaatttagtcgagattaatatacgcgattgtgtgttcgttagattttgcgttgtcggcggggttgggagaggcgggcgttaggagtgggcgggaatttgggggttaggttttagtcgcgggaagtcgtttaggagcgcgcgaaattttttttatatttttttaggtatttgttcgtcgcgatttagagagtcgattcgtgatttttggttttttttagatagtttcgtatgtttagatgtgtcgtttcgtttgtttttcgcgattattggttatttttgggtttgggcgcggtttcggcgttcgtttgttttcgttaggagtcgtaggtttagttagtgaagaagttcgcgttgaaggagtttttgtgttttagaatttatttttagtattagcgttggggtggttttttttaggaagtttttttgatttttttatgggtcgttttttttttgtagattttcggagtatttttgttttaagtatcgtaagtggtattgagaatttggggagagtagaggttgtgtttagatttgtagggagttttcgtagttttattttagggtttataggagtttggttttgggcgaagtcgaggtaggtaggtagggtaaagggtggaagtaatttaggagagaacgagtgaacgaatggatgaggggtggtagtcgaggttgttttagttttttggttgtaggaatagatatttcgttgaggagagatttaggagcgaggtttttgtttcgttcgaggcgaggtttcgtttagtcggcgtcgcgtgaagagtgggagagaatattgcgggggcgggggcgggggcgggggcgggggcgggggtagtcgggagtttggagttagatcggggcggggtcgggatcggggttagggattagtggtgggaggaggttgcggcgttagatgcggatatttggatcgtcgcgtcgaggttttcggcgttcgttgttttcgcggttcgcgttatgtttttttatacggttatcgtggttattggtagttagtggttcgtcggtattgacgattatatttattttagtttcgtgggttcggcgggttgtagcgagaagtatttgttggataagtttttttataacgatttcgagcgtggcgcggtgagcgcgggcggggtacgggtggagcgcgggttgaggtgcgttcgggattcggtttggacggtagaggtttgggcgggggcgtcgagggttcgtcggggcggttcggataggattgggggtgtttaggattttgttagggagggtagaattgcggtggggcgtgttttgggtttttagtggtcggtgggtattttggtgggtaagcgtttaggatttttcgcggcggtcgcgatttttgtcggaaacggagatttttcgcgtgtcgtttgtaaggcgttttttttgggaggagaaggtttaaggttttttttttattttaagatttgggtttcgaggtttcggagttttttttattgggtcgcgttttttgtgttattttttttttaggttttttttgtaggtcgtatagggagggagaggtagatgagttatgtttatagaattttgagggtatttcggagtagttagttgtgagtcgtggggaagggtgtacgttagcgggtttagaggtttgagttttgtttagatatgattattagtttattttatcgtttgtttgggttttagtttttttagttgaaaatggagggttggttttagtttggtttatgagttatgggtgagtttaggtttatttggtggtttagacggtatttgggtagtttatatttttaggatagtttttagaggaaattaaagggaaggaatagaatttaggttaggagaggttttttttaaatggaggggttgtatttttttttagtagaatgtatattagggaatatttttacgttaggtgtgaggacgcgagggagtttttagtatttggaagttagtttttaatgttgatttggatttgaattttagttttacgatttttttttatgagtatgggtaggtcgtagtttttattgagtttttaatgaagtgtttaatttagtatttggtatagaggaagcgtttcgtaaatgattggtaatagttttagatatattgtaggtgcgtagggaatattagtttttttttattttattttagtttttaattggattaaaaagatttagattttattaagttgtttttttattatttagtttattatttgattaaattttgtgaaattgtttataatggataaatataatcggtaagtttatgttttaattgattatttttggataaaatttgtgttttaggtgtgtagagtttaaagtaagtaaaaattattttttttttggattttaagttttttatgggttcgatttttatttaggagtttatattttcgttgtagtacgatatggtttttagttaagtttattagtattttggtttgagttttttttaagaagagttaggtgttgagtataagagtaatttttagttgtttagttgttttagtcggggaattgattttgaggattgcggtgttttggagttaatgtgtcgtttatttagggtgatggtattttttgttatttttgacgtatttttatttatttttattattttatggattttttatatttgggggagaaggatagggtataggttattttttttttgtaagtgtttttttttttttatttttttttatatattataaggttttagaagtataggttattggtgtgtttatattgtatagtacgggtatttcgtgtgtgttttttttttgtaggggatatgataacgtggttatagcgggtttttcggataaagagtgaaggtattgttttgtttattatttttttttttcggtttgtttttttttattttgagaagttatttaaatgatattataattaaatattttagtcggaattttaggggtaaattttaggagagatttgtatgttatatttttattgggttgagagggttataagttaggggtggggcggggggtggttgggggtgggggttatcgtagggtggggaattagttaaggttgaaagtttttttgaaaaaattagtttttgagaaagtttttgttgatgtaaagttatttaatatttttttttgtttagtttagaattatttttttatttttttagtttggtatttgtaaagataattattttttttgggtaaaggtaaaagagaaattttagaggaagtatttgttgagaagataaggttattttattttatagggaaaagtgttaaaatttgtattgttaatagtagtaacgataataataataataaaggtatttttatataatttaattatttttaagttattggtaggttaatattttttttttttagggtatagtttagttaaataatggataggattgattttttttttgataaagtgagttataggttttttgttatttttattagagtttcgtatagtgatttagttaggattgggaattaagtttttcgtaggtgggattattttataaacggttgtgttttttttggttttttattgtttgttggagaaagtcgggattttatatagaatggttttgtttttagaggttaatttaagtttaggtaaatttaataagttgatttatttttttaattttgtaaatttaaagtaatttagatcggatacgataattgtaatagatttgaagatttttgagaaattttagttggtttattttattttgtgttggtatttttaagaaagttaagggtaatagcgtggtgtttaatatatgatatttgaatatgtttaataagtgtagaaaagtgttataatgatttatgttttttaagttagtgagtatttttatatttatgaaaaattaattttagaatattttttttttgtgaatgggaatatattagtggagtataaatatttttttggtatgatttttaattcgttttttattttttagtttttttttttgagttattttttttttatattttgtttttttttttgttttttttttttttttttgtttttagttttttaaatgtttttcgtttttgttttttattttataattttttttttttttttgttttgaatttttttttatattttgttttttagttattttttagaggttttttttttgtttttttaattttcggttttttgttttatatttttttttttttttgttttttggtttttttatttattattttaattttttttttcgttttttgttttttttagtttttttttatagttttttttttttttatttcgagtttttgttttgtttggtttttaatttttttttttgttttatagttttttttttttatagttttttattagtttttttttaagatgggtagtttgggggtggggtatatatttttgttttcgtagagagattcgtttttttgttttagtaatagtagagatttgatgaaagatagatgaaaatttttttaaaatgttgatagaaagtttatatgaaaattgattaattgattttttgtcgaaatatttaaaagttttaaaattatatatttaataaaaagttaaaagtaataagtaaaattagtaaagtggttttttgtgaaatgaggtcggtgagttgtaggttttttttgtttttttttagtatttgtattattacgttatttatttttgtttttagaaattgtgtttagtttttttttttttacgtgtgaatttttcggggattttgtttttttagttttttatatttgaaatgtgttatttatgtttatttttttatttatttgttttttgaaatttgattagtttttaaaagttgtttgaaatatttttttatgaagtttttttttgtttttttatgttattttatattgtttttttatattttatttagggtataaattagggtttaaagttgggttttttagttttcggtttagggttttttttaagatgtggttttggggaattgtgggaggaatttgggtttggttattatataggtgtaggttttgattttgaggttattattgttttttgagttttagtttttatttgtaaagtaggataattattcgttcggttatttttaggtttagtgttttttgagggtttgttggggggtgtttattgttgatagtgtttattataatttagtgtgttatttgagaatttaatgtgttatagtaaatagataaatatagtattagtttagtgtatttggtttagagaggagggaggaaggtggttattgtagttttataaatttttcgaagatattttgtagtttgatatatgtgattttggtatttttttggaaggaggtttttatttgttatttttttattagtggtttttgggatgttagaattatagttattaagttttgttttttattttttgagttgggttaaggttggagttttttgttttttgtttattttttattatatttaggtttgaagttagtattaggaaagtggttgggttggttatagattagttagattgtaggtttggtttttttttgttgtggaagtttttgttagatggtagatggagtttttgtaaatttgtttagtgattttattttaagtgaaatttaggggttttttattaggtgtttgtaggtgtaggtagggtagggggttaggagtgttttagttttttgtgattgtattataggtgtgttggagggttattttattgtttatttttttagagaagttgtttagttttttcgtgtgggtcgttatttttaggtagatatcgggttttttttgtgggatttgtttagttttggaatgtttttttagtttatttttttttttttttagtttaaggtattgggagttttttttttatgagagtgtttttgttagttttttttattttattttagtttttttgttatttattttttggggatatttttttttttttttagttttttagagttataggaaagttattttttttgtagtagttatatttagattaggttcgggtttttggtggtcgttttttagtttttatcgtatatagatttgttttgtttgttttattagtatttagaatgttttttattttttttttgtttttatagttttgtttttagttttttaggagttttttttgggttttgagtgaaggagtttgaggttataggtttagttttttttttttatgtgtgttttagttattcggattggtatatgtagttacgaagtggtcgtgacgtaggggtttatgttagtttataggcggtgtggggtttggtgttttgtaattttttggatttaggaaggggtattggtggttttgatgtatataatcggtggtttgtgtttttggagaaaggaggttatttaggatggtgttattttatttttttaatggttttgtaagtgaggggtattttttttgggtagatgaagaaatagttttagagaatgaagtaatgtgtttaggttatttagttatttgtttgaagttgggatgtgaatttagagttttagattttagggtttatcgagttttttattttttattgttttttttttatttttcggtgggattaggaatttttgttttggtttataatttgtagttaaggtttttgtaaatttttgtggtatgtagggtttggcgtggggtaggttcgacgcgtatttagttttgggttatttagtttttattttgtttttttagatgggttcgagtttttgagatgttgagatttttgttttattagaatttgtttattttgtttatgatgggcgaggttttgtgtgtggttttgtttttttgaggataagttgtggtaggaaggtttttttagaggtggtagatgaggttgatattttttttgtaggaggggtattgtcgtggggtcgaggttggtttatatgtggttggatttaagatatgttattttattatatgggtttggtttttttgttattagaaattgtttttagggtttttggtttagattatagagtatagggaggaagttttcgttttttgattataagcgtttggttttagcgttagttattttaaattgtttacggtatttagagttaggaggtttgtggaaaatatttaagtttttattttttttaggaagttttttaggggtttttttggtagtttggaggtagggtatggaatggggatgtttgcgttcgtataaaggatgatatttttcgttttttttattttgttattatgttgagaattttaggttttgtcgttagggataaagtttaagggttgatgaatttggtttagaaagtgttttgtaggggttaggtatagtggtttatgtttgtaattttagtattttgggagatcgaggtaggtggattatttgaggttaggagtttgagattagtttggttaatatggtgaaattttgtttttattgaaaatataaaatttaattagatgtggtggtaggtgtttgtagttttagttatttgggagattgaggtaggagaattatttgaattttggaagtggaggttgtagtgagtcgagatcgagttattgtattttagtttgagtaatatagtgagattttattttaaaataaaaaagaatatgttttggagggtatcgagttcggggttttttaaatttgttggttattagaatgcgtgatgtaatgtttgagttttttattttaattttttgtttgttatttattgttgtagagataaaagttttttagaagttatggttgttgttttagagtcgtttgtgttttggaagtaggagtttggtagggagggggttaagtagttttgttttagaggtttgggtagttgcgttgtatatagtttggggtggtgttttttagttgtaaggttagttttattttgttattagtaatgttataggtgtagtagagttgtttggttttattgttttttgggtattattatgtagttgtgaattgtaaatgttttaggacgattcgaatttatgtaagttttttgtatttaagttttattatttttatttatttattatttttattgaaaattggaaagagaggaagtggttatgatggaaagatttggggtgtgattttagttttgttggtaagtggtagaggtgggagttattgagtttcgttgtttttatttgtggaaggggtggtaatttttttgtatttttagagttattgtggggatttattgttagtaagtttatttttagttgtaaaggttttttataaggttattttatgtgggggtagttgcggatttttattgggtatagtttcgtaggtgtaggtatgagtttgggtatttttttattttttagtttgagttaagtgtagttagtaggcgttgttttttgagtagtatagtattattttggtttattggattttttttttttaagggtagggtttaggatttgtttattttttttatttgtttgggtcgtagtattgagttttgttaggggtaggtttttagtgaatgttttgggtaaatgaatttaggagtttatttaaggtgtttatgaagaattttggttttatgaattgtagtggaggtaaaattttatttttttttattttagttaggtttgagaatcggtataagatagatttatgggcgaaagtttatagatttttttaatataagttgtacgtggtatgggagtttttttaaaaagatgaagattttaagaagtagttagagttaattttttttagatattgtattgaatgaattatcgtgagatgtgataaggttaaggggtttgggttagggtaggtaattgggtagggaagtgattcgggaggtaagcgtttattgtataagatttgtttgtatggattttttttggttttaattttttaattttgatgaaaagagtgttattttttttttggtatagtgaggatattttttataggggatttttattttttgtttttaagaaatagtacgaatgttagagtattttgtatttgttgtttttttaagtgttttttatttaacgtagtttttgtgttatagtagtatattttggggtgataaatttttaatatttttagaataaaggtttaggagattacgtatggtttgattgtttgtttttttttttagg

SEQ ID NO: 90 - DNA, 13249 bp, Artificial Sequence
  chemically treated genomic DNA (Homo sapiens)
tttgggaaggagaataggtaattaggttatgcgtggttttttgagtttttgttttggaggtgttaagaatttgttattttaaggtatgttgttgtggtatagggattacgttgaatgaaaagtatttaaaaaaatagtaggtgtaagatattttgatattcgtgttgttttttagaagtaggagatgaaagttttttatgaaagatgtttttattatattaaaaggaaagtaatattttttttattaaggttgggaagttgaagttaaaggaaatttatataaatagattttgtataatgaacgtttatttttcgagttatttttttgtttagttatttgttttagtttaagttttttggttttattatattttacgatgatttatttaatgtagtatttaagggggattgattttaattgttttttggggtttttatttttttaagagggtttttatgttacgtataatttgtattaaagaaatttgtaggttttcgtttatgaatttgttttatgtcgatttttagatttagttgaaatgggaagaggtggagttttgtttttattatagtttatggagttaagattttttatgaatattttaaatgaatttttgaatttatttatttaagatatttattgaaggtttgtttttgataaggtttagtgttacgatttaggtaggtgaaagaaatggataaattttgggttttgtttttgaggagagagaatttagtgagttaggatggtgttgtgttgtttagagggtaacgtttgttgattgtatttagtttaggttggaggatggggagatgtttaggtttatgtttgtatttgcgaggttgtgtttagtgagggttcgtagttgtttttatatgggatagttttgtgggagatttttataattggagatgggtttgttgatagtggatttttataatgattttgggagtgtaggggagttattattttttttatagatgaagatagcgaggtttagtgatttttatttttgttatttgttagtagagttggagttatattttaggtttttttattatagttattttttttttttttagtttttagtggggataataagtgagtgaaaatggtgaggtttagatatagggagtttgtatggattcgagtcgttttgggatatttgtagtttatagttgtatggtgatgtttagagaatagtgagattaagtagttttgttgtatttgtggtattattggtggtagggtgaggttagttttgtagttagaaggtattattttaggttgtgtatagcgtagttgtttaggtttttgggataaggttgtttggttttttttttgttaggtttttgtttttaggatataggcggttttgaggtaatagttatagtttttggagggtttttgtttttgtagtaatggatggtagataggaagttgggatgagaggtttaggtattgtattacgtattttgatgattagtaggtttggaaagtttcggattcgatgttttttaaggtatgtttttttttattttgaggtggagttttattgtgttgtttaggttggagtgtagtggttcgatttcggtttattgtaatttttatttttagggtttaagtgatttttttgttttagttttttaagtagttgggattataggtatttgttattatatttggttaagttttgtatttttagtagagatagggttttattatgttggttaggttggttttaaatttttgattttaagtgatttatttgtttcggttttttaaagtgttgggattataggtatgagttattgtgtttggtttttgtaaggtattttttaagttagatttattaatttttgaattttatttttggcggtagaatttagagtttttagtatgatggtaaagtggaaggggcgaggggtattattttttgtgcgagcgtaggtatttttattttatgttttgtttttaagttgttaggaggatttttggagggttttttaagaggaatgggaatttgagtgttttttataaattttttggttttgaatatcgtgagtagtttggggtggttgacgttgaggttagacgtttgtggttagaaagcggaagttttttttttgtgttttgtagtttaggttagaggttttaggaatagtttttgatgatagaggagttaggtttatgtggtgggatgatatgttttgggtttagttatatgtggattagtttcggttttacgataatgttttttttgtagggagagtattagttttatttgttatttttgagaaagtttttttgttatagtttgtttttaggagagtagggttatatataaggtttcgtttattatggatagggtgggtaggttttgatgggataggagttttagtattttaggggttcgggtttatttggaggagtagagtgggggttgagtggtttaggattggatacgcgtcgggtttgttttacgttaggttttgtatgttatagggatttatagaggttttagttgtaggttgtgagttaagatagagatttttgattttatcgaggagtggggagagggtagtgaggggtagaaggttcggtgggttttggggtttggagttttgaatttatattttagttttaggtaagtagttggatggtttgggtatattgttttattttttgaagttgtttttttatttatttaaaggagatattttttatttgtaggattattgagaaaatgaaatgatattattttgggtggttttttttttttagaggtataggttatcggttgtgtgtattagaattattagtgtttttttttgaatttagggggttgtagggtattaggttttatatcgtttgtgagttagtatgggtttttgcgttacggttatttcgtgattatatgtgttaattcgagtaattggagtatatatgggaggaggaaattgaatttgtgattttaaatttttttatttaaagtttagaaggaatttttgaaaggttggagatagggttgtgaggatagagggagagtgggaggtattttgaatgttggtggggtaggtagagtaagtttgtgtgcggtgaggattgaggggcggttattagaggttcgggtttggtttgagtgtggttgttgtaggggaagtagtttttttatggttttgaggggttggagagggaggaaggtgtttttaggggatagatgataggaaagttggggtggggtgggaggagttaatagggatatttttatgggagggaggtttttagtattttggattaagaggggagggagatgggttgaggaggtattttaggattgggtaggttttatagggagggttcgatgtttatttgggggtgacgatttatacgaagagattgagtagtttttttgagggagtggatagtggggtgattttttagtatatttgtggtgtagttataggggattgggatatttttggttttttgttttatttatatttgtaggtatttggtggagagtttttgagttttatttggggtgaaattattaggtagatttataaggattttatttgttatttgatagggatttttatagtaggagggggttaggtttgtagtttggttggtttatggttagtttagttatttttttggtgttggttttaagtttgaatatgataagaggtgaataaggggtagagggttttagttttgatttaatttagggagtaaaagataaagtttgatggttgtggttttaatattttaggggttattaatggaagaatgatagataaaggtttttttttaggaaaatattagggttatatgtgttaaattgtaaaatattttcggaaggtttgtggaattataatggttattttttttttttttttttgggttaagtatattgggttgatgttatatttgtttatttgttgtgatatattaaatttttaggtgatatattgaattatggtgggtattattaatagtggatattttttaataggtttttaggaagtattgggtttgggaatggtcgagcgagtgattattttgttttatagatagaaattgaggtttagagagtaatggtggttttaagattagaatttatatttgtgtgatggttaagtttaggttttttttatagttttttaaggttatattttgagaaaagttttgaatcggaagttagaaggtttagttttgagttttggtttgtattttggatggagtgtaaaggggtaatgtggagtggtatggaaggatagggaaaagttttataagagggtattttaggtagtttttaggggttgattagattttagagggtagatgagtaggaggatgggtatgggtagtatattttagatgtggggaattgggagggtagggttttcgggggatttatacgtgggaggaggaaggttggatatagtttttggggatagaagtgggtggcgtggtggtgtagatgttggagagaaataagggaaatttgtaatttatcggttttattttataaggggttattttgttgattttgtttgttgtttttaattttttattggatatgtagttttaaagtttttgaatatttcggtaaagagttagttggttagtttttatgtgagttttttattagtattttaggaaagtttttatttgttttttattagatttttgttgttgttgggatagggagacggatttttttgcggaagtaaggatgtgtgttttatttttagattatttattttggagggggattaatgaggggttgtgggaggaggaagttgtagagtagagaggaagattgggggttagataaaatagagattcgggatgagagagggggaggttatggggaagagttgaggaaaataagggacggagagagggattggggtagtggatagggagattaaggggtagagaagggggaaaatgtgggatagagagtcggagattgagggagtagagaaggggtttttgagaggtggttggaagatagagtgtagaggaaaatttagagtaaaaaagaagggagagttgtagggtagagagtagaaacggggggtatttagggaattgggagtaggggaaggaagaggaggtagaagagggggtagaatgtagggaaaagatggtttagagggggagattgggagatgagagacggattgagggttatattaaagaaatatttatgttttattaatatatttttatttataagaaggaggtattttagaattaattttttatgaatgtaagaatatttattgatttaagaagtatgaattattataatatttttttatatttgttgaatatatttaagtattatatattaaatattacgttattgtttttagtttttttaaaagtattagtatagaatgaaatgggttaattaagattttttagaaatttttagatttgttatagttatcgtattcgatttgaattattttaaatttatagagttaaagaaataaattaatttgttaaatttgtttagatttgggttagtttttggaaatagggttattttgtgtaggatttcggttttttttagtagatagtgaggagttaaggaagatataatcgtttataggataattttatttgcgaaggatttgatttttagttttgattgaattattatgcggaattttgatgagaataataagggatttgtgatttattttattaaggaaaaaattagttttgtttattatttgattgaattatgttttggaggaggggggtgttgatttgttaataatttggaaatgattaaattgtgtggaaatatttttattgttattgttatcgttattattgttaataatatagattttaatatttttttttgtaaaatgggataattttgtttttttagtaagtattttttttagggttttttttttatttttatttaaaaaggatgattgtttttatagatattaagttgggagaatgaggaagtagttttgggttgggtaagagaaagtgttgagtaattttgtattaataggaatttttttaaaagttgatttttttaaggaaatttttagttttagttggttttttattttgcggtagtttttatttttaattatttttcgttttatttttgatttatagtttttttaatttaatggaaatgtgatatgtaaattttttttgaaatttgtttttgggatttcggttgaggtgtttaattataatgttatttgaatgattttttagggtaggggaagatagatcgagagagggagatagtggataaaatagtgtttttattttttgttcgaagagttcgttatggttacgttattatgttttttgtaggaggaaagtatatacggggtgttcgtgttgtgtagtgtgagtatattaatggtttgtgtttttagaattttatgatgtgtggaggagaatggggaggaggaagtatttataaaggggaagtagtttgtattttgttttttttttttaggtgtggggaatttatgaaataatggaagtaaatgaaggtgcgttagaaatggtagagggtgttattattttaaatggacgatatattaattttagggtatcgtagtttttagggttagtttttcgattggggtaattaagtaattgaaggttgtttttgtatttaatatttaattttttttgaagggagtttaagttaggatgttagtgaatttggttgagggttatgtcgtgttatagcgagggtatgggtttttggataggaatcgagtttatggagagtttggaatttagaaaaagagtagtttttatttattttaggttttgtatatttaaaatataaattttatttaagagtaattagttgaaatatgaatttgtcggttgtatttgtttattatgagtaattttataaggtttgattaaataataaattaaatggtgagaaggtagtttggtaaagtttaaatttttttggtttagttaggagttggggtggggtggaagggaattgatattttttgcgtatttgtagtatgtttgggattattattagttatttacggagcgttttttttgtgttaggtattggattaggtattttattaaaggtttagtgagaattgcgatttgtttatgtttatggaaaagagtcgtggggttggaatttaggtttagattagtattaggaattagtttttaaatgttgagggttttttcgcgtttttatatttagcgtggaagtgttttttggtgtatattttgttgggagggagtgtagtttttttatttaggaaaagttttttttggtttgggttttgttttttttttttaattttttttggggattgttttgagaatgtaagttgtttaggtgtcgtttgagttattagatgggtttgggtttatttatgatttatggattagattgaagttaattttttatttttagttggggaaattgaggtttagatagacggtagagtgagttggtggttatgtttggatagaatttaggtttttggattcgttgacgtgtatttttttttacggtttatagttggttgtttcgaggtgtttttagagttttgtgagtatgatttatttgtttttttttttttgtgcgatttgtagaaggagtttaaggaagaggtggtataagaaacgcggtttagtgaagggggtttcggagtttcggagtttagattttgaagtggaggggaaattttgggttttttttttttagggaagacgttttgtaggcggtacgcgggaagttttcgttttcgataggggtcgcggtcgtcgcgaggggttttggacgtttgtttattagggtatttatcggttattgggagtttagggtacgttttatcgtagttttgttttttttgatagggttttggatatttttagttttgttcgggtcgtttcgacgggttttcggcgttttcgtttaggtttttgtcgtttaaatcgggtttcggacgtattttagttcgcgttttattcgtgtttcgttcgcgtttatcgcgttacgttcgaagtcgttgtagaagggtttgtttagtaggtgtttttcgttgtagttcgtcgagtttacgaggttgaggtagatgtagtcgttagtgtcggcgaattattggttgttagtggttacggtgatcgtgtaggagggtatggcgcgggtcgcgggagtagcgagcgtcgggagtttcggcgcggcggtttaggtgttcgtatttagcgtcgtagtttttttttattattggtttttggtttcggtttcggtttcgtttcggtttggttttaggttttcggttgttttcgttttcgttttcgttttcgttttcgttttcgtagtatttttttttattttttacgcggcgtcgattgggcgggatttcgtttcgggcggggtaggggtttcgtttttgggtttttttttagcgaggtgtttgtttttgtagttaggggattggggtaatttcggttgttattttttatttattcgtttattcgtttttttttgaattgtttttattttttgttttgtttgtttgtttcggtttcgtttaaggttaggtttttgtaggttttggggtggagttgcggggattttttataaatttaggtatagtttttgttttttttaagtttttagtgttatttgcggtatttggagtaggggtgtttcgggagtttgtagaggaagagcgatttatgagagaattagaagggttttttggaggaggttattttagcgttgatattgaggatggattttggagtatagaggtttttttagcgcgggtttttttattggttggatttgcggtttttggcgggggtaggcgggcgtcgagatcgcgtttaggtttagagatggttagtggtcgcgggaggtaggcgggacggtatatttggatatgcggggttgtttaggggaggttaggggttacgggtcggttttttgaatcgcggcgggtaaatgtttggaagggtgtggagaaggtttcgcgcgtttttgggcggtttttcgcggttggggtttgatttttaggttttcgtttatttttggcgttcgttttttttagtttcgtcggtagcgtagggtttgacgggtatatagtcgcgtgtattgatttcggttaagtttaaatattagtttatcgtgcgtggggcggcggggatgtgaagtttttaaaggcggttgtttatatttttattaacgttttatgtttgtgaagtagtagagtttttgtagtatttttttatattgttttgggtttgtgtatttggtaaatggttttgaatatttttttatatgtttgttggatatttgtatatttttggagagatgtatatttagatgtttgattttttggaaaattgggttatttattttttttattattgaattgtattatttatatattttggatagaagtttttaatcggatatatgatttatagatatttttattgtttttgcgggttgtgtttttatttttttgatgatgtttgaagtataaaagtatttaattttaagtttaattttttttgtcgtttgtgattttggggttttatttgagaaattattgtttataataatattttaaagatttatttttaggtttttttttaggattattatagttttagttttttatttatattcgtgatttattttgagttagtttttatgtatggagcgatagaagaatttaaatttattgtgttgtatgtgtatgttcggttgtttatgtattatttgttgaatttattattttttttttattgcgttgttttgatattttattaaaaagtaatttattataaatataacggtttatttttggatattgattttagtttattgatttgtaatgtatatgttatatagtgttatattgtttgattatcgtagtgttatagtaagttttgaaattggaaaatgttaatttattaacgttgttttttattttttaatattgttttggttattttggattttttgagattttatataaattatagaattagtttgttaattttagttaaaaagtaagttaggattttgataggggttgagttgaagttgtagattaatttggggaatattgttattttaataatattaagttttttgatttatagaatatgttttagtttatttaaattttttttttttttttcgattttttggagtttttttttgttgtttaggttaaagtgtagtggtataatttcggtatattgtaatttttgttttttaggtttaagtgatttatttatttaaattttttttgatttattttaaaatattttgtagtttttagtgtattttttatttttaaataatttatgtttgatattattgtaaatggaattttaatttattttgagattgttaattgttagtatatagaaaaatatttgatttttgtatatttattttatattttgtaaatttgttgaatttgtttattagttttaatggtttgtgtgtgtgtatatgtgtatattttttatatgtaagattatgttatgagcgagtagagatagttttatttttttttttatttggaagttttttattttttttttagggataattgttttagttagaattttagtataaggttaaatggaagtggtaaaagtaggtatttttgttttgtttttggtttaagaggtgaatatttagtttttttgtattaagtttgatgttagttgggggtttttatagatgttatttattaggttgagggagtttttttttattttttttgttttaaagtgtttttattatgaaattttttgtattagtcgagatacgaaatttttttttgtatgttatattaatattatgattattttcgttttaaaatatttgattgataaattaaagtttttattttaaggggtaaaatgtgatgatttgatatatgtatatattgaatgttgattgttatagttaaattaatatatttattattatttatagttattatttgtgtgtgtgtatgttgggggggtgttggggatgtttaaaatttgtttttatttaattttaagtaataacgtagttataaattatagttattatgttgtatatttgatttttagaatttatttattttttttttttttttttttttgagatagggtttcgttttgttatttaggttgtaatgtagtggtattattttggttgattgtagttttgattttttaattttaaatgattttttttttttagttttttgattagttgggattataggtgtatgttattatttttagttgatttttttatttttattttttgtagagatgaggttttatttttttgtttaggttggttttaagtaatttttttgttttagttttttaaagtattgggattattaatatgagttatcgtatttggtttttattttataattgaaagtttatattttttgtttaatattttgttttttttttatattttttagtttttgataaatattgttttatttattcgtttttaagtttgaaatttttagattcgtatataaatgagattatataatatttgtatttttgtgtttggtttattttatttaatataatgttttttgggtttatttatatcgttataaatggtagggtttttttttttgttatggttgaaaaatagtttattgtgtatgtatatatgtatatttttttttttattttttttattcgttgatggatatttagattttttttttattttggttattgtgagtaaagttgtaataaataaggaagtatagatatttttttgatatagtgatttgatttttttggatgtatatttataagtggaattgttagattgtatggtagttttatttttattttttgaggaatttttattttattttttataaaggttgttgtaatttatatttttattaatagtgtataagggtttttttttttttatgtttttgttaatatttattgttttttgtgttttttataatagtttttttaataggtgtggagtgatattttattgtggttttgatttgtatttttttgatgattagtgatgttgaacgtttttttttgtattcgttggttatttgtgtgttttttttgaaaaaatgtttatttaggttttttgtttattataaaataggttattatttttttggtattgagatatgtgagttttttatatattttttatattttgatattaattttttattaggtatatggtttgtaaatatttttttttattttgtaggttgtttttttatgttgttgatttttttttgttatgtagaagttttttagtttgatgtagttttatttgtttatttttttaaaagtttgtgtttttggtgtaatattttaaaaaattattgttaaggttaacgttaaggagttttttttttatgtttttttttaggagtttttggttttagattttatatttaagtttttaatttattttaagttaatttttgtatattaatttgggtttagttttgtatattaaaagggtttaattttatttttttgtatgtggatatgtagtttttttaatattatttattgaagagatgagattatattaattttatttatagttattgtaaatgggaaatgggattatttttttgattttatttttagattgtttgttattgatatatagaaatgttattgatttttgtatgttaattttgtattttgaaattttattgaatttattagttttaattatttttttatggagtttaggtttttttaaatagaagattatattatttgcgaataaaggtaatttgatttttttttttttagtttggatgttttttatttttgtttttagtttgttttagttaggatttttagtattatgttttattaatattggtgaaaatgagtatttttgttttgttttagattttagaggaatgatttttagtttttttttatttagtatgattttagttgtgagtttgttatatatgtttgtttattgtgttgaggtatgttttttttgtttttagtgtttttgagggtttttgttatgaagagatgtttaatttttttaaatatttttttagtattaattaatatgattatatggttttttttttttattttgttgatatgatatgttatattgattgatgtgtatatgttgaattatatttgtatttttgggataaa

SEQ ID NO: 91 - DNA, 11416 bp, Artificial Sequence
  chemically treated genomic DNA (Homo sapiens)
  unsure 9907: n is a or g or c or t
gttgggattataggtgtgtattattatgtttggttaatttttgtatttttagtagagatagggttttattatgttggttagtttggtttcgaatttttgattttatgatttatttgtttcggttttttaaagtgttgggattataggcgtgagttattacgttcggtttggttttaatttcgttttatttattttttgtttaagatggaattgttttggtttaaatgtttttgatatattttttttttttttttttataagggtttttttaattttaagggttataggggataaagattaattttttgtaaattttttaggttgaataggggagatgatatttttgtttaatagggtttgtcgtatttagggtagagaggaatttagttagaaattatttgtatggtgagggttatttataattttgagttttgataaaaggtggtattcggaagattaataagtgtttaatttaagaaaatattgagtaagtttattttgtatttttatataaagagtataatggtaatatattttataatagtaaagtaaaataagttaaattattttaggtaaattaaattaagaaggttttttatgaagtaggtaattgttggaattaagttgatataatattgttagtcgattttaatacgtgtttagaaatagaatattggtttagatttttaaattaattattttttttgtttttttttagttgtagtcggagattattggtcggtttataggaataagtagagttagtttaaattgtagaaaaaaaatttaaaaataattgatgggattagaatttaataataagtgtattatagtttttgaaataatttttttttttttagtttttatttttattaaagataaattattgtaagattgatttatttgtaaaataagtattagttttattatatttggtttgattatttgtataaagtgtagtaagaataattatttgttatatagttttttttttaaattggttttgatggaattttgttttataagaaattttagataagatttttttttaaagttaagttaagttatgggttattattgttaattatttgtatgagttgggtaaatttttttttttttgaggttttaatataatttggggtttttgggtttgttagaaagtgatattttttatttaatataggttaggaatattgtatagagattgtgtagataaggtataaagttagtttttttaaggggtttttattggttttatatgttaattttgattttttaaagaaaagtatgttattttagttaaagttttggtaaaattattagtttttttaattgtgttttattataaatgaagatagatttttattgtatttatgtaaataattgtattgttataagttaagaatatttataagtggtttttaaattttggataaataaggtagagagaaataaatatgttttaatttttgtttataggagtatattttatttaattattaaaaattgtaaataggttgggtgtagtggtttacgtttataattttaatattttgggaggtcgaggtgggtagattatttgaggttaggagtttgagattagtttggttaatatggtaaaatttcgtttttattaaaaatataaaaaattagttgggtgtgatggtgtttatttgtagttttagttattcgggagtttgatgtataagaattgtttgaatttaggaggtagaggtggtggtgagttgaaattgtattattgtattttagtttgggtaatagaataagattgttttaaaaaaaaaaaaaaaaaagtaaatagtttaaaagtttttttgattttgaaaaataaaataaaggattagtaatattttaagtaaaaagttataaaaggattatttcggttttttgttattagtttagtttatgtaattaatgtttgttttgtttgatattaataaatattttagttatgatagttttgaaagttttttttttattttaatgttataatttttaaagttatttgaaatttgcgtttaagattatttgttaaagatttatagttgattataaattattttttaaagaggattaaaataagttaataattgtttatggatgatataaagttttaggatagttattattaaagttatatttgattaggaattgtggttatttttatgatttttaataattttatataataattataatataggagttttttataattttggaatatatattaataatatatttatataaatatagtttaaagaaagttaaatatcgtttcgtatttgataatgttttttgtatgattttttgtgcgtgtgattttgggttatttattttgtgtatttgtggtaatgaatgagattttattggtggtgtggatttgattgatttttgtaattgtgtagggtaaaagaattggtaaaagaaaatgataataagattttagtaaaggggtagggagggttaagagaattgaatatttgggttggtagagaaattaaagtttagaaattaagaggtaagagtgtagtgtaggggatatattttatttttttgtttttttttttttgtttttttttttagggatttaggtttttgggattatattggatttgtttttgaagttgaaaaataaaaggttgaggagatagttggttttaagtgattagttttaagttagttttgttagaaattttagattataggagaagggtggagagaaaggatatgattatttttggttttattttttattagaggtgagaatgataaggaatttttttttaattttttttgagggtatgaagagggttagtaggagaagggttgggagttttgaggttttttgtaggattttatattttataggtaaggattaagaattaggattaaatattttcgtgggatagttttaaattagtattagtaagtatagttagggtgatttttttttttttttttttttatttttaaattaaaaaaaaaaatttggatgggcgcggtagtttatatttgtaattttagtattttgggaggttaaggtgggtagattatttgaggtcgggagttcgagattagtttgattaatatggattttatttttattaaaaatataaaattggtcgggtatggtggcgtaagtttgtaattttagttattcgggaggttgaggtaggaaaattgtttgaattcggggggcggaggttgtagtgagtcgaggttgtgttattgtattttagtttgggtaataagaataaaatttcgttttaaaaaaaaaaaaaagaaaaagaaaaaattttttttttttgagttggagttgtaaagagaagaatttttaaaaagaaaagaaatttttaaaaaattaaaatataaaaattttttttagagatagggtttcgttgtgttgtttaggttggtttttaattttaggtttgaagcgaattttttttagttttagttttttaagtagttgggattataggtatgttattattatgtttggttttttttttttaaataatttttaaaaaatgttttattttgtttttatttaatatataataattggattagagtggtgttttatttgttataatatttttttaacggtagagtgtgtattattgttgttttttataataaatggtgttatattttggttttggttgaagtaataatattttttagtgaaatttttgttatttaaaattttttgttttgtaatttatgtgtaatagggttagtatattttttagttgttagtggggttgttttttgtgatttaataggaagattatagtgtaaaaatatttttatgttattaatatatgtttgttttaggttatttggaaaatttaaaaaaataaaaaaaagaggaaataattatttatagttttattatttagagaaaattatagttaatgttttggtgtatttttttttagttttttttttttatttaaattttttaattatattcgattttaaatatatatatattttttaaaaattgtaaagataatattgtattttagtataaaagaaaattttggaaatgtagaaaagataatggaaaagaaaaattagttgtttgtgatgttattatttagaaatggttatatttattagttagtttttttatatatgtgatttttattatttttatattttttattataaacgataagttttagaagagaatgtagtaaatgtaggggttttgaaagaaggggtgtattttgttttgtttttgatgtttttgggatataggtaattaaaaggttgaagatcgagtgttgtagaatagggttttttaaggtgtggttcgtaaagtagtaaagtagtagttttttttgggagtttattagaaatataatcggagttttattagtgggtcgggaatttgttgtaataagtttttgggggatttagatgtttgttttttttatagtttgagaaatattgtattaaaagattggattttgggaggtagggggttttagatgaattgaaagtggaaatttatttaggaaatgggacggaattgttttgtagtatggaatttattgatattgatatagttgtttgtgtggttaagttttttgagatagggattagttgggtttggtattttaatgttgagttttatgtttggtttgtaataggtgtttatcgaatatttgttgaatgaattaaggaatgaataagtgagtgaaaaaggatttttagagttgtgttttatatgtttttttttttttttttttaatttttaggattggaatattagttaatatttgattattgttagtttatttttttttatttacgtcgattgtatttttgggttttagggataaagtaggttttggggtgtattatgattttattatttttagtattggttattggtatttgttttattaattttttagtgttaggtatgtttggggatataggtggaggtataaaaaggtggtgtagatggggtatgatgagggtagtgtttatgttttaaggttttagaattatttaaagtatttaagagttgaaaatagtgtttagagtaggaaattttagttttgttatttgtatgtgttagttggataggttattttttttttatatatatatatatatatatatatatatatatatatgaaatatatatatataaggaaaatatatatatataaggaaatatatattttttatatatatatttttttatatatatattttatatatatatttttttatatatatattttatatatattatatatatttttttttaatttttttttttttgagatagggtttcgttttgttgtttaagttagagtgtagtggcgttattttggtttattgtaagttttgttttttgggtttacgttatttttttgttttagttttttaagtagttgggattataggtgttcgttatcgcgttaggttaattttttgtatttttagtagagatggggttttatcgtgttagttaggatggtttcgattttttgattttatgattcgtttgtttcggttttttaaagtgttgggattataggcgtgagttatcgcgtttggtttttttttttttttttttttttttttttttttttttttttttttttttttttttttttttttttttttttttttttttttttttttttttttttttttttttttttttttttttttttttttttttttttttttttttttttttttttttttttttttttcgtattcgagtgaagagattattaaataggttttgagtgagtaataaggttgtttattttatttgggtgtaggcgggttaagtttaaaaagagagttagttaagggagatatgggtggggtcgttttataagataggggtaggtaaaggaaaaattatagttaaaggggggttttttggcgggtaggagtgggggttataaggtgtttagtgggggagttttttgagttaggatgagttaggagaaggaattttataaggtaatgtcgttagttaaggtaaggatcggttatttttattttttttgtggtggaatgttattagttaaggtaggaatagattatttaaattttattttttttgtgattttttagttattttaggtcgtttggatgtatatgtgtaggttataggggatatgatggtttagtttgggtttagacgtttgatattttttttttgagatagagatagatttttattttgtttgtttaggatggagtgtagtgacgtgattttagtttattgtaattttcgttatttaggtttaagtgatttttttgttttagttttttgagtagttgggattataggtatgcgtcgtaatattcggttaattttttgtatttttattagagacggggttttattatgttggttaggttgatttcgaatttttgattttaagtgatttattcgttttggttttttaaagtgttgggattataggtgtgagttattgtgtttagttttttttttgttatttgtagtttttattagtgaatttatttttaataggagttttttgttttttttttttttgagatagtgtttttttttgtcgtttaggttggagtgtagtggcgtaattttggtttattgtaagttttatttttcgggtttacgttatttttttgttttagttttttaagtagttgggattataggtgttcgttattacgcgtagttaatttttttgtatttttagtagagacggggttttattatgttagttaggatggtttcgattttttgattttaggtgattcgtttgttttggttttttaaagtgttgggattataggtatgagttatcgtattcggtcgagttttttgtttttttgttggagatttacgcggaagtgtttttatagtatggtatggtgtttttaggatattaggggtttaattaattttaggttagtttttatgttgattttttggtttataatttttatattataaatttagatttttatttagatttggtttagatttgatttgaatttatattttttatgaatgattgtttttttttattttttttatagttttaaggtaaaatgtgtattttaaaataattttagtagatttggtgtggtggttttagtaggtttggtatggtggtttacgtttgtaattttagtgcgttgggaggttgaggtgggaggatcgtttgagtttaggagtttgaggatagtttgggtaatatagtgagatttttatttttagaaataaataaataattagttgggtatagtgttgtatgtttgtagttttagttatttgggaggttaaggtgggagaattatttgagtttaggattttaagattacggtgagttataattaaattattttagtttgggtgatagagtaagattttgttttataaaaagaaattagtttttggtcgggaatggtggtttacgtttgtaattttagtattttgggaggtcgaggtaggtggattatttgaggttaggagtttgagattagtttatttaatatggtaaaaatttttttttattaaaaatataaaaattagttgggtatggtggcgtatttttgtaatgttagttatttgggaggttgaggtaggagaattatttgaatttaggaggcggaggttgtagtgagttgagattgcgttattgtattttagtttgggtaatagagtaagattttattttaaaaaagaaaagaaattagttttagtttgaatttgtatttggtttgtcgtcgtaggcgtttttttttgtattagtttttgtgggtttttttggttttagatttttttattaatgttgttttttgaggattttttttttttttttttttttttttttaagttatgtgttatttttttttttttagtatttttgtatttggagttggagaagagagtttttttcggtttagtttattatgtggttagaagtttttatttgttttttttatattttagtgtttttatttgtttagtggggatgagtttttttcgtttagggttattatgggaattatatgggatagttatagtgtttggtaaggagtggatgtttagtgaatgttggtttttttttttaggacggttgtattttagtagatgaggagatggggtgtagtggggtattgagtttgagttgttgagtttttaggttattgttgcgtttgagatttcgtggtgttatttgtatttttgggggattaaggttattttgggacggggtttttgtttttttagtatttatagtttatttgggtgaaagatgaattaatggatgaaaagggaaaaggtgaaaaagtgataatatgaaaaatttttaaacgtttagtagtttaattttttgtatttgttgttgttaggttggagtgtagtggtataattatggtttattgtagttttaaatttttggttttaagtagtttttttattatggtttttaaaagtgttgggattataggatgagttatttttttagtttttttttttttttttaattagatataatttatagaaaagggtatcgattttaaatatatagtttgaaaaaattttgatatatatttatatttatgtaatcgttatttagattaagatagaatatttttggttgtgaggtatttgtgggtttttttgtgttaatttttttttaaagttagaggagatgtttaggtttatattggttattagagatttgttttgtttgttttgagttttatataaatggaattatatagtatgtatcgattagtgtttttttttcggtattttatcgtgagtattagtatatattatttagtagtttttaaaaataatagttttttggaatttagttgtttagagttattgttgtttaaattagattttaaattttttttagggataggttttgggtggttttggtgaaaaagataaggattttgtttttgtgggattttagtttagagagaataagtatttaacggagtaggggattcggtggtagaggttgggttgaataagggtaataggtgtggggcgggttgatgttagtttagttttgggatttttaagttgttaagttaggtataggttgtagcgggttagggtgggtagaaggtttttattatttagtggtatttaattggttaaagaggttttatgattaatagtatcgtggtgtgttttgaggaaggtaggagggaggttggaattagtttgggtttgggggatttttgaggaaaatttttggtttcggttttgtttagattttattttatgttattttagaattgtttgtggatagttacgggtgttttattttttggggtagaaatttttgtttaaaggtattttgtcgggtagaagggttaaggtgtttttaatttttagtgggtattgcgtggggatatttgaaattgatgtttttagtagatatttttagaagagagagggtggatttggggttgtcgggatgagggtagtgggttgagggattggggtggtggtgacgtaaggggaggttttttggggaggggcgtggggtgtgtttgggtttaaagttagaggtgtattgtagtattttggcggtttttcgtttgtgttttgcgtttatgttaggttggggtagagttacggcgacgcgtgagttttcggtttttttatttggggttttaattttaggttttttattttttaatgtggaggagatattggtgtttatttgttaaggtagttgagaggaataagagaagttgtgtggggggttttttggtatttcgtttagagttagtgcgtgtgtgaggaaggagggttgttttttatttacggttatttcgagagttaggtacgcgtcggaggtgggttaaaaanatgaaaattgtgtttttagtttacgaatatggtatacggtttggataagatttttttatttttgattttttttttcgttttgtgtagtgggaggtttgaaagaggaaatcgttagggagttttttttttaggtttttgagtagatttgatagggttttggatagaggggagtttcgtagattttgggagggattttagtttttatagttagggttttggtttagttttggagacgggataatggggatgggaggtaatttttgagttttttttgtgggttaggtgtgttatttgttttattcggtttagtttttagagcgattttgaggggatgatgttagtaatgttatttaataggggaagagattgaggttgagggaggtggtagagttagtatttggagtagttgggggttttttgtttgtttgtttttgagacggagtttagttttgttatttaggttggagtgtagtggtatgattttagtttattgtaattttcgtttttcgggtttaagtagtttttttgttttagttttttgagtagttgggattataggtgtatattgttacgtttagttaattttttatattttagtagagacgggatattatcgtgttgtttaagttggtcgcgaatttttgagtttaggtgatttgtttgtttcggttttttaaagtgttgggattataggtatgagttattatgtttagtagttggggttttaattgaggtttgtttggtattaaagttgtggattggttgttggatatatatatatatgagaaagagggagagagaaagaagtgtttttagtttttattttattttaaaattataaagttttagttagaagttattattagttaagagggatggagggggcgatgagagatgtagaatgtcgtttttgataattaattttaataagagtgagattatttggtttttttaaatttgatatattaagtaaaaggtaagtttcgttttttagtattgttattaaattaagttaggtttttgttgagtttattttaatgaataagttaagtagagttgataattgatggttggttatattaggggattttttttgttggaaggagtttgttgaataggttaaatattatttttttaattgtgttagtataatttatttgttgttttagtagtttatttttttattgggtagaaggaatgagtatgggttttggagcgaaatttagttttgttagtgtttgtttgtgttgtgtggttttaggtaagttgttcgttgtttttgagttttggtttttttattttgagatgtgaggagaagattttagggtttataggtttttttggaggatttggatggtatatatttataaattatagatgtgttgtttgggtgggtaattattgtatttatttttaagtttaggtattttagtttgagtaattagaagtggggggatttgtacgtttggagataggaggttatttttatttcgttaagtaattgttttt

SEQ ID NO: 92 - DNA, 11416 bp, Artificial Sequence
  chemically treated genomic DNA (Homo sapiens)
  unsure 1510: n is a or g or c or t
agaggtagttatttggcggggtaaggatagttttttatttttagacgtatagatttttttatttttgattgtttaggttggaatgtttgaatttggaggtgggtgtaatagttgtttatttagataatatatttgtggtttataaatatgtgttatttagattttttagaaaagtttgtggattttggggttttttttttatattttagaatgaagaaattaaggtttagagataacgagtaatttgtttaaggttatatagtataggtagatattggtagggttgggtttcgttttaaagtttatgtttattttttttatttagtagggagatgagttgttaaggtagtaaatgaattgtgttagtataattaagagagtaatgtttaatttatttaataaattttttttagtagaaggggttttttgatatagttagttattaattattaattttgtttagtttatttattaaagtaggtttagtaggaatttgatttggtttaatagtagtgttggaaagcgaagtttgttttttgtttaatatgttaaatttaaaggagttaggtgattttatttttgttaggattagttattaaggacgatattttgtattttttatcgttttttttattttttttggttgatagtgatttttggttggggttttatggttttgagataaaatgagaattaagaatattttttttttttttttttttttttatgtgtgtgtgtgtttagtaattaatttatagttttagtgttagatagattttaattaaaattttagttgttgggtatggtggtttatgtttgtaattttagtattttggaaggtcgaggtaggtagattatttgagtttaggagttcgcgattaatttgggtaatacggtgatatttcgtttttattgaaatatgaaaaattagttgggcgtggtagtgtgtatttgtagttttagttatttaggaggttgaagtaggagaattgtttgaattcgggaggcggaggttgtagtgagttgagattatattattgtattttagtttgggtgatagagttagatttcgttttaaaaataaataaataaaaaatttttagttgttttaagtattagttttgttattttttttagttttagtttttttttttgttaaatgatattgttggtattatttttttagggtcgttttaaggattgggtcggataaggtaagtgatatatttgatttataggagaggtttaaaagttgttttttatttttattatttcgtttttagggttggattaggattttggttatgggagttggagttttttttagagtttgcggggtttttttttgtttagggttttattagatttgtttagaagtttagagaggaggttttttagcggtttttttttttaggttttttattgtatagaacgggaggagagattaggaatgggagggttttgtttaagtcgtgtattatgttcgtgggttggggatataatttttatntttttggtttattttcgacgcgtgtttggttttcggagtggtcgtgggtaaagaatagttttttttttttatatacgtattggttttgggcgagatgttaggggattttttatatagttttttttattttttttaattgttttggtaggtgggtattagtgttttttttatattaggaaatggagagtttgagattagggttttaagtgggagaatcggaaatttacgcgtcgtcgtggttttgttttagtttagtataggcgtagagtataggcgaggagtcgttagggtgttgtagtgtatttttagttttggatttaagtatattttacgtttttttttaagaggtttttttttacgttattattattttaattttttagtttattatttttatttcgatagttttaggtttatttttttttttttggaagtgtttgttgagggtattaattttagatgtttttacgtagtatttattgggaattgggagtattttggtttttttgttcgatagggtgtttttggataagagtttttgttttaggaaatgggatattcgtagttatttataggtagttttaggatgatatgagataaagtttgggtaaggtcggggttagaggttttttttagaggttttttaggtttaggttggttttagttttttttttgttttttttaaaatatattacggtgttgttggttatagagtttttttggttagttgggtgttattgggtggtgaagattttttatttattttgattcgttataatttgtatttgatttaatagtttggaggttttagggttgggttgatattagttcgttttatatttgttgtttttgtttagtttagtttttgttatcgggttttttgtttcgttgagtgtttgttttttttagattggagttttataagggtagagtttttgttttttttattagagttatttagggtttgtttttgagaagggtttggagtttggtttaagtaataatggttttggataattggattttaagaggttattgtttttggagattattaaatgatatgtgttaatgtttacgatagaatgtcggggaaagggtattgatcggtatatattatatgattttatttatatgaggtttaaaataggtaaagtaagtttttggtggttaatgtaagtttgggtattttttttggttttgggagggggttggtatagggaagtttatagatgttttataattagaaatgttttgttttgatttgggtggcggttatatgggtataaatatatgttaaaatttttttaggttatgtatttaagatcggtgtttttttttgtaagttatatttaattgaagaaaaaaaagaaggttgaagaagtggtttattttgtaattttagtatttttggaggttatggtgggaggattgtttgaggttaggagtttgaggttatagtaagttatgattgtgttattgtattttagtttggtaatagtagatataaaaagttgaattgttgaacgtttgaagattttttatgttgttatttttttattttttttttttttatttattagtttattttttatttaggtgggttgtaagtgttgagaaggtagggatttcgttttagagtgattttggttttttagggatgtaaatggtattacgaggttttagacgtagtaatggtttgagagtttagtagtttaggtttagtgttttattgtattttatttttttatttgttgaaatatagtcgttttaagagaagagattaatatttattgagtatttattttttgttagatattgtgattattttatgtgatttttatgatgattttaagcgggaggaatttatttttattggatagatggagatattggagtgtggggaaggtaagtggggatttttagttatataatggattgagtcgaggaaggtttttttttttagttttagatatagaaatgttggggaaaaaaaaatagtatatagtttgaaaaaggaagaaaagggggaaggaaaatttttaggaggtagtattgatgagggaatttaaaattagaggggtttataggagttgatgtagagaggaacgtttgcgacggtaagttaggtataggtttaggttgaagttggtttttttttttttttgagatggagttttgttttgttgtttaggttgaagtatagtggcgtaattttagtttattgtaattttcgttttttgggtttaagtgatttttttgttttagttttttaagtagttggtattataggagtgcgttattatgtttagttaatttttgtatttttagtagagaggagtttttgttatgttggataggttggttttaaatttttgattttaagtgatttatttatttcggttttttaaagtgttgggattataggcgtgagttattattttcggttagaagttggtttttttttatgagatagagttttattttgttatttagattggagtggtttgattatagtttatcgtaattttgaaattttgggtttaagtgatttttttattttagttttttaagtagttaggattataagtatgtagtattatgtttagttaattgtttgtttgtttttagagatggaggttttattatgttgtttaggttgtttttaaatttttggatttaagcgatttttttattttagttttttaacgtattgggattataggcgtgagttattatattaggtttgttaaagttattatattaggtttgttgaagttgttttaaggtatatattttgttttggagttatggaagggatagagaaagatagttatttataagaaatgtgaatttaagttaaatttgagttaggtttaagtggggatttgaatttatagtataagaattgtaaattaagaaattaatataaaaattggtttagaattagttgaatttttagtgttttgaaaatattatgttatgttgtggaaatattttcgcgtgaatttttaatagaaaaataaaaaattcggtcgggtgcggtggtttatgtttgtaattttagtattttaggaggttaaggtaggcggattatttgaggttaggagatcgagattattttggttaatatggtgaaatttcgtttttattaaaagtataaaaaaattagttgcgcgtggtggcgggtatttgtagttttagttatttgggaggttgaggtaggagaatggcgtgaattcgggagatggagtttgtagtgagttaagattgcgttattgtattttagtttgggcgatagagagagatattgttttaaaaaaaagaaaaataaaaaatttttgttgaagatgagtttattagtgagaattataaatgataagaaaaaggttgggtatagtggtttatatttgtaattttagtattttgggaggttaaggcgggtggattatttgaggttaggagttcgagattagtttggttaatatgatgaaatttcgtttttaataagaatataaaaaattagtcgggtgttgcggcgtatgtttgtaattttagttatttaggaggttgaggtaggaggattatttgaatttgggtggcgaaggttgtagtgagttgagattacgttattgtattttattttgggtaaatagagtgagagtttgtttttgttttaaaaagaaagtgttaggcgtttgagtttaagttaagttattatattttttgtgatttgtatatatatatttagacggtttgaagtaattgaagaattataaaagaagtgaaatttaaatggtttgtttttattttaattgatgatattttattataaaagaagtgaaaatggtcggtttttgttttaattgacgatattattttgtgaaatttttttttttggtttattttggtttaaaaagtttttttattgagtattttgtgatttttatttttgttcgttagagaatttttttttgattgtaattttttttttatttatttttattttataaaacggttttatttatattttttttggttgattttttttttggatttagttcgtttgtatttaggtgaaataaatagttttgttgtttatttaaagtttgtttggtggtttttttattcggatgcgagagaaaagaaaggaaagaaaggaaagaaaaagaaaaagaaagaaagaaaagagaaagaaagaaagaaagaaaaagaaagaaagagagaaagaaagaaagaaagaaagaaagaaagaaagaaagaaagaaagaaagaaagaaagaaagaaagaaagaaaggttaggcgcggtggtttacgtttgtaattttagtattttgggaggtcgaggtaggcggattatgaggttaggagatcgagattattttggttaatacggtgaaattttatttttattaaaaatataaaaaattagtttggcgcggtggcgggtatttgtagttttagttatttgggaggttgaggtaggagaatggcgtgaatttaggaggtagagtttgtagtgagttaagatggcgttattgtattttagtttgggtaatagagcgaaattttgttttaaaaaaaaaaaaattaagaaagaatatatataatatatatgaaatatatatatggaaaaatatatatatgaaatatatatatggaaaaatatatatgtggaaaatatatatttttttgtatatatatattttttttgtatatatatattttatatatgtgtatgtgtgtatatatatatatatatatgggaaaagagtgatttatttaattaatatatgtaagtagtagggttgaggttttttgttttgaatattgtttttagtttttaaatattttggatggttttgggattttaaaatatagatattgtttttattatattttatttgtattatttttttatgtttttatttgtgtttttaagtatatttggtattaaggagttagtaaggtaggtgttaatggttagtattaagaatggtgaaattatggtgtattttaagatttgttttatttttggagtttagagatgtaatcgacgtgggtgggagggggtgggttggtagtggttagatgttaattgatgttttaattttagaaattaaaaaaagagaaaaagaggtatgtggggtatagttttagagatttttttttatttatttatttattttttgatttatttaataagtattcggtgagtatttattatagattaggtatggggtttaatattgggatgttaaatttagttggtttttgttttaggaagtttaattatataaatagttgtgttagtgttaatgagttttatgttgtaaagtagtttcgttttattttttaagtgaatttttatttttaatttatttgaagttttttattttttagagtttaattttttggtgtagtgttttttaaattgtaaggagagtaagtatttgaattttttaagggtttgttataatagattttcggtttattggtgaggtttcgattgtatttttaataagtttttaggagaagttgttgttttgttgttttgcggattatattttgagaagttttgttttatagtattcggtttttagttttttaattatttgtgttttaggaatattagggataaaatagagtgtatttttttttttaggatttttatatttgttatatttttttttagagtttgtcgtttatggtaagagatataaaaatggtaggagttatatatgtgaaaaaattggttggtaagtgtggttatttttgggtggtgatattatagataattgattttttttttttattgttttttttgtatttttaaaatttttttttgtgttgagatatagtattatttttataatttttaaaaaatatatatatatttaaagtcggatgtaattgaagagtttaggtggaaaaaaaaaattggaaggaaatatattaaaatattaattgtggttttttttgggtggtaggattatgaatgattatttttttttttttttatttttttgaattttttaagtagtttaaaataagtatgtattaatggtataagaatgtttttatattgtggtttttttgttaaattataaagaataattttattggtagttgagaaatgtattaattttgttgtatatgagttataagataaagaattttaagtggtaagagttttattgggaaatgttattgttttagttaaaattaagatatgatattatttgttgtgggaaatagtagtaatatatattttatcgttagaaaagtgttgtgatagataagatattattttagtttaattattatatgttaagtaaaaataaaataaaatattttttaaaagttgtttaaagaaaaaaagttaggtatggtggtaatatgtttgtaattttagttatttgggaagttgaggttggaggaagttcgttttaggtttggagttggagattagtttgggtaatatagcgagattttgtttttaagaaaaatttttgtattttaattttttaaaagttttttttttttttaaaaatttttttttttgtagttttagtttaaaggaaaaagatttttttttttttttttttttttttttgagacggagttttgtttttgttgtttaggttggagtgtaatggtataatttcggtttattgtaattttcgtttttcgggtttaagtaatttttttgttttagtttttcgagtggttgggattataggtttgcgttattatgttcggttaattttgtatttttagtagagatggggtttatgttggttaggttggtttcgaattttcgattttaggtgatttgtttattttggttttttaaagtgttgggattataggtgtgagttgtcgcgtttatttaagtttttttttttaatttaaaaatagagaaaaagaaaaggagaaattattttggttgtgtttgttaatattggtttagagttattttacgaaaatatttaattttaatttttagtttttgtttgtgggatatgaggttttataggagattttagggtttttagttttttttttgttaattttttttatgtttttaagaggagttagaagagagttttttgttatttttatttttaatggaaaatggaattagaaataattatattttttttttttattttttttttgtgatttaggatttttgataaagttggtttgagattggttatttagagttaattgtttttttagttttttgttttttagttttagagatagatttaatatagttttaaggatttgggtttttgggaaagaaagtaaaagggaaggagtaaagagatggggtatattttttatattatatttttattttttaatttttaggttttgatttttttgttagtttagatgtttagtttttttggttttttttatttttttgttgggattttgttgttatttttttttgttagtttttttgttttatatagttgtagagattagttaaatttatattattagtgagattttatttattgttatagatgtataaaataaataatttaaaattatacgtataaaaaattatataggaagtattgttaaatacgaaacggtgtttggttttttttgggttatatttgtataaatatgttattggtatgtgttttaaagttatgggaaatttttgtgttataattgttatgtaaaattattgaaagttatagaagtaattataatttttagttaaatatgattttaataatggttgttttaagattttgtgttatttatagataattgttgatttgttttaattttttttgaaaggtggtttataattagttataggtttttgataggtgattttaaacgtaggttttagataattttggagattgtgatattagaatagaggaaaaatttttaggattgttatagttgaaatgtttattaatgttaagtagagtaggtattaattgtatggattgaattaataatagaagatcgaaataatttttttatgattttttgtttaaaatgttgttgattttttgttttgttttttagagttaagaaaatttttaagttatttatttttttttttttttttttgagatagttttgttttgttgtttaggttggagtgtagtggtgtaattttagtttattattatttttgttttttgggtttaagtaatttttgtgtattagattttcgagtagttgggattataggtgggtattattatatttagttaattttttatatttttagtagagacggggttttgttatgttggttaggttggttttaaatttttgattttaggtgatttgtttatttcggttttttaaagtgttgggattataggcgtgagttattgtatttagtttatttatagtttttgataattgagtaaagtatatttttataaataaaagttggggtatatttgtttttttttattttatttatttagaatttggaaattatttgtgagtatttttaatttatggtaatatagttatttgtataagtgtagtaagaatttgtttttatttgtaataggatataattggagaaattggtaattttattaaggttttgattggagtggtatgtttttttttaaggaattaaaattaatatatagagttaataaaagttttttgggaaaattggttttatattttgtttatatagtttttgtatagtgtttttgatttgtgttaagtaaagaatgttattttttgataggtttaggagttttaagttatattgggattttaagaggagagaaatttatttaatttatataggtagttgatagtaataatttatggtttggtttgattttaaaaaaaagttttatttaagattttttatggagtaaagttttattaaagttaatttaaaaaggaggttatatggtaaataattatttttgttgtattttatataaataattaggttaagtataataagattaatgtttattttgtaaatgaattagttttataatgatttgtttttagtaaaaatgagggttggagagagaaaaattgttttaagaattatggtatatttgttattaagttttagttttattagttgtttttgagttttttttttataatttagattgattttgtttatttttgtgaatcgattaatgattttcggttatagttaagaagaaataagagggatggttaatttaaaaatttagattaatattttatttttgggtacgtattggaatcggttagtaatgttatgttagtttggttttaatagttgtttgttttatgggaagtttttttaatttaatttatttgggatagtttaatttattttgttttattgttgtggaatatattgttattgtattttttgtgtaggaatgtaggataagtttatttaatgtttttttaaattgaatatttattaatttttcggatattattttttgttagaatttagagttatgagtagtttttattatatagataatttttaattgagtttttttttattttgaatacgatagattttgttaggtaggaatattattttttttatttagtttgaagaatttatagaagattgatttttgttttttataatttttaggattaaggggatttttgtaaaagggaggggggaaaatatgttagaggtatttgaattagagtaattttattttgaatagagggtgggtaaaacgaggttgagattaggtcgggcgtggtggtttacgtttgtaattttagtattttgggaggtcgaggtaggtggattatgaagttaggagttcgagattagattgattaatatggtgaaattttgtttttattaaaaatataaaaattagttaggtatggtggtgtatatttgtaattttaat

SEQ ID NO: 93 - DNA, 5183 bp, Artificial Sequence
  chemically treated genomic DNA (Homo sapiens)
ggtttaagtaatttttttattttagttttttaagtagttgggattataggtatatgttattatgtttagttaatttttatattttttggtagagatagtgttttgttatgttgtttaggttggttttaaagttttgggttttagtaattaatttatttcggttttttataaagacgtgagttattgtaggaggttgaggtaggagaattgttgatatatttagttttttagaaaaaaatatttaatagagatttataaatagaagttatgtttgggttttaggtggtagtgagataagatggtagttttattttttaagattaagggttataggggaggggtgattttaaagggatgtgtaggataattgaaatatgataatattaaagttgttttgttttaagggtaggatttatgggaagtaggtgttttcgtattagaaatacgatatgaatgggaaattttagaggtttttcgagaattggtatttattaatttggtagattaggttttaagatggaattgttttgatatttatattatttgaaataatttggagtattgttggtagttgatgtgagattttggtttttgtttttttagtttaaaataatttaaataagagatataatagtaaaggagatgtagtatataataatttttgtaaaagaaaaagaatattttgaaagtgaagtgtagaataggtagagagaagaatttagggtaggttgtttataaagatgagatagtaaaagttggtattagggaggttttttttatggaaattttatatgattatttatgaggggttgggaagaggtgttgttagtaagtatgttttggttaaaagttattaaaagaaaaggagtgttaaaaaatttaggtcgtgttgggggtggaggtttatatttgtaattatagtattttgggaggagaggtttaagtttaggatttttagattagtttgggtaatatggtgaaattttatttttattaaaaatgtaaaaattaaatgggtaaggtggtatatatttgtagtttttattattcgggaggttgaggtggaagaattttttgggtttaggaggttaaggttgtagtgagtcgtgattgttttattgtattttattttgggttacggagtaagattttgttttaaaaaataaagttaatggttttttttggtggggaaggaagaagtggggtttgaatggggggtagggtatatatggggagattttggttgtagttaattttttgatttgagtggtattattttggcgtttaattttgtaatttttttttaggttatatttttttgttttttgtagttttaatgtttgatatattttaaaaggaaagaaagaaaaggaaggaataagtttgttatttgatttagattagatgtaattgttttagttgcgttttttatttttattttagttagtattttttaaaatgtgatatgtacgtatttttaaagggcggtattgaaataggataggtaattaaggaagtgatcgtgtttttgggatgtagtaagcgtggtgatcgtatagttaatataataagttttagtattcgaattgtaattgagtttatttaagtaaagttatttttagtggggatttttttttttagagagtatgcgtattttgattttatttatttttaaattgattttttgtttattataatagtaaaaagcgtatttcgggtggagatttaagaagttaatgagatttgcgatatacgagttagtatgtatagttatttacgtttgtaattttagcgttttgggaggtcgaggtgggtagattatttgaggttaggagttcgagattagtttggtcgatattgtgaaaatttattttcgttaaaattataaaaattagttaggcgtagtggtttacgtttgtaattttaatattgtggaaggttaaggtaggtggatagtttgaggttaggagttcgagattagtttggttaatatggtgaaattttattttcgttaaaaatataaaatgagttaggtgtggtagtaggtgtttgtaattttagttattcgggaggttgaggtgggagaattttttgaatttgggaggcggagtagtgagtagagattttattagtgtattttaatttgggcgatagagcgagatttcgtttttaaaataagtaaataaataaaaataaaaaaataaaaatataaaaattagttgggcgtgttggcgggcgtttgtaattttagttatttaagaggttgaggtaggagaatcgtttgaatttgggaggtggaggttgtagtgagttgagattgcgttattgtattttagtttgggggatagagtgggattttattttaaaaaaataaaaataaataaataaattaattaattaattaataaaataaaatagaaatagggttttgttatgttgtttattatgtggtgaatttttttaggtgttgagtaagattggagattagatatatattaatgttatttgtagtaaataaaggatatttgtttatatttaaagtttatggtgatattttggttatatggggatgtttggttattttgttttttatttttatgttagagtcgtttgttataatgtttggttatagttttttttttgaggtttagggattttaaagtagaagtagtaggtttttttcggttggaggaagagttaaagtttttatttttgggatttttggttgttgttatttggggtaaggggaggtttaggttgtggcgtgtatttttagaggattggtcgttttggtttttttgttttttgggaaggaagggttggttttgtagggttttatttagattttttagtattttttattatttgatgtttttggggatattaagttttgtgtagtttagattatgttttagtttagtgtttattttataggtatgcgttattatgtttggttaattttgtattttttagtagagatggggattatttatgttggtaaggttggttttgaattttcgattttaggtgatttatttgttttggttttttaaagtggtcgggtagggttgaattcgtttttttattagttattgttaattacggatgaatggtttttgtttgttttttgttttttagattttattagggtattttattgggaaatatggtaatagtttttgttatttaggggatagtatggtaggggttgggaacgaatgttgttgttaaacgataagatttagttgggtttagtggtttatatttgtgattttagtggtttgagaggttgaggtaggaggattatttgaagttaggagtttgagagtagtttgggtaatatagtgagattttataaaataaaataaaaaaaattagttaggtatggtggttggtgttaataagtttagttattggggaggttgaggttaaggttgaggtagtgagttatgattatgttatcgtagtttagtttggtgataaatgagattttgttttaaaaaaaaaaaaaaaaaaaaaagaggaaggtgagcgtagtggtttatgtttgtaaatttagatattttgggaggttgaggtggaggttcgagattagtttgggtaatatagtaaaattatgtttttatataaaataaaaaatgagttaggtgtggtggtatatgttattggtgttagttacgtgagaggttgaggtgggaagattgtttgagtttgggaggttcgaagttgtagggagtcgtaatttaggtattatattttaatttggttgatagaatgggattttgtttttaaaattaaaagattttagttcgaaaaataattgtggggtggcggtaaaagtttttgattggttttgattttagagtgaattaatgaattaattaagggtttgtttgttagtgagttttttttgaaatttagtttagaaattttttaatttagtaagatgaagtaggaggtagaaggaattaagggggtaataagtaggaggaaggaatgtttttatgagggtgatattttttttgagagttttaggacgattagtaggaagttaggcggggggtaggtaggaggattttagaaagttcggtttgaggggaggttcgtgggggtggtggggagtggtgcggggaaggtagaggttgagtagtaggtgaggttttttgggttttgggggttaagtttggggttcggggcgagtaagtatgagtggagaaggggttgttgtggttgggttggggtggattttttatttgcgtcgtttaaatattagtgtgagtgtatttatataaatatatatataattatatataatatgtgagtaatgggtaggattggttcggttttatttagtgttgttattattggttttatagttgtttatagttttagagttttgggtttagatttttgttagttttatttgtttaggttaaggtaagatgatggagtaagggggtgttagggtagtaaagttttttacgtgttttttttttatagggtttaggtttttggtattaggaggttgaatttaggttttggtttagattgtgtgtttttagtttttttttttttcgatattagaatatagtttggttttagtttttgggaaatatagaaaaaaatgggtgaatgatttagtgatagggtgttttgttttatataagatatagtgagtaggggttgggggaggggtttttggttgcgggaggtatattatatttatttaaatggtatttgtatttaatatcgtattttttttgggggatacgtggttttaatttgagttgttttttttaggatattagttttagttcggtttagtttagttatattttgttattcgtttttagttagtgtggttttaggttaagaggttgggtagggttaaggtggtaacgaggggagaagtcgggatatagttttttttgatttaaattcgggtagtttggagtgtagtttatattttatgtttagaatttttgtttcgttattgttttgttgttttttagatatgttggggttttgtatgttgttgttgttgttgttgttgggtttgaggttatagttttttttgggtattattttaggtaatgaggtttttcgagttgtttttatataatatatatatagggtattttttagtttaggttgatttgatttttgttttttttttggttagt

SEQ ID NO: 94 - DNA, 5183 bp, Artificial Sequence
  chemically treated genomic DNA (Homo sapiens)
attggttagggggagagtaaaaattaggttagtttgggttggggggtgttttgtgtgtgtgttgtgtaggggtagttcggggagttttattatttgggatgatgtttagggagagttgtagttttaggtttagtagtagtagtagtagtagtatgtagggttttagtatgtttggagggtagtaggatagtggcgaggtaggaattttgggtatggagtatgagttgtattttaggttgttcgggtttaaattagggagaattgtgtttcggttttttttttcgttgttattttgattttgtttagttttttgatttgaagttatattggttgaaggcgagtggtagggtgtggttgggttgggtcgggttggggttggtgttttgagaaaggtagtttaggttgggattacgtgttttttaggaagggtgcggtattgagtatagatgttatttgggtgagtgtggtgtgtttttcgtagttaggagttttttttttaatttttgtttattgtgttttgtgtggaataagatattttgttattggattatttatttatttttttttatattttttagaagttggggttaggttgtgttttggtgtcgagaggaggggaggttggaagtatatagtttgggttagggtttgggtttagttttttgatgttaggagtttgggttttgtgggaaaggggtacgtggggggttttgttgttttggtatttttttgttttattattttattttggtttggataggtggggttggtaggaatttgggtttagagttttagggttgtgggtagttgtggggttaatggtgatagtattgagtggggtcggattagttttgtttattgtttatatgttgtgtgtgattgtgtatgtgtttgtgtgggtgtatttatattaatgtttggacgacgtaggtggggagtttattttagtttaattatagtagttttttttttatttatgtttgttcgtttcgagttttaggtttggtttttaaaatttaggggattttatttgttgtttagtttttgtttttttcgtattattttttattatttttacgggtttttttttaggtcgagttttttggagtttttttgtttgtttttcgtttggttttttgttggtcgttttggggtttttagggaagatgttatttttatggggatattttttttttttgtttattgtttttttagttttttttattttttgttttattttgttgagttaggaaatttttgggttaaattttagaggagatttattaataggtaggtttttaattaatttattgatttattttaaagttaaggttagttaggagtttttgtcgttattttataattatttttcgagttggaattttttggttttggagatagggttttattttgttagttaggttggagtgtgatgtttgagttacggttttttgtagtttcggattttttaggtttaagtaatttttttattttagttttttacgtagttggtattaatggtatgtgttattatatttgatttattttttattttgtgtaaagatatggttttgttatgttgtttaggttggtttcgaatttttattttagttttttaaagtgtttggatttatagatatgagttattgcgtttattttttttttttttttttttttttttttttgaggtagggttttatttgttattaggttggattgcggtggtatgattatggtttattgttttagttttagttttagtttttttagtagttgggtttattggtattagttattatgtttggttaattttttttgttttgttttgtagagttttattgtgttgtttaggttgtttttaaatttttggttttaagtgatttttttgttttagttttttagattattgggattataagtgtgagttattgggtttagttgggttttgtcgtttggtaataatattcgtttttagtttttgttatgttgttttttgagtggtaagggttgttgttatattttttagtgaaatgttttggtaagatttggagggtaggaggtaggtagaagttatttattcgtggttggtagtagttggtgagggggcgaatttagttttgttcggttattttgggaggttaagataggtggattatttgaggtcgggagtttaagattagttttattaatatggataatttttatttttattaaaaaatataaaattagttaggtatggtggcgtatgtttgtaaggtgggtattgagttggaatatggtttggattgtatagagtttggtatttttaagggtattaggtggtagagggtgttaagggatttagatggggttttataggattagttttttttttttaggaaatagaaggattaagacgattaattttttgagaatatacgttatagtttgggtttttttttgttttaggtaatagtaattaagaattttaggaatggaggttttggttttttttttagtcggggaagatttgttgtttttgttttgaaatttttggattttagaggaagggttgtaattagatattatgataggcgattttggtatgaaggtaggaggtagggtggttaagtatttttatgtggttagggtgttattatagattttgaatgtggataaatattttttgtttattgtaagtgatattggtgtgtgtttggtttttagttttgtttagtatttgaaaaaatttattatatagtgagtaatatagtaagattttgtttttattttattttattaattaattaattaatttatttatttatttttatttttttgagatggagttttattttgttttttaggttggagtgtagtggcgtaattttagtttattgtaatttttattttttaggtttaagcgatttttttgttttagttttttgagtagttgggattataggcgttcgttagtacgtttagttagtttttgtatttttatttttttatttttgtttatttatttgttttagagacggaatttcgttttgtcgtttaggttggagtgtattggtgagatttttgtttattgtttcgttttttaggtttaagggatttttttattttagtttttcgagtagttgggattataggtatttgttattatatttgatttattttgtatttttagcggagatggggttttattatgttggttaagttggtttcgaatttttgattttaggttatttatttgttttggttttttatagtgttgggattataggcgtaagttattgcgtttggttgatttttgtagttttagcggagatgggtttttataatgtcggttaggttggtttcgaatttttgattttaagtgatttgtttatttcggttttttaaagcgttgggattataggcgtgagtagttgtatatgttggttcgtatgtcgtaggttttattagttttttaaatttttattcggggtgcgttttttattattataatgagtaaagggttagtttgaggataggtaaaattaaaatgcgtatgttttttagaaagaaaagtttttattgaagatagttttgtttgaatgagtttaattataattcgaatgttgaggtttattgtgttgattgtgcggttattacgtttgttgtattttaagaatacggttatttttttgattatttattttgttttagtatcgttttttggaaatacgtgtatgttatattttgaaaaatattggttgagatgaaaatggaaaacgtagttggaatagttgtatttaatttggattaaatggtaagtttgttttttttttttttttttttttttttgagatatgttaaatattaaaattgtagaaaatagaaagatatggtttaaagaagagttatagaattgaacgttaaagtaatattatttagattaagaaattgattatagttaggatttttttatatgtattttgttttttatttaaattttattttttttttttttattaaagggaattattgattttgttttttgagatagagttttgtttcgtagtttaggatggagtgtagtggggtaattacggtttattgtagttttaattttttgggtttaagagatttttttattttagtttttcgagtagtggggattataggtgtgtgttattttgtttatttaatttttgtatttttggtagagatggggttttattatgttgtttaggttggtttggaagttttgggtttaagtttttttttttaaagtgttgtgattataggtgtgagtttttatttttagtacggtttaaattttttgatatttttttttttttaatagtttttggttagaatatgtttattagtaatatttttttttaattttttatgaataattatgtaagatttttataaagggagtttttttagtgttaatttttgttgttttatttttatgagtagtttgttttgaatttttttttttgtttattttgtattttatttttaagatgtttttttttttttgtaaaaattattgtatgttgtattttttttgttgttgtgttttttgtttaaattattttaagttaagaagataagaattaaagttttatattagttgttaatagtattttagattattttaggtggtgtgggtgttaaggtaattttattttggggtttgatttattaggttgatgaatgttagttttcggagggtttttgagattttttatttatgtcgtgtttttagtgcgggagtatttattttttataaattttgtttttaggataaaataattttgatgttattatattttaattgttttatatatttttttgaggttattttttttttgtggtttttggttttggggggtaaagttattattttgttttattgttatttgagatttagatatagtttttgtttgtaagtttttattaaatgtttttttttaagaaattggatatgttagtaatttttttgttttagttttttgtagtggtttacgtttttataggaggtcgaggtgggttgattgttggaatttaggattttgagattagtttggataatatggtaagatattgtttttattaaaaaatgtaaaaattagttgggtatggtggtatatgtttgtagttttagttatttgggaggttgaggtgggaggattgtttgaatt

SEQ ID NO: 95 - DNA, 6564 bp, Artificial Sequence
  chemically treated genomic DNA (Homo sapiens)
ttggagtgtaatggagtgattttggtttattgtaattttcgttttttgggttgaaatgatttttttgttttaggttttcgagtagttgggattatagtcgtgcgcgattacgtttagttaattttgtatttttagtagagatgggagttttattatgttggttaggttggtttttaatttttgattttaggtgattcgttttttttagttttttaaagtgttgggattataggtttgagttattttattttaaaaagatttttaatagaggatttagaacgatatgtttttgtagtgttttgcgtggatttggtagatagtaagaatttagtatagttatagtagttttcgtggtttgtaataattgtatttaattttggttttttagtaaaattattttttttaagggttttaattaagtattaagttttttagtagggtagggatgggtaaggtagacgttaaatgttttatatttattaggggattttaagtaggtttggggtaaggaagtttggatacgagttcgtattgtagttttttgagtttttgtttttggtttttgtttttatttgtatagaataatttgtgagtaaatttcggtggttttttcgggaagttttttgttgttttttggtggataagggaagtttatattttagtgtagttgtagttatgtatggagtttttagttggagtatatgcggtattaagcgtttatgatgataggggttttacgtatttatatatttggggtgtatttttataagtgatttttatttagttattatgttagttttgaagttatggagggaaatgattgttttattgtttcgtagtaagttataaggattaggatttaagtttttgggtggatttgttttttgggttggaggtgtagggatgagtaataatgtttagaaattatagggtagtgagaatatttttttatattattagttatggagttatgggtgttgtgtatttttagttatgttatgaggattttgagtggataggttgtggtacgaggttatggaaattgagtaaggttagatattggaggtaaggttttttgttacggagaaagttattttattattttattattggtagaggaggatttaaaggttgattatattttttggtttgatttttagttaatgtttttgatgtttttgtgggtttagttattgggttttagtgttttggttcggttttttttttttttttggaaaattttttaaggagttgtttttttgggtttttagtttacgttattttttgattgatttttttcgattattaatttggttgattttgatttttgaaaatttattagtgtttttgtgtatttttaagtaatattttttgggacggtaatacgattttatttattggattttagttatttttttagttttatttttattatttttttttgtttttaagttttagatttgtggatttatttgtattttttggataaaaataaaaataattttttatttttttttttaagtttttgtaattgttgttttttgtgtatggaatttattttttttttttatgtatttattttattgtattgttgtttagtttatttttatttttggagtttgatttttttgtttcggtttttgtttttttgattattgtagtaattattttgttttattatttttttatttcgtttgttttttaattttaggttttaagggagttttgggaggtttgttatatgtttattttgtttttagtattaagtatggagtgtgtatttggtaaaagaataagtagatataagaataaatgatgaggggagagtttgggtgttatagttaggtttatttggtttcgattcggttatatattgggtgattttgattaagttttattttttttttgagttttagtatgtgtatttgaaaatcgaggtttttattttatattgtattgggtatttttgaggttttgaggttttttgtgaggggtaagatttttttttataattaaatggttttagaatttagtaatttttatggatttttagatttttgggttttttaggagggtagggattttagagtttttatttttttattttagtagttagaaggggaggagggggtagtagttgtttgattattgttggttttgtaatttgtgtttttaggttaatttttaaaaagtagttaaaagtttaagtggtttttggtagtatttattttttttgtttgttttggttaataattttaggagtataaatatttttggaggtaggagaagaaattaatattttggatttattttttgggtttttttttatttttaggagaggttgtgtaattgaatgaatagttttgtttaagagaggttaggattggggtttttttatttttgcgcgttttaggttttttatttggattatggggttgataattgtagttacgtaggtttaatatgaaggttagcgagttattttggtgtattgtaagcgggtttagtaggatgattttatttttattaatgatttattgttatttatttatttttatattaggtttgttttttttaatggtagatatttttgagttattatataggtaaggtagtggatagtttatagtttatttttttatatattgttttttttggttttttgatagatagaataagaattgttttttttcgtttatagatacggaaagtggtttttagcgagggaaagttatttttaatattatgtagaataaggagaagttgggggttattatttttttattattattattaattaaaatattaaagattgagaaattttgtgaatataaggaatacgaagataattgttttagaaagttaaattaagatagtaattgtgtttaaatttatattatggttttgagttttttagtagttaaagtaagaagggaatataattattggttaaggttagggtgacggagtaaaggaaatatatttatgaatagaagtatatttgttttggatattagtgaaagagggatgtattgattgaattttatagaagggatatgatatattatttgtttttgtattgattatatgggggaattttttgatttttatataagtaggggttttaattttgggattgtttgttcgaaggggttatttttagttttaatagagaggtggttgagagtatggaatgttttatgttaagagtagggaggaagtaaggatagtagatttaattattggagaagggaaatttatagagaggtttttggtattgttggtaagagtgtgagtttatagataacggatttgggttttaaaaaatttttatttaaaattttaaatttaggttgagcgtagtggtttacgtttgtaattttagtattttgggaggttgaggtgagaggattatttgaggttaggagttagagattagtttggttaatatggtgaaacgttgtttttattaaaaatataaaaattagttaggtatggtggtgggtatttgtaattttagttattcgggaggttgaggtataagaattattttagtttagaatgtggaggttgtagtgagtcgagatcgtattattgtattttagtttgggcgataagagtgaaatttcgttttaaaataataaataaataaataaaattttaagtttaataattattgtattagttttttagggttgttaggaaatgtgtttttttttagtattggaggttagatatttgagattaaatttttagtagagttatgttttttttgaagattttggggaaaagtttttttttgttttttgttagtttttggtggttgttattaatttttggtgatttttgacgtgttattgtattttttttatttttgttttcggcgttacgttatatttttttcgtgtttttttttgtgtttttgtgtttgagttttttttattatttttttataaagatatcggttattggatttaaaatttttgttatttagtttaattttatttaattaattatatttgtaaattaggtttattttgcggttcggggtgtatatggattttggagggggtattgtttaatttattataaatatttagtttttattttatgttgggtattgttttagcgtattgtaggtgtttatttaataatgttaggagttaggaattattattatttttatttatagatgaggaaattaaggtattgaaaggtaaagtgatttgtttaaggttatatagtagtgagtgttattgtaggttgtttggtttttacgtttatggtttttattacgttttttttagttattttattttcggttgagggattttgggtaagttattttattttttggagatttaatttttttgtttgtaaaggggataaatagtatttatttcgtaagtttgttgtggggatttattggatatttgtggtacgtgtaaagtgtttggtatatagttagtatatagtaggtgtttagtgaacggaagttcgtaatagttattattgttaatgtttttattatttgtaaaggttagggtaagtttgggggttggagaaggaattttggagataggatatttgggttttggttttggttttgtttatagatttttttgaggtttttggtaagttattttttttttttgggttttagtttttttttgtgagaaatgggtttaattaggtttgatttgttggtttatagagttgtgaggtttagatggtatgatttagtagaaaggttaggtcgttttttattttcgtatgttttttgtgggggatttttggggggcggagtttaattttggtgttttagggttttattgtgtttggttaatgttttttttgaagtagttatttcggttttttggtattgttgattttagttaggttatagggatcgattggagttgtttttggggttgtaattggttttagttgagtagggtaaatattgaggttaattataagttataggttttttttttagttttagtttatagttgttttgttgtagggaggcggtggtttttttgttgttagatcgagtttgtgggatatattaaggtagaggagtttatagttatgaggagtttcggggttttgtttttgttgttgagcgtttgtttggcggtgagcgttggttttgtgttaacgtcgttcgataatatttaagtgtaggaaaattttaatatttttcgggtaaggttgtcgttttttgtggtagggtggatgtggtgatggggagtttaggtagatgggttttgttgggtaagtgcggtttgtttcggggttttaggtttttatttagattatttgggattatgggattttttgaaggtatagttttattttttgttatttcgtgggttttttggttgatattttatgagttaaatatttttattttttgtattgttttcgtgggttttaaggggaatttttgtgttaatgggaatttgttttagagaaggttttgttttgtttgttattgttttgtagttttcgtgtagatatttagttttgtttagattttttagtttttttttttttaatgatttttttttttttgtggtattttttttttagttttttttgtgttttttgtttatattttggtttgattgtggatagatatttggggtggtatagcgtgggtatgtggttagtagtttttgggttgggtatgtggggtttatgggaagaggtgaagtaggatagagattagggttgggagatatttagaggtttgggtataaggagagatttggattggggtaggatatttttttgtgagtgtggagtgttagagttgttttttagtttttattttgttttaaatttcggggtggttttgagaatatttttgtttatttggggttgtttttatgtttgtatgaagggttttagaattttttagttgtggtgttatgtgggttttgtttatttttagggataaggaaaggtcgtggtagaggggtaatgaggagtaggtttttgtggtagtttgggacgtaaagggtgtggggtatattggtttgtttcgtaggagtttgagggtttttttagttgtttcgtgtatttttaggaggaagaggaagtaggtttattttgaatgattttattatgtttattatatttttgaaataatttttaatatggggttgtgggttgttttgtaaggtggggagtattttattattggaggagtaaaagataggattttagtttttggggagtagtggttgatggagttatggatagattttatattttgagagagttagtttttttgtagggtaggttgggattttagtcgtatatttgttttttgggttcgttgtgatgtttgaaacgttatttttagggatttggttttttttgaaggtgtgtggtttttgattagttgtaagatattattttttaaaaggataagttattttgaggagaaggaggaggaagaggaggaggtggagggtggggagtagatgttagttaggtttgttttgaggtttgagattgatgtagatttttagagtttatttgttttttaga

SEQ ID NO: 96 - DNA, 6564 bp, Artificial Sequence
  chemically treated genomic DNA (Homo sapiens)
tttaggaggtaggtgagttttgggggtttgtattagttttagattttaaagtagatttggttgatatttgttttttattttttattttttttttttttttttttttttttttaaaatgatttatttttttaagggataatgttttataattaattagaggttatatatttttaagggaggttagatttttaagagtggcgttttaggtattatagcgaatttaggaagtaggtgtgcggttggggttttaatttgttttgtagaagggttaatttttttaagatgtgggatttgtttatagttttattaattattgttttttaagagttggagttttgttttttatttttttaatgatggggtgttttttattttgtaaggtagtttatagttttatgttaggaattattttaaaagtataatgaatatgatggggttatttaggataggtttgtttttttttttttttgaaagtgtacgggatagttgaaggagtttttaggtttttacggaataggttaatgtgttttatattttttgcgttttagattgttatagggatttgttttttattgtttttttgttacgatttttttttgtttttaaaagtaaataaaatttatatgatattatagttagaaggttttgagattttttatatagatatggagatagttttaggtgggtaagggtatttttaaagttatttcgggatttagggtagagtgggggttggaaggtagttttggtattttatatttataggagagtgttttgttttagtttaggtttttttttgtgtttaagtttttgaatgttttttaattttaatttttgttttgttttatttttttttataagttttatatgtttaatttaaaagttgttggttatatgtttacgttgtgttattttaggtgtttgtttatagttaggttaggatgtgggtaggggatataggaagagttaagggaaagatgttatagagagaggggagttattagagaaggaagggttgggaggtttgggtaaagttaggtgtttgtacgggggttgtagggtagtggtaggtaggataaagttttttttggagtaggtttttattaatataagggttttttttggagtttacgaggatagtgtagaaggtgaggatgtttgatttatagaatgttagttaagagatttacggaatggtaggggatagagttgtatttttaaaggattttataattttagatgatttgagtggaagtttgagatttcgagataggtcgtatttgtttagtagggtttatttgtttggattttttattattatatttattttattatagagagcggtagttttattcgagagatattgaagtttttttgtatttggatgttgtcgggcggcgttggtatagggttagcgtttatcgttaggtaggcgtttagtagtaagagtagggtttcgaggttttttatggttatgggtttttttgttttggtatattttataggttcggtttagtaatagaagggttatcgtttttttgtaatagggtagttgtgaattgaggttggggaaggggtttgtggtttgtagttgattttagtgtttgttttgtttagttggggttaattatagttttaaggatagttttaatcgatttttgtagtttggttggggttagtagtattaagaggtcgggatggttgttttagaagaggtattggttaagtataatagggttttggagtattaggattgggtttcgttttttaaaagttttttatagagggtatgcgaggatggggagcgatttggtttttttgttgagttatgttatttggattttatagttttgtgagttagtaggttaagtttgattgggtttattttttataggaaaaaattgaggtttaaggagaggaagtgatttgttagagattttagggaagtttatgggtagagttaagattagaatttaggtattttgtttttagagttttttttttagtttttaggtttgttttagtttttgtaaataatagagatattaataatgatgattgttacgagttttcgtttattgagtatttgttatgtgttggttgtgtattaggtattttatacgtgttataggtgtttagtaaatttttataataagtttacgaagtaggtgttatttgttttttttataggtagaggagttgagtttttaagaagtgaagtgatttgtttagaattttttagtcgggagtggagtagttgggaaaggcgtggtagagattatggacgtgggagttaggtagtttatagtggtatttattgttgtgtgattttgggtaagttattttattttttagtgttttggtttttttatttgtaaatggggataataatagtttttagtttttagtattgttgagtgagtatttgtaatgcgttaggatagtatttagtatagagtaagagttgagtgtttgtggtgggttgaatagtgttttttttagaatttatgtgtatttcgaatcgtagaatgaatttgatttgtagatgtgattagttagatgaggttgaattggatgataggggttttaaatttaatgatcggtatttttataagagaatggtgagggagatttagatatagggatatagagagaagtacggggaagatgtggcgtgacgtcgaaggtagagatgggagggatgtagtgatacgttaaaaattattaaggattgatggtagttattaaaagttagtaaaaggtaaggaaggatttttttttagaatttttaaagggaatatggttttgttgaaaatttggttttaggtgtttgatttttagtgttgagagaagatatattttttagtagttttaggaaattaatatagtagttattaaatttaaggttttatttatttatttattattttgagacggagttttatttttgtcgtttaggttggagtgtagtggtgcgatttcggtttattgtaatttttatattttgggttgaagtgatttttgtgttttagtttttcgagtagttgagattataggtgtttattattatgtttggttaatttttgtatttttagtagagatagcgttttattatattggttagattggtttttaatttttgattttaggtgatttttttattttagttttttaaagtgttgggattataggcgtaagttattgcgtttagtttaaatttaagattttaaatgagaattttttaaaatttaggttcgttgtttgtgagtttatatttttgttagtaatattaaaggtttttttatgaattttttttttttagtggttaaatttattgtttttattttttttttgtttttggtatggaatattttatatttttagttatttttttgttagagttgggaatgattttttcgggtaggtagttttaagattaagatttttgtttatgtgagaattaaaggatttttttatgtagttagtgtagaaataaatggtgtattatgttttttttgtaagatttagttagtatattttttttttattggtatttagaataagtgtgtttttatttataaatgtgttttttttgtttcgttattttaattttggttagtgattatattttttttttgttttggttgttaggaagtttaaagttatgatgtaagtttaagtatagttattgttttggtttagttttttgggatagttattttcgtgttttttgtgtttataaagttttttaatttttgatgttttagttaatgatggtaatgaggaggtggtagtttttaatttttttttgttttgtatgatattggaggtggttttttttcgttaaagattatttttcgtatttgtgaacggaagaaaatagtttttgttttgtttgttaagaggttaagagagataatgtgtgaggaagtgaattgtaaattgtttattgttttatttgtgtggtggtttaggggtgtttgttattggaggaggtaggtttggtataagaataaataaataataatgaattattaataggaataaaattattttattaagttcgtttatagtgtattaagatggttcgttgatttttatgttgggtttgcgtgattatagttattaattttatggtttagatgggaagtttgagacgcgtaggggtggagaagttttagttttagttttttttggatagggttgtttatttagttgtatagttttttttgggggtggggagaggtttagaggataagtttaggatgttgatttttttttttgtttttaggaatgtttgtgtttttgagattattaattagagtaaatagagagagtaaatgttgttaagggttatttggatttttgattgttttttaaaaattaatttggggatataagttgtaagattaatagtggttagatagttgttgtttttttttttttttttggttgttggggtgggaggatggaggttttggggtttttgtttttttagggggtttaggggtttaagagtttatgggaattgttaggttttgaaattatttggttgtgggggagggttttgttttttataggaggttttagagttttaggggtatttagtgtaatgtggaatagaggtttcgatttttagatgtatatattggggtttagggaggggatgggatttggttaaggttatttagtgtgtggtcgagtcggggttagataggtttgattgtggtatttaggttttttttttattatttatttttgtgtttatttgtttttttgttaaatatatattttatgtttggtgttgaggataggatgggtatatgataggttttttagagtttttttgaggtttggggttggggaatagacgaggtgagaaggtgataagataggatggttgttgtagtgattagggaagtagaggtcgggataggggagttagattttaagagtaggagtgagttagataatagtgtagtgggatgggtgtatgggggaggggagtgggttttatgtatagggaatagtaattgtaaaggtttagggaagaaaatagaaaattatttttatttttatttaaaaaatataaataaatttataggtttggagtttggggatagaagggagtggtgagagtgaggttggggaggtggttgaggtttagtaggtgggatcgtgttgtcgttttaaggggtgttgtttgggagtgtataggggtattggtgggtttttagaagttaaggttaattagattagtaatcgggagagattaattaggaggtaacgtaagttggagatttaggaaagtaattttttaggagattttttaggaagaaggaaggggtcgggttagggtattaggatttagtgattggatttatagggatattagggatattgattgggagttagattagagggtgtggttaatttttgagtttttttttgttaatggtggaatgataaggtgatttttttcgtgataggaggttttgtttttaatgtttgattttgtttaatttttatggtttcgtgttatagtttgtttatttagggtttttatggtatagttggaggtgtatagtatttataattttatgattggtgatgtggaggggtgtttttattgttttgtgatttttaggtattgttatttatttttatatttttaatttaaagagtaagtttatttagagatttgagttttagtttttgtggtttgttgcgggataatggggtagttatttttttttatggttttagagttgatataataattgaatgagggttatttgtgaaaatgtattttaagtgtgtagatacgtaggatttttgttattatgggcgtttggtatcgtatgtgttttagttaaggattttatatatagttgtaattgtattaaggtgtgaattttttttgtttattagggggtagtagagaatttttcgaaagaattatcggagtttgtttatagattgttttgtatagatggagatagaggttaggagtaaaggtttaaagagttataatgcgggttcgtgtttaggtttttttgttttaagtttatttaaaattttttggtgagtgtaaaatatttagcgtttattttgtttatttttattttgttagagagtttgatgtttggttggggtttttaaaaaaaatagttttgttggggaattagaattgggtgtagttgttgtagattacgaaggttattataattgtattaagtttttattgtttgttaagtttacgtagagtattataagagtatgtcgttttaaattttttattaagaatttttttggagtggagtggtttaggtttgtaattttagtattttgggaggttgaagggggcggattatttgaggttaggagttggagattagtttggttaatatagtgaaatttttatttttattaaaaatataaaattagttgggcgtggtcgcgtacgattgtaattttagttattcgggagtttgaggtagaagaattattttaatttaggaggcggaggttgtagtgagttaagattattttattgtattttag

SEQ ID NO: 97 - DNA, 6365 bp, Artificial Sequence
  chemically treated genomic DNA (Homo sapiens)
aatttatattttatataatgtataaaggttgtatattttttgagggtcgatattatattatatataatatgtgtttttttaaaaattaagatataatttatatattataagatttattattttaaagtgtataattgagtggtttttagtatatttataagattgtgtaattattattattgtttaattttagaatatttttattattataaaaagaaatttggggtttattagtagtaattttttatttttttttttttttaatttttggtaattatgaatttattttttgtttttatggattttgtttatttttggtattttttatatagttatatagtatatggtattttatgattggttttttttattgaatgtaatgtttttaaggtttatttatgttgttgtatggattagtgttttattttattttatggttgaataatattttaaaaaattattaatttatgtatgtttttattgaattttagtaggaaagttgaatttattttggtatattttatttaataaataggaataaaaatgtttgtttttatattattgttttattttttttaatatagatgtattatttttatttttgatagttattagttaattataatttaaataatatattttttaattgtatataattttttttgttgaaaattgttttatttgatatttagtaaatgtttacggattttttaaattataagttgtatgaatttttgttgtgaatgtttatattattaaaatattttttatttatgatttaaaagggtttttttattttaaaaaatcgtgtgtttttttttgttttggattttatgttgaattttttttttttttaagaatgaatattggatatatttagggtttatgtaagtagtattattatttatttattttttttgttgaatatgagtgagaaatattatattttaaatttttcgtattttttttgtatttgttgtatttatagattatttaaaagaaataaatttaaatttcggttatttagagatttttaaggagtttttagataattattgtgttttggcgaatatttttttaaatggagagaagggagagtagggagggagggagaaaaaaattagagaaggggattttaaaaaatttatttttttatttaataatgtattattaatatttttttatgttgataaacgtagagtgatatttttattttgaatgttatttgtgttataatcgatttgaattagtttcgttattggtagatattttgttttaaatgttattttataggttaggcgtagtggtttatgtttgtaattttagtattttgggaggtcgaggtaggtagattatgaggttaggagatggagattattttggataatatggtgaaatttcgtttttattaaaaatataaaaataagttgggtatggtggtatgtgtttgtaattttagttatttgggaggttgaggtaggagagttatttaaattcgggaggtagagattgtagcgagtcgagattgtattattttattttagtttgggcgatagagcgagattttgttttaaaaataataataaaaaattatttattatagtgtatttgtttggagtatattataatttgaattaagaggttagagttaaatgtaatgagattgttaggataatagattttagcgtttttatagtatttttttttttagatatttattagaggttatttgtatagaagtttataggagtagttgagagtaatgttgaattatttattttagttattgaaaaggtttatttaaattattgtaggattttttttagaatttatattttttatgtttataatgttatggaaaatttttttatatttttattaatttattaatatatttatttagtatttattttgtataagagttttttttaggtattaaggagtttttaagaaagtataagatataatatttgatttttaagggttgcggtggggttaaagttacgatgtgtatcggaatttatcggtggttttgtgtttaagatttgaagattatataattttaattttattttagtaaaaaaaaaaaaaaaaaagttattttagagaatgatgtttttttgtaagtaaatatttatagagaaaatatttaaaagttagttttggttttagttatttaagaagatttattgttgaaattattttagaatattggataattttggggatgttttaaaagaaggtttaagagttgaatttttatagatgataggaaaggttttgtaaatttataatatttgatttatttaaaggttatttttatatttcgagtgttgttgaaatttaggtagtaagttagtggagaggaattttaaaataaattaaatatttttttagtagttaaaaataagtgttataaaatcgaaatttatttgttttttttataggcgaggtttttttaggttagttttatttagagtgtttttttatttttagtttacgtatatttttaataagtttgggtatatgattttttagtatattgtaaattagaagtagtaaattagaagtggggaagttgttaatataagtattgtgagaatagtaaaacgtattgggttgtaagttaagaaaaagaatatttattataaaaaaatgagtaaaagaattattttatgtagttaatttatttataaataaaataattgtttataggaaaaatattttaattgaaattttattttttttaaaatatttattaatttttaagttgtgtaagtggggtttaaattagtggaagagattttaaatagagatttatattttaatgttttatgatttaggatatgtagtaggggaaaattaattatttttatggaatcggttattaaagtttgtttaattgtttatggtgaattagcggtaatttattatttagtggtttagaggaattaatgttatattaaggtagtattttgttgattattatggttaaatatattatttttttatttttagaaggtgagaaaaagtataagattaatttttttaaaattataaggttattagtaatttattattgattttattagtagagattatttataattttgtagaaaaaaaaaatattttgaatttttttagatattttaatatatgtaattatataaaatgggggaaaaagattgaaagtgaataaaatgtgatttatattttttttttttttttttattattttgttgtatatttttgttaatttttttaaggtttattttttaattttttttaaagggaattttttttgtttttgttataaaatttattaataaatatatttataaataaagttaaattttggggatatttggtttttagaattatattttatgtttttttttatgtatatattttatttgttataattttttatttttttttttgtaatttttttttttttgattggaaggttttatttttttttgtaatatttatttttattgatttatttttaaagattattttggaattttgtttattagtattttttaaatatttattgtatgttagttgatagggttggggagagtaataaatagatttttatttttttagagatgttatttatttattttttatatgaattttttgagttaggttttgttattatttttattttatatattaggaaattgaggtttagataggttaagtaatttgtatatatacgtataaatatatgtatatatataaattttataagtattatttgtgtatttaaagagatttaagtataatattaattgtatttgggtagatatttagtattttttttattgatttaatattgatggacgattcgttagttagtttttgttattaattataattttgtttaattagattaatttaattaaattttagaatgaaagaaaaagtttatgtgttatattaaggtagaggggtaaaatatatatgaatttaataggtagatgattagaggtttttttagaaagtgaatagttttggttattgtttagggaaaggggaggttgttgagaatatggaaataaagtagttagttagatagttaagagattttgaaaaatagagaggaatttgggtttgtttgtatgagaaagtgggattgggttagaaggatatgggtaaagaagggtcgttatattgagaggttaagttgttttgtgagatgggaggtaaaggataatattttttgtgatatgagtttgtttgtaaaaaataaaatttattttaaaatgtgttgtttggtgtgtattttttgttttgtagtatagattattagtaaaagttttgttattgtaagaattttaagtttttgattgtttttacggtagatgggttttagtatggggtcgagaaggggttttgttttttgttttggtggatattagaggggtgataaaggagtagttaaggggaatagagaaaaaatatttttaatggaagtagataatagagtagtggtgattttaaaattataattttttagagagaaattagagagagttttggggttttatttaaatgggaatttgaattaattttttttgatttgaaagggttggaaaaattttggaggatatttagattatattagagaattttaattatttattttgatttttgtaaagaataacgttgtttgttagaattgaggaaaaggcgatggtagagaagttttttaaaaataaatttgaatatattaatatgtatagttaattaatttgttgattttaaaatagcgtgatgaaattttttgtttgttaaatttattattgtttataatgaaagattttatatgtattaattataatatatagttttatgtttgattatagtttttaaaaaattatgatatagggatttttagttatatttaatatattttttttttagaaattggattggttgttatagatgttatgaatgatataaattgagtttatagttggaagaaatttaaaggattaagtatttttgagttttaaatagaaatttgtattgaatatatttaaaggtatgtggattttatttataatttgatattttttttattgtgtttatttttttttttgtattttttttaaaagatataaatgtattttatatttttaatattatatgttattaatagttattttttagttggtttataattaaattagattttgattattgaaatgatttttaattttataatgtaataaagtgtttgtttaattttaaaggttttttttggttatattttatagtaaaatatttattttaattaattatcgattaaagtaaaaataatatatttataggttgtgatttattattttgaaaagttttttatttaattatataaaatagaattatttatgaagtgtttttttttattaatttaaataaataaataaataaaaaataaatttaggagttagaaaattttagtgtattttttatagatagtattattatatgtaatatttattttttatataaaatttaaggttttttttttgatagtttttttagtaatttgtgttataaattaatgtgtatattttaggaggatttgttttgtttaatgttttaagggttttatttatagaataattatagtgtaatattaaataaaatgaagattttattgaaagaaaatgaaattttttagggagaaagtatttaaaatttattgaagaattatataaaattcgtattatttttttttgttggtttagttatattttttgttttataatttggagtttagagatgttattggagggttttgtttgaagttttgtagataggaatttttggaattaaaatttattttggtaaattaatatatttttttaaatgattagtttttgtttttaatagtagtaatgtttaggtagattgtgtacgagatatttttgtgtttttttgttttaaaattataaaatattgtgtattttgatgatttttttaatttttagagttaattttatttttttaattattaattataaatataatttagtttttatgattaagggttgtataggtataggaaaatggtatgtaaagttatatgaagatagattatttatgtttttgtaatttgtttagtttttaatttaaattaaatgtatttttattattattgtgattttagaaataatgaaataggttgagagttggaaattatatatgattgaagtaaatttataaataatggttttattttttttattagtaatagattaatgtagattatgtgtgttttatggagtatttattatatttatgttttagaagagataagaaaagtggatgttgatttatattttaga

SEQ ID NO: 98 - DNA, 6365 bp, Artificial Sequence
  chemically treated genomic DNA (Homo sapiens)
tttgaaatgtaagttaatatttattttttttattttttttgaaatatggatgtaatgaatgttttataaaatatatataatttatattagtttattgttagtaagaaggatggagttattgtttgtgaatttattttagttatatgtgatttttagtttttagtttattttattgtttttggagttatagtagtgataaagatgtatttaatttaggttgagggttaaataagttatagggatatgaatgatttatttttatatgattttgtatgttatttttttatgtttatatagtttttagttatagaagttaaattgtatttataattaatgattaaaggaataaagttggttttaaaggttgggaagattattaaagtgtatagtattttataattttagaataaggaggtatagaaatgtttcgtgtatagtttatttggatattgttattgttaaaaataaggattaattatttgagaaaatatattaatttgttaagatagattttagttttagaaatttttatttatagaattttaggtaagattttttagtaatatttttgagttttagattgtggagtaaaagatgtggttgaattaataggagaggatggtacgaattttatgtgattttttaatgaattttgaatattttttttttaagaggttttatttttttttaatggaatttttattttgtttgatgttgtattgtaattattttataaataagatttttgggatattaagtaaaataggtttttttaaaatgtgtatattgatttgtggtataaattattgggaaaattgttagaagaaagattttaaattttgtataagaagtgaatattatatgtgataatgttgtttatgaaaagtatattaaagttttttaatttttaaatttgttttttgtttgtttgtttgtttgggttaatgagaaaaaatattttatggatggttttattttatgtaattaaataaaaagttttttaaagtagtagattatagtttgtgaatgtattatttttattttaatcgataattaattaaaataaatattttattgtgaaatgtggttaagaaagatttttggaattagataagtattttgttgtattataaagttaaaaattattttagtaattagagtttaatttaattatgggttaattaaaaagtaattattgatggtatatagtattagaaatgtagaatatatttatattttttaaaagaaatgtagagaaagaaataagtataataaaaaggatattaaattataaataaaatttatatatttttgaatgtatttagtgtaagtttttgtttgaaatttagggatgtttgattttttagattttttttaattataagtttaatttatattatttatggtatttgtaataattaatttagtttttaaaggaaaaatgtgttgagtataattaaaaatttttgtattatgattttttagaagttatgattagatataaggttgtatgttgtgattagtgtatatggaattttttattatgggtaataataggtttaataggtaaagagttttattacgttattttgaagttagtaaattagttgattgtatatgttgatatatttagatttatttttaaaaagtttttttgttatcgttttttttttagttttagtaaataacgttgttttttataaaaattaaggtaggtggttgagattttttagtgtaatttggatattttttaggatttttttagtttttttagattaggagaaattgatttaaatttttatttgggtaaaattttaaagttttttttagtttttttttgaggaattataattttgggattattattgttttattatttgtttttattgaaggtattttttttttgttttttttggttatttttttattatttttttggtgtttattaaaataggggataaagttttttttcggttttatgttgaaatttatttatcgtaaaaataattaggaatttaaggtttttgtagtagtaaagtttttattgatgatttatattataaggtaaggagtgtatattagatagtatattttaaagtaaattttgttttttataagtaaatttatgttataggggatgttgttttttgttttttattttatagagtagtttggttttttagtatggcggtttttttttgtttatatttttttggtttaattttatttttttatataggtaaatttaaatttttttttattttttagagttttttaattgtttggttagttattttgtttttatgtttttagtagttttttttttttttaagtaatgattaaagttatttattttttaaaagaatttttgattatttatttattaaatttatgtgtgttttatttttttattttggtataatatatgggtttttttttttattttggaatttgattagattgatttaattgagtaaagttgtaattagtggtaggagttaattgacgagtcgtttattaatattagattaataaaggagatattgaatatttatttagatatagttgatgttatatttggatttttttgaatatataagtaatatttataaagtttgtatatatatatatgtttatacgtatatatataaattatttagtttgtttgagttttaattttttgatatgtagaatggaaataataatagaatttagtttagggaatttatgtgaaaagtagatgagtgatatttttggggaaatggaagtttatttattattttttttaattttgttagttggtatatagtaaatgtttaaagaatgttaataaataagattttaagatgatttttggggataaattagtagggatgaatattgtaaagaaaggtaagattttttaattagggagagagagattgtaaagaaggaagtagaagattataataggtaaaatgtatgtatgaaaagaaatatagaatatgattttaaaagttaaatgtttttaggatttggttttatttatgaatatatttattggtgaattttatagtagagataagaaggattttttttgaaggaagttggaaaatggattttaggaggattggtaggggtgtatagtaaggtggtaagggagaggaaggaaaatgtggattatattttatttatttttaattttttttttttattttatataattatatatattggagtgtttgaaaggatttaggatattttttttttttataaagttgtgggtaatttttattaatgaagttaatgatgaattattagtagttttgtagttttagaaagattgattttatatttttttttattttttaagaatgagaggatgatatatttggttataatgattaataggatgttgttttaatgtggtattaatttttttggattattggatagtgagttatcgttaatttattatggatagttgaataagttttgatggtcgattttatagaaataattgatttttttttattgtatattttgaattataggatattaaaatatggatttttgtttgaaattttttttattaatttaggttttatttatatagtttaaaaattggtaaatgttttgaggaaaatgaaattttaattgaaatattttttttataagtaattattttatttatgaataaattgattgtataaaatagtttttttgtttatttttttgtagtaggtatttttttttttgatttgtagtttagtacgttttgttgtttttataatgtttatgttagtaatttttttatttttaatttgttgtttttaatttatagtatgttagaaaattatatgtttaagtttgttaaaagtatgcgtgaattgaaagtaaaggaatattttaagtggggttggtttgggagggtttcgtttgtgagaaaagtaaatgaatttcggttttgtgatatttatttttgattgttgggagggtgtttggtttgttttggggtttttttttattggtttattgtttgggttttaatagtattcggggtatgagggtggtttttggataagttaggtattatgagtttgtaaagttttttttattatttgtaagagtttaatttttgagtttttttttaaagtatttttagggttatttaatattttggaataattttaatagtgagtttttttaagtagttggagttaaagttggtttttaaatattttttttgtagatgtttatttataagaaaatattattttttaggatagtttttttttttttttttttgttggggtagagttggagttgtatgatttttagattttaggtataaaattatcgatgaatttcgatatatatcgtaattttgattttatcgtaatttttagaaattaggtattgtgttttatatttttttgggagttttttggtatttagaaaaagtttttatataaagtaggtgttagataaatgtgttgatgaattaatgaaaatgtagaaaagttttttatgatattgtaaatatagaaaatgtggattttgaaagaaattttatagtgatttagatggatttttttaatagttaagatggataatttagtattgtttttaattgtttttgtggatttttgtgtaaatgatttttgataagtatttgaaaagggagatgttgtaaaagcgttagaatttattattttaatagttttattatatttggttttgattttttagtttaaattataatatattttaaataaatatattatgatagataattttttgttgttgtttttgagatagagtttcgttttgtcgtttaggttggagtgaagtggtatagtttcggttcgttgtaatttttgtttttcgggtttaagtgatttttttgttttagttttttaagtagttgggattataggtatatgttattatgtttagtttatttttatatttttagtagagacggggttttattatgttgtttaggatggtttttattttttgattttatgatttgtttgtttcggttttttaaagtgttgggattataggtatgagttattgcgtttggtttatgaagtaatatttaaaataaaatgtttattaatagcggggttggtttaaatcgattatggtataaatagtatttaagatgaggatgttattttgcgtttgttaatataaaaagatgttggtgatatattgttaagtggaaaaatagattttttaaagtttttttttttaatttttttttttttttttttttgtttttttttttttttatttggggagatattcgttaaaatatagtagttatttagggattttttgaaaatttttgggtagtcgaggtttaaatttattttttttaaataatttgtgaatgtaataaatgtaggggaaatacgagaagtttggagtatgatattttttatttatgtttagtaagagagatgagtaagtgatagtgttatttgtataggttttgggtatatttaatgtttatttttagggggaaaaaaggtttaatataaaatttaagataaaaaaaaatatacgattttttaaagtgagagagtttttttaaattatgagtaggaaatattttaataatataaatatttatagtaagagtttatatagtttgtaatttgaaaagttcgtaggtatttgttaaatattaggtggaataatttttaataagggaaattatatgtagttgaagagtgtgttgtttggattataattaattggtaattgttaggagtgaaaatggtatatttgtgttaaaagaggtaggatagtaatgtaaaaataagtatttttatttttgtttattgggtaaaatatattaaagtaagtttaatttttttgttgaggtttagtggagatatatatagattagtagttttttaaaatattgtttagttataaaatggaatgaagtattgatttatatagtaatatggatgaattttgaaaatattatatttagtgaaggaagttagttataaaatattatatattgtatgattgtataggaaatgttaagaataggtaaaatttatagaaatagaaagtagatttatggttgttaggggttgagggaagggggaaatggggagttattgttaatgagttttaggtttttttttgtgatgatagaaatgttttggagttagatagtggtgatggttgtataattttgtgaatatattaaaagttatttaattgtatattttaaagtggtgaattttatggtatgtgaattatattttaatttttaaaaggatatatattatatatggtatgatatcggtttttaaaaaatgtatagtttttatatattatgtaaaatatagatt

SEQ ID NO: 99 - DNA, 6215 bp, Artificial Sequence
  chemically treated genomic DNA (Homo sapiens)
ttttgggtttttagtgtagtttatttgttttttttgtgtttgtgtttgttttgtgtttattgttggcgtggtggcgtgggtagtggacggttttttgtttcgggagtgatcggcggtgttgttttggttgtgtttttttttgatttagaattattaggaaggtggtgtcgggggttttttgggaatttttattgttcgaagtttggtttatagttttaggtggtgatattcgtgtttacgaaggtttttcgttggatttttcgtttttagaaatgtttgattattgttagcggtagttatgtttttatagaaggggggttttgtttttatgtttttatagaaaggggatttcgtttttgagggttttgacggtagtaggtcgcgattttttgtttaacgggtttttgttttttttttttaggattcgtattttatgaagaattatttgggtttttatgaatgtaaattttgtttgatattttataataatgaggtgcggtttttgtttggtttcgggcggttcgcggcgggttgagtggttgacgttagggggatttgtttgtgtttgttcgttcggtttcgagttatgcgtgttttttttttattttaggggagttatttggtatatacgtaggggaagaagtattagattaatttgtgagtattttatgtttttttgatgtttggtgttttagtagtcgttggtttaagtttttgtgagtttcgcgggttattgttttatagtcggggagttagtttggtttgagtttttttgggcgtttgagtacggtttttggggagtattagagaatagaggtatggatggttgaggcgggtagattatttgaggttaggagttcgagattagtttggttaatattgtgaaattttatttttattaaaaatataaaaattaggttaggtatggtggtatacgtttgtaattatagttattatggaggttgaggtaggagaattttgaatttgggaggtagagattgtagtgaattaaggtgttgttattgtattttattttgggcgatagagtgagatttttgttttattaaaaaaaaaaaaaaagagtagaggtatggagttgttggaagggttttagttagggatagtgaggagtatgataggaagagaatatgtttgttttatttttgtttttagttaaattttagggttttttttaggtttttggttttttttattttttagtttgtagtgagttttaaggttagggggtttttggtatttgggtttatggttttggtgtttgtgtgtggaggggttttagtagtatttttattttgttcgtagggttcggcgagtagttaaggaggttaaggaggtttttgtttagttcgcgtttgagaaggttaaggtggaggtgaagaagtttgtgaagatcggtcgttcgggttataaaggtgagtttgttcgtagcggggtcggttatagtcgttgtcgtgatataagtgtgttttttagtttttagtgcgggaggtgtagttttgatagttttttttttgagttattgtttttcggttttggtggtcgttttttatttatttgtagtttttggcgttgtgtttgggagttgttaggttgggttcgataagtatttattttatttagtagtttattttttagttgagttatagtttgtgtttttttgttcgggttttgtggaagtttttgggaatttttgttaagtaaaagagtggaagtggaggtgtggtgagttttggtatattttttcggttaattttgaagtttttgaaggaggatagggagaagcggttgttagaggtagtttttttcggatttttagtagtgggaatggttagaggtgatttcggtttagaaagttggggaagtgattagggtggaagatagagatttgtgtttatagggtttaggaaggcgggtacgttatttagtaagtgttttttatagaaggcggggatagtttgtgtgtttggtttttagatagaagtttgtagggtagaggtttcggggtaggtgtatcgggtgggcgagggtggttagagcggtaggtttttggtggggaggttttgataggttttgggtttgggtttaggacggtgaggcggtagagggtttgtgagtgtgcgtgtttgaggtcgtatggagagtggtcgggcggtaggtagtttagtagttattttcggggtttaggttgttgagttttggcgggaagggtattttttttcgtttatcgtatatatggtgttagttttgtttaggcggtttcgttcgaattttagagttagggtgtcgagggtttttttttatttagtggttttaatttttgttgggtggtattttagtatttttggtgaagggttttggggattgggataaaggagtattattttcggtttttgtttgagtgatttcgtaggtagtttagttttggcgtatttgtgtttttatttatattagaattttagagtttgggcggagattgtttaatggttgttagagttgtagggtttttttcggggtttcgttttcgtttagtgggtggtattagtttgttttaggttttttagtttcggagaggataagtagtcgggatttgagagttttttgtgttgtagtgattaagtagagagattcggagatgggttagtagagtttttttttttaggtgagattagggatttgggcgtggggggcggttaaaggtatttaagaggcggttttgttattcggtcgtgtttttgtagattgattattttgagatcgtcgagggtattatgttacgttatcgttttatgtttgcgtacgagtagaggatcgagttttcggatcggcgttggtagtatttgtttatggtcgtcgagttttacgagattattgtttttaaggtagcgtggttgcggggttttttgggtttttttgagatgtgtaagttagaaggatttgtataggttgggtaggatgttttttttatcgggtttggggttttttgggttttttttaagtcggagttagaagggtttgtataggtcgggtagggtattttttttattgggttttgtaggagggtttgtttgggttttattgggttaatgagaagggaggtcggtagggttgagcgttaggtttgtgaggtttttgttaagtgattttattttttgggttaggttgttggagggttttttatagtttgtttttatgtttggatagggcggttattaggaaataaataatataaacggtgattgtttagggagggggttaatagcgtgttagtattgaggttaggtttgttttattttagaattgaattttgtgttttacgaaagttttattagtttttttttgggtttttagggtagagttcgggttggggaggttagtgtttcgggttttttgtttgatggtcgttttgaggttatagggattaggagttttttttgtttttcgtttttttaggtgtcgagtagagagatcgataaggcggagggtaagttttggatatattggaatcgggagattaagtaggtgagtggttcgtttcgagtttggtttttttttatttagttttggcggttttagttttgttttagttttattcgtgtttgttgaattttttttcgtttttttagttttttttttagttttattttaagatggagaagttttcggttttatttagtttttttgttggtttttttggggtgaagcggtttttattttcgttgatgaacggtttgttttttcggttatcgttgtttgagtttttgttatcgttttcgttaggaggtttgtttttgttatttatgttttttatagggtttgcgtttttagggttttcgggattattttagttattttcgttagttttaggggtttatttttcggttttagtggtgtatttttttgtatttggggtttattttttagtttttggcgtttattttttagtttttggcgtttattttttagtttttggggtttatttattaatttttggggtttattttttagtttttggagtttattttttagttttcggggtttatttattagttttcggagtttatttattagtttttggggtttatttattagttttaggggtttatttttttttattagcgggggtttatttttaggtttcgggggtgtatttagtagttttcgtcgtttatttttaggttttaggggtgtatttattagttttagggatgtatttttaggtttcgggggtttatttttaatttttcggggtttattcgtcggtttttggggtttatttttagttttcgggagtttattttttaaattttggggtgtattttttaatttttatgtttttaatgttgaggtttttattttttttcgaaggtttagggaatatattttttttttttttaattaattgagaagttgtttttttttttagtaagtttagcgttaggtgtttttgtttttttttattgagagaaggttgtttttttgtattgtttttcgtttattaaatagttttttttagttttgagtgtattgatgttcgtagcgtcgttttattgtgttagtgtgtgtgggagtgttaggtatagtattattttttagtttgggtcgattggggagggtttggggttcgttaggagatatttgtgggaggtttgagagatggttgtattttggagatggtttggtggaggatagattttattagttagttaggaggggatttggggttttgttttggggagggaagagtagattttacgatatttttggggtttttagatagtttattaggggtggggagggtgagtagggatagggcgtttttattgatttgggattttttttttttaggtttatattttagtatttaggatatttgggtttttcgtttttagcgttgtttagtttggttgtttggtcgttatttttagtttggtttttatttttgtgttttttggggatggtttttaaggacggtatgttgatatattaggtttagttttattattggggagggagataggttgttagggatagaaagggttttttgagaaggttattttgtttggagtgggggcgtcgggtattgttttttaaggtcgcggtagaggagataggggtttgttttgtataaatattttattttttattcggtttatttaaggtaggtagtttagtttttggtagtatttacgatgcgggatttgttttttattagtttggttttagtgttgtttgttttgggggttttgttggggattgaggtttttagagtagaggagttagttgtgggtattagtggttttatttttcgagaagatttggattggtttttaggtagtttataagagtttttgtgtttggtggtattgggcggggatagtaatggtagtagtttttttttgcgggtggtgggggttttaagcgtttatgagtaggtttttttgggggtcgtgtagagggttcgttggggttttcgagatttggttattttcggggtttgtaatatcggtgataggtaggttgttttgttttttttacggcggttgggggtttggttgcgggattttggggggtagcgtttggtggttttatatttggaggaaggtatgtggggtttagttttaagtttggtatcgtcgtttttttttaggtgggtcgggtttttttagggaagattaggggttggtagagtttttattttgggtagggaggttgtggttttgtttttaggattgggttgcgggttcgtggtttggaaggtgggtattatattttgttttgttttcgaagtttagtttttagatttgtttttgtttcggtgttagggagagagttgttgttttttttttatttttgaagacgacgtagggttcggggttagtggaatttttttttttatagttttagtttgtttttagggtcgttggtttaagatattttttgcggggaaggggttttatcgggtattttaatttagagattttagggcggtagttttatttatagttttagacgtagtttttgtttgtttttgtcgttatcgttttttggttgtaggaaggtagttaagaggggtatttttgtttttcgtttgaggttttttgtatagtggttagagcggtagggatagattttaaagattttcggggggtgtggtttttaatggtttaggcgttttttgttgtttcggttgtagt

SEQ ID NO: 100 - DNA, 6215 bp, Artificial Sequence
  chemically treated genomic DNA (Homo sapiens)
attgtagtcgggatagtaggggacgtttgagttattgaaggttatatttttcgggaatttttgggatttgtttttgtcgttttggttattgtgtaggggattttaagcgggggataagggtgttttttttagttgtttttttgtagttagggagcggtgacggtaggggtaggtaggggttgcgtttgaggttgtgggtggggttgtcgttttggggtttttgggttggggtgttcgatgaagtttttttttcgtagggagtattttaggttagcggttttgagaataggttggggttgtgggaagaagggttttattggtttcgagttttgcgtcgtttttaggggtggggagaaggtagtagttttttttttggtatcgaggtaggggtaagtttaagagttgggtttcggggataggatagagtgtggtgtttattttttaggttacggattcgtaatttagttttaggaataagattatagtttttttgtttagggtgggggttttgttagtttttgattttttttaggaggattcggtttatttgaaggaagacggcggtgttaagtttggggttgggttttatatatttttttttaggtgtaggattattaggcgttgttttttagggtttcgtagttaggtttttagtcgtcgtagagagggtaaggtagtttgtttgttatcggtgttgtagatttcgaaggtggttaggtttcgggggttttagcgggttttttgtacggtttttaggaaggtttgtttataggcgtttagagtttttattattcgtaggggggagttgttgttattgttgttttcgtttagtgttattaggtatagaggtttttgtgggttgtttggaggttagtttaagttttttcggaagatgaggttattggtgtttatagttggtttttttgttttgagggttttagtttttagtagagtttttagggtagatagtattagggttaggttggtgagaggtaggtttcgtatcgtgggtgttgttaggggttgggttgtttgttttaagtgagtcgagtggaaggtggggtgtttgtgtaggatagatttttattttttttgtcgcgattttgggggatagtgttcggcgtttttattttaggtagagtggtttttttaaagagttttttttgtttttggtagtttatttttttttttagtgatagagttgggtttgatgtgttaatatgtcgtttttgagggttatttttagaagatataggagtgggaattaggttgggagtgacggttaggtaattaaattagatagcgttgggggcggggggtttagatgttttgggtgttgaggtgtgggtttggaggaggagggttttaagttagtgggggcgttttgtttttgtttattttttttatttttggtgggttatttggagattttaaggatatcgtggagtttgtttttttttttttagaataggattttagatttttttttagttggttggtggggtttgttttttattaggttatttttaaggtatagttattttttaggttttttataggtgttttttggcgggttttaggttttttttagtcggtttaaattgggggatggtgttgtgtttggtatttttatatatattgatatagtagggcggcgttgcggatattagtgtatttagggttgggggaggttgtttaatgagcggggggtagtataaaagagtagtttttttttagtgggaaaaggtaagagtatttggcgttgggtttgttgggggagggagtagttttttagttggttgggggagggggaggtatgttttttgggttttcggagggaagtgggggttttagtattgggggtatgggagttggggggtgtattttaggatttgaggggtgaattttcggaggttgagggtggattttaggagtcgacggatggatttcgggaggttgggggtggattttcggggtttgagggtgtatttttggggttggtgggtgtatttttggggtttgagggtgaacggcgggggttgttgggtgtattttcggggtttgggggtgaattttcgttgatgggggaggatggatttttggggttggtgggtgaattttaggggttggtgggtggatttcgggggttggtgggtgaatttcgggggttggagggtggattttaggagttggggggtggattttagaggttggtgggtggattttaggggttgggggatggacgttaggagttggggggtggacgttaggagttgggggatggattttagatgtagggggatgtattattggggtcggggggtggatttttggagttggcgggggtagttggggtggtttcgggggttttgagggcgtaggttttgtggggggtatgggtggtagaggtaggttttttggcgggggcggtggtaaagatttaggtagcggtggtcgagggggtagatcgtttattagcgggggtggaggtcgttttattttaggggggttagtagggaggttgggtggagtcgggggtttttttattttaaagtggaattggaggaagaattagagagacggagaaaggtttagtaggtacgggtggggttagggtagggttagggtcgttagggttgggtgggaaggagttaggttcggggcgagttatttatttgtttggtttttcggttttagtgtgtttagaatttgtttttcgttttgtcgatttttttgttcggtatttgggagggcgggggatagagagggtttttggtttttgtgattttagggcgattattaggtagggagttcgaggtattagtttttttagttcggattttattttgggagtttaggagaaggttggtaagattttcgtggggtatagggtttagttttggagtgaaatagatttggttttaatgttagtacgttgttggttttttttttgggtagttatcgtttgtattatttgttttttgatggtcgttttgtttaggtatggggataggttgtaggaagttttttagtagtttggtttaggaagtgaggttatttggtaaaggttttataggtttggcgtttagttttgtcggtttttttttttattggtttagtggagtttaagtaggtttttttgtagagtttaatgggagaggtgttttgttcggtttgtgtagatttttttggtttcgatttggggggggtttaggggattttaagttcgatgggaggggtattttgtttagtttatgtagatttttttggtttgtatattttaagggggtttagggaatttcgtagttacgttattttgaaggtaatggtttcgtagggttcggcggttatgagtaggtattgttagcgtcggttcggaggttcgattttttgttcgtacgtagatatgaagcggtgacgtggtatgatgttttcggcgattttagggtagttaatttgtagggatacggtcgggtggtagagtcgttttttgggtgtttttggtcgttttttacgtttaagtttttgattttatttggaagaggaggttttgttggtttattttcgagtttttttgtttggttattgtaatatagaaagtttttaggtttcggttgtttgtttttttcgaagttgaggaatttggggtaggttaatgttatttattgaacgagagcgggatttcgggggaggttttgtagttttggtaattattagataattttcgtttaggttttgggattttggtataggtgaaggtataggtgcgttagagttgagttatttgcggagttatttaggtagggatcgaggatggtgtttttttgttttaatttttagagttttttattaggggtgttgggatattatttagtaggagttggggttattgggtagggaggggttttcggtattttggttttgggattcgagcggggtcgtttgaatagggttgatattatgtatacggtgagcgagagaggatgtttttttcgttagagtttagtagtttggatttcgagaatggttgttgggttgtttgtcgttcggttattttttatgcggttttagatacgtatatttataagttttttgtcgttttatcgttttgagtttaagtttaggatttgttagggtttttttattaggagtttgtcgttttagttattttcgtttattcggtgtatttgtttcgggatttttgttttgtaggtttttgtttggaggttaggtatataggttgttttcgttttttgtaaagaatatttgttgggtagcgtgttcgtttttttgaattttatggatataagtttttattttttattttggttatttttttagttttttgaatcggggttatttttagttatttttattgttgagggttcgggaggagttgtttttaatagtcgtttttttttgtttttttttaaaggttttaaggttaatcggagggatgtgttagggtttattatatttttatttttatttttttgtttggtaagaatttttagaagtttttataagattcggataggagggtatagattgtggtttagttgggaaatgggttgttgggtgagatgggtgtttatcgggtttagtttgatagtttttagatataacgttagaggttgtaggtgggtgagggacggttattaaggtcggaaaatagtggtttagggaggaggttattagggttgtatttttcgtattggagattaaagaatatatttatgttacggtagcggttgtggtcggtttcgttgcgggtagatttatttttgtagttcgggcggtcgatttttataaatttttttatttttattttgatttttttaggcgcgggttgggtaggggtttttttggtttttttggttgttcgtcgggttttgcggataggatggaggtgttgttgggatttttttatatataggtattaaagttatgggtttaggtgttaggagttttttgattttggagtttattataagttgagagatgaggagggttaggggtttgggaggggttttggggtttggttgaggatagggataggataggtatgttttttttttgttatgttttttattgtttttggttggggtttttttaataattttatgtttttgttttttttttttttttttaataagataagagttttattttgtcgtttaggatggagtatagtggtagtattttggtttattgtaatttttgttttttagatttaagatttttttgttttagtttttatagtagttgtgattatagacgtgtgttattatgtttggtttaatttttgtatttttagtagagatggagttttataatgttggttaggttggtttcgaatttttgattttaagtgatttgttcgttttagttatttatgtttttgttttttaatgttttttaggaatcgtatttaagcgtttagggaggtttaggttaggttggtttttcggttgtggagtagtggttcgcgaggtttatagagatttgagttaacggttgttggagtattaggtattaaagggatatgaggtatttataggttggtttggtgtttttttttttgcgtatgtgttaggtagtttttttggagtggaaaggaaatacgtatgattcgaggtcgggcggatagatataggtaggtttttttgacgttagttatttagttcgtcgcgagtcgttcggagttaggtagaggtcgtattttattgttgtgaagtgttaggtagagtttgtatttataggagtttaggtggttttttatgaagtacgggttttggaggggaagaataggggttcgttagatagaagatcgcggtttgttgtcgttaaggtttttagaggcgggattttttttttgtagaggtatggaggtagaattttttttttgtagaggtatggttatcgttgatagtggttaagtatttttgaaaacgggggatttagcgggaggttttcgtgagtacgggtgttattatttggggttgtgggttaggtttcgagtagtgggggtttttagggagttttcgatattatttttttggtggttttgagttagagggaggtatagttaggatagtatcgtcggttattttcgaggtagggagtcgtttattgtttacgttattacgttagtagtaggtataaggtagatataggtataagaaaagtaaatgggttatattgaagatttaaag

SEQ ID NO: 101 - DNA, 6130 bp, Artificial Sequence
  chemically treated genomic DNA (Homo sapiens)
ggatgaataggtagagtatagaggatttttagggtagcgaaattgttttatatgatattttaatagtagatacgtattattgtatatttgtttagatttatagaacgtataagttaagagtgagtttttatataaattatgaattatgggggataatgatgtaataacggaggtgttttagttgtaataaatgttttattgtgttggggatgttgatagtgaggggggttgtgtatgtgtggggtaaaggttatgggaaatttttgtattttttgtttatttttgttttgaatttaaaagtgttttaaaagtttggttaatacggtgaaattttatttttattaaaaatataaaaattagttgggtgtggtgttgggcgtttgtaattttagttattcgggaggttgaggtaggagaattatttgaattcgagaggtagaggttgtagtgagttgagatcgagttattgtattttagtttggggtataagagcgagatttcgttttaaaaaaaaaaaaataaaaataaagtttatttaaaataaataagtaaataaatatagaaatatggtttttttagtttttatcgtttggatgtacggtatattttttttgtttgtgtgttttatttttttattttgttatattgaggttttttaattattgttttaggggatattgtttttattttaatttgtatttttaatagtatttttttttgatgataaaaagagtatatgtataaagtttggaaaataaaaagaaaaagaagtaggagaaaaaaattttatttcgaattgttttatttggagatattaattacgttttggatcgcggttggtacgatattgtttatattaaattgtattattttgttaatattatatttttttattatgagaaattttaagaatatatttttttggtaaatattttatatatggttatattatagtttagttaattattcggtatttaggtggtgatatttagatgtgtttagttttgtattattataaataatgtgatgaatatttgtgtggtgaaagttttgttaaatttttgaattaaattatagatttggaattatagggtggaagaatatggatattttggttatttttattttattataagattgttttttagaaattttgttatttgtttatatttttagaagtagaatgtgagtttttgtttttatggttttattaagtaatataatttaaaaaataatttgttgatttgatgaaaatgaaaatagaaatggtattttattgatttaatgaatttttttttttgtttggtaagtttgattttcgaaaatttatttattaattatttgaatatttaattttataaattgtttattatatattggggttttaatgttttttttatgaatttgtaagagttttattttattgttaaaaaaattttttttagttttttatagtttaatttttatgttaaatttatttttaaaatgggaataattttttttttggtaattaaaataacgggttgttatggtaaaaaaaaataatatattatagaaaattatatagaaaaaagtaaaaatttatattttattttttgaatttgtattaatatttttagattatttttttttaaatttttattttatgtttttatggtattttttgaagtttaagaattttaatttttatgtattttaaagtaagtattttaaaattttaatatattttttagtgtttttgtgtttagaaatatttttttaatttagcgatttgataaaaaattatttttaaaaaaatagagttgtgattttttttttttttgagatggagttttgttttcgttgtttaggttggagtgtaatggtgcgatttcggtttatcgtaatttttgttttttaggtttaagtgatttttttgttttagtttttcgagtagttgggtttataggtatgtattataacgttcggttaattttgtatttttagtagagatagggtttttttatgttggttaggttggtttcgaatttttaattttaagtgattcgtttgttttggttttttaaagtgttgggattataggtaaggtattatgttatattatagaatattaaggaaattaagggggaaagaagttagttttaatgtttggattttaatatatttgttttttttatgtattgtttttttaagatattgattatgagtttttaatttattttaatttatttttatatggttgtaagtataattttttattttttttttttttttataattatgttttaagtattatttttttgttgttacgtagtttcggtaatggttgttttaaatgatttttaatggttttttttgtggttgtgttgttatagttgattttatttttttaatgaatattttcgttgtttttaatttttttgttaagcgatatttagaaatattagagtttagtgaagtagaattttttattgttttttgggggttgattgtaatgtaatttgattttgtttatttttttttttttttagaggagtgttggaagaaattatttttagagaatggttagaaaaacgattaatagaaaatgaggaggaaggagattatgagttgaaagtatgttgagtttttaggaggaagttgttttagaagtttagattgtgtaggttttgtttttgtgatttataaatcgggtatgagtttataataattttgatagatgttttttatttatgtagcgtttggtgtttttgagggtattggtgtaggaaggtttgatgtagaatttttgtttattatttgttgtttgtgtgatttatattagcggcgttttagtttgtttttttgtagaataagaatatagttagttttttgtatttgtgggttgggtatttatggatttaattaattgtggattgaaaatatttggaaaaatataataaaaagtaagattataataataaaataatataaataaaaaataaggtcgggtacggtggtttatatttataattttagtattttgggaggttaaggcgggaggattacgaggttaggagatggagattattttggttaatatggtgaaatttcgtttttattaaaaatataaaaattagttgggtatggtggtacgtgtttgtagttttagttgttcggggggttgaggtaggagaattatttgaattcgggaggtagaggttgtagtgagtttagattgcgttattgtattttagattggcgatagagtgagattttgtttaaaaataaataaataaataaataaaaaatatagcgttaataattatttatatagtatttaaattgtattagttattataagaatttagagataatttaaagtattttggaggatttgtgtacgttatatgtagatattgtgttaatttatatgagggatttgagtatttttggattttggtatttacggatgtgttggaattagttttttgggggatatcgagggatattatgataataggttcggaagaggatagacgaatatattgggttatggggtagtattgagcggtggtggaagaatttcgagtagtcggagaaagagtaggagggttttttagggaagagggaatggtttgtgtgaatttaggttgaattttttatttttgggattcgatttttttatttgtataaattgtttggtttgtggtttgtaagagttttttttgtttttttaggaagttttttagggatttttgtttttggttagttttgtttttttgatcgttgcgggttttgtaggttatagttttggtttttgtgtgtgtattagatacgtttaggtttttttagcgggatttatttttttgtttaatttaattaatagttttttagaaatttttaggggtagtaaagtgttgtagtttttgatatgttttagggttgaatgggggtgggtattagtagatttaatacgtatttattaatttaaaagaagtgttattggtttattggtaaagttggttagtaataattttattttttttaggaataatgattattaattatttttttttgttgggggtaggagataattcggcgtatggtggtggagtatttgggagatagaggtagagatttcgtttttcgatttcggcgcgttggttgtaaagtaggaatagtaatagtatttatttttagggttacggagatcgaatgaaataatgtttgttaagttatttagtatatagtaagtatttagtaatgttaggttgttgttattataataaatttttagcgaacgggaagattaagtatcggttggtattgggttaggcgtcgtaggtaaagatgtggagatgtttcggaggcgtttagggtattcgggcgaaaattcgagggtcgaaggttgggaggaggcggagcgtcgggtatcgggtatcgggtatcgggcgggaggtgagtttttggaaaaggagggggtttcgggcgcgtttttttagtagtcgcggtttttttgtttagggtcgcgtttttttcgtcgtattttttttttgatttcgaaagtattttttttttttatttagtttttttttttgggttgtaggagattattgtttgcggggaagattaagacgttaggtcggcggattagttttcgtttcggggcggtgtagttggagcgttaggggagtttcgttcgtcgtagttttagcgtcgcgcgttttttttttttcgcggatttggcggtgtcggcgttcggagtggttttttaaaaggtagtttattgttcggagggggcgggcggggggcgtcgatcgtcgtttgaggttcggttttttttttttttttttttttgttttcgcgtcgttcgttggttagttcgttggttcgttcgttcgttcggcgtacgtttcgttttcgttagttggtttcgttgtcgggtgcgcggcgtggagcggtagtcggtttggacgcgcggtcggggttgggggttgggagcgcggcgcgtaagattttttcgcgcgagagcggtttttgttatcgggcgaggtttgcgtcgcgatggtagagatgggtagtaaaggggtgacggcgggaaagatcgttagtaacgtgtagaagaagtttattcgcgcgtaggagaaggtgagcgagtcggagttttagtagtcgcggagttttagtcgtcgcggagtttcggttatttgtttttttatttttcgatttcggggtttggtttttcgttaggatttggtgttgttatttttagaggagcgttttcgaggggtttcgaggtttttaggttgcgtttttcggcgttttgggtgtttttttaggtttgcgttttttgtttttttatattcggtcggggtaggatagggtttcgttttgtattttcgtggttcggttgtatagtagtggtcggttttgttttaggttttttttaggcgcgcgttttaggttatttcgttttggaggttaagggtcgggaggttgggaggttaggtggtgatttttagttttttaggtttatgtaggtaatttaggttgggtcggcgttcggggcgagagggagtatgtttttttgtttttggggatattattttttcggatttttaaggttgtttttcgaatcggtatttatagtttttttttttttattgtttttttattttcgtttttcgtgggtcgaagagggattgggttttttttttcgagagtgtttgcggtttggaagttttcgtttagttcggttttatcgggagtttagggttacgtatttcgtaagaggtgtttcgttttagtagcggttagcgttttcggcggtcggggagcgggtggcggtattggttttgggagttacggtcgggtggggagttggtttggaggaggcgcgtggaaggcgttataggaaattcgattttttttcgcggagagttggaatgggggatggagtcggggttttttagggtgtttagagcgtgtaggaaatgtagagattgaggggcgggggtttgtattcggttagttgtttattttaagttatttttggtttattgaattggattacgttagttgttgacgttattttttttgacgattttaattttgaaatttgagattgtagaatttgtgtttttgttag

SEQ ID NO: 102 - DNA, 6130 bp, Artificial Sequence
  chemically treated genomic DNA (Homo sapiens)
ttggtagaaatatagattttgtaattttagattttagagttggagtcgttaggggaagtggcgttagtagttggcgtgatttaatttaataaattagaggtggtttgggatagataattgatcgggtgtagattttcgttttttaatttttgtattttttgtacgttttgggtattttgggaggtttcggttttattttttattttagtttttcgcgaggaggggtcgggttttttgtggcgttttttacgcgttttttttaggttagttttttattcggtcgtggtttttaaagttagtgtcgttattcgtttttcggtcgtcggaaacgttaatcgttgttggggcgaggtattttttgcggggtgcgtagttttgggttttcggtggggtcgggttgggcgggagtttttaggtcgtaggtattttcgggaaaggaaatttaattttttttcggtttacggagaacgaaagtggagaagtagtgggaaggaaggaattgtgggtgtcggttcgagaagtagttttgggagttcgggggaatagtgtttttaggggtagagggatatattttttttcgtttcgagcgtcggtttagtttaggttgtttgtatgggtttggagagttgagggttattatttggttttttagtttttcggtttttggtttttaaagcggggtagtttggagcgcgcgtttgagaagagtttggagtagggtcggttattgttgtgtagtcgagttacgaaggtgtaaagcggggttttgttttgtttcggtcgggtgtggggagatagaggacgtaaatttaagagggtatttagagcgtcggggaacgtagtttggggatttcgaagtttttcgaaagcgtttttttagaggtgatagtattagattttggcgaaggattaggtttcggggtcggaggatagggggataggtggtcggggtttcgcggcggttgggatttcgcggttgttggggtttcggttcgtttatttttttttgcgcgcgggtgagttttttttgtacgttgttggcgatttttttcgtcgttatttttttattgtttatttttgttatcgcggcgtaggtttcgttcggtggtaggggtcgttttcgcgcggggagattttgcgcgtcgcgtttttagtttttagtttcggtcgcgcgtttagatcggttgtcgttttacgtcgcgtattcgatagcggagttaattgacggaggcggagcgtgcgtcggacgggcgagcgagttagcgagttagttagcgagcgacgcggggatagagggagggagaggggaggggtcgggttttaggcggcggtcggcgtttttcgttcgtttttttcggataataagttgttttttaaagggttatttcgggcgtcggtatcgttaggttcgcgaggagggaggggcgcgcggcgttggggttgcggcgagcgggatttttttgacgttttagttgtatcgtttcggggcggggattaattcgtcggtttggcgttttggtttttttcgtaagtagtaattttttgtaatttaggaaaggagattaggtggaggagaggagtgttttcgaaattaaagagaaagtgcggcgaagggggcgcggttttgaatagaggagtcgcggttgttgggagaacgcgttcggagttttttttttttttaggggtttatttttcgttcggtgttcggtgttcggtgttcgacgtttcgtttttttttagttttcggttttcgggttttcgttcggatattttaggcgttttcgggatatttttatatttttgtttacggcgtttagtttagtattaatcggtgtttggttttttcgttcgttaaaaatttattataataataataatttagtattattgagtgtttattgtgtattaagtgatttgataggtattattttattcggttttcgtggttttagaggtaggtgttattattgtttttattttataattaacgcgtcgggatcgaggaacgagatttttgtttttgttttttaggtgttttattattatacgtcgggttgttttttatttttagtaggaaggaatgattagtgattattatttttggagaagataaggttattgttaattagttttgttaatagattaatgatattttttttaagttaataaatacgtattgagtttgttgatatttatttttatttagttttaaaatatgttaggggttatagtattttgttgtttttggaaatttttaaagaattgttgattgagttgagtagagagataggtttcgttgaagaggtttagacgtgtttggtgtatatataggagttagggttatggtttgtaggattcgtagcggttagaggagtagagttggttagggatagaggtttttgagaggttttttggaggaataggaagggtttttgtagattataaattaagtagtttgtataaatggagaaatcgagttttaggaatgagaggtttagtttgggtttatataggttatttttttttttttggaaggtttttttgtttttttttcggttattcggggtttttttattatcgtttagtgttgttttatggtttagtgtgttcgtttgttttttttcgggtttattattatgatgtttttcggtattttttaggggattggttttagtatattcgtggatattaaaatttagggatgtttaagttttttatatgaattgatatagtatttgtatatagcgtatataaattttttaaaatattttaaattatttttagatttttgtaatagttaatataatttaaatattatgtaaatagttgttaacgttgtattttttatttatttatttatttatttttagatagagttttattttgtcgttagtttggggtgtagtggcgtaatttgggtttattgtaatttttgtttttcgggtttaagtgatttttttgttttagtttttcgagtagttgggattataggtacgtgttattatgtttagttaatttttgtatttttagtagagacggagttttattatgttggttaagatggtttttattttttgatttcgtgattttttcgttttggttttttaaagtgttgggattataggtgtgagttatcgtgttcggttttgttttttatttatattattttattgttgtagttttattttttattgtatttttttaaatatttttagtttatagttggttggatttatggatgtttaatttatagatgtagagggttgattgtatttttattttgtaggaagatagattgaggcgtcgttgatgtaggttatatagatagtaaatgataagtagagattttgtattaagtttttttgtattaatgtttttaaaagtattaagcgttgtatgagtgaaaagtatttgttaaaattattataaatttatgttcgatttgtgagttataaaagtaaaatttatatagtttgggtttttaaagtagtttttttttaaaagtttaatatgtttttagtttatgattttttttttttttattttttgttggtcgtttttttaattattttttaaaagtgattttttttaatatttttttgaggaaaggaggaaatgagtaaagttaaattgtattatagttagtttttagggaatagtgggagattttgttttattggattttggtgtttttaaatatcgtttgatagaaaaattggaagtaacggaagtgtttattagagggatggggttagttgtgatagtatagttataggaggggttattgggaattatttaaaataattattatcgagattacgtagtaataagaaaataatgtttagggtataattatgaaggaaaggaaaagataggaaattgtatttgtaattatataaaaataaattaaaataaattaaaagtttatgattaatgttttgaaagaataatgtataaaggaagtagatgtgttagggtttaggtattaaggttgattttttttttttttaatttttttaatattttataatatgatataatgttttgtttataattttagtattttgggaggttaaggtaggcggattatttgaggttgggagttcgagattagtttaattaatatggagaaattttgtttttattaaaaatataaaattagtcgggcgttgtggtgtatgtttgtaagtttagttattcggaagattgaggtaggagaattatttgaatttaggaggtagaggttgcggtgagtcgagatcgtattattgtattttagtttaggtaacgagagtaaaattttattttaaaaaaaaaaagaattatagttttgtttttttagaggtgattttttattagatcgttagattaaaaagatatttttaaatataaaagtattggagaatatattgaaattttaaaatgtttgttttgaggtatataaaaattagaatttttaaattttagaaaatattataaaaatataggataaaagtttgggaggaaatgatttaaaaatgttagtataagtttaaggggtagaatgtagatttttatttttttttgtataattttttatagtatgttatttttttttattatgatagttcgttattttaattattaggaaaagagttatttttattttgaaaataagtttgatataaaaattaaattgtaagaaattagggaaaatttttttggtaataaaatagaatttttataaatttataagaaaaatattaaaattttaatatatagtagataatttataaaattggatatttaaataattaataaataggttttcgaaagttagatttattagataaaaagaaaggtttattaaattaatgaaatattatttttgtttttatttttattaaattaataaattattttttaaattatgttatttaataaaattatagagatagaaatttatattttatttttgagagtgtaaatagataatagaatttttagaaagtaattttgtaatagaataagaataattaaaatatttatatttttttattttataattttaagtttatgatttaatttaaaaatttggtaaagtttttattatatagatgtttattatattatttataataatgtaaaattgaatatatttaaatattattatttgaatgtcgaatgattaattaaattatagtatggttatgtatgaaatgtttattaaaagaatatgtttttgaagttttttatgatagggaaatgtgatgttaataggataatatagtttaatgtaaatagtatcgtgttagtcgcgatttaaaacgtgattgatatttttaggtggagtaattcggggtggggttttttttttttatttttttttttttttattttttaaattttgtatatgtattttttttgttattagaaagaagtgttattaaaaatataaattgaaatgaggataatgttttttggggtaatagttgggaaattttagtgtggtagaatagaaagataaagtatataggtagagggagtgtgtcgtgtatttaaacggtgagggttggagaagttatgtttttgtgtttgtttgtttgtttgttttaaatagattttatttttatttttttttttttgagacgaagtttcgtttttgtattttaggttggagtgtaatggttcgattttagtttattgtaatttttgtttttcgggtttaagtgatttttttgttttagtttttcgagtagttgggattataggcgtttaatattatatttagttaatttttgtatttttagtagagatggggttttatcgtgttggttaggtttttagaatatttttaggtttagagtaaaagtaagtagaaggtatagagattttttataatttttgttttatatatgtataattttttttattattaatatttttagtatagtgggatatttgttataattgaggtattttcgttgttgtattattattttttatagtttatagtttatgtgagaatttatttttggtttgtacgttttatgggtttgggtaagtgtataatggtacgtgtttattgttagagtattatatagaatagtttcgttgttttaagaattttttgtgttttgtttgtttattt

SEQ ID NO: 103 - DNA, 5514 bp, Artificial Sequence
  chemically treated genomic DNA (Homo sapiens)
attagattaagtatttgaaggagtagtagggttgtgattgatgtttggtaaggagtagatgttgttttttttgtttttgtgtttgtttagggttttttttggtaaatcgaagcggaaattcgttgatattttttgtaatgtatgaatgttattttttggggtttttatattgtttttaattattgtagaattttttgttgatattttatgtttttttttttagaattttttttttatataatgttttatatatttgaagggttagaaaggtatattaagaattagtatagatgtttataattttaggtttattgagttttagagttcgagttagaggaatgagttttgttttttgggttgaagtgttttgaggtaatggtttagttttaataatattatttaagtttattattgtatattttgtatatttttttttttgcgggttgatgaagttgtttttgtttatgtagaatttttaatttattaatgtttatggttggttttaaagatttggtttgttagaatagatatagtttaatatttttatatagttatgtttaatagggttgtttgatattgggagtaaagtggtaggatttaaagaattatagatttttatggttatatattgatttttatataataagttttggtgtttagttaatgtagtatttgttagttaatggtgttttttggtgttttttagagttatattagagttagtttgggttgatataagttttttttttaatttataagttttgttgttgtagagatttttatttaaaaggttttcggttattttttttataattttatttaatgttttggttaatattataaagtttggaatttgtagtttgtaaaaattttatagtttttaaatgtttttttatttgttttttggttttaggttttggtaagttgtagatgatttgtttttttgttgattatagattgtatttttttttttaaatagtgaattttaggtagtgtatttgttgtttgtagatttgagttttttttttgggtattttatatttatagttttttaggtgtcgaagtagggtattcgttttttttgtatatttgattgttatggagtgttttagtagaaggttatttatatattggagtaggatgtaatttaggtttttagtaggaaatatttggaggtttttaatcgaggtttttttaaagatggtgggggattttttgaatttttgggaaagtcgagtttaagtgtattgaatggtgatatttgatttcggatttttttattgaaaggtaaatagtttttggtttttaggaattagtttgatgtgaagaaggtattttttaagttttgtacgggtcgatagtttttggtttttggtttagggataggtaggaggtgggtgttttatggagattggtaaggaattagaattttagaggtttttaagtatataagatgagtttttatttttttaaaggtttttttgggaataggatacggtttttgtttaattggttaggtcgtaggttaaatttttatgagtacgggggtttgattgattgttagttttagaggattgttttttatttttatttagagtcgttatttagttggagttatttttattttttgagttggtttagttagtaaaagtttttatttttttttttgggggattggaagggttatgatgatttttgtttttggtaattttagttgtaaagtgttttgttttgttaaggaaatggtggtttttaatttgttaagtaagtttttttttaataaaggtaagggatagttagatatatatagaaatggataaattattttgtgtttttttattgagtagttgcgcggtagatagaagttttgtttggtagagatttttgttgttttaattttattaatggtttttatagatgagggggttattggagtgtttattattgagtgttcggtttttgtatttattaaaaatttaatgtttttgttttttattgttattttgattatgggttttttgggggtatttgagtttgttttttttaattttagtagttttttagttagattgaataaaatttttttattttggtttgaggtttttggttttgtattattttgattttttttgagttggggatatttatttttttaatgttttatttttttatagtaggtatattagttatgttgtaaatgtgagtgattggatagggtattttttttagaatttttttttttttgtttttttaggagaatttttttaattgttatagttagtaaattagcgttttatttggtttggcgttcgttttttttacggtttttttggtcgtttgttgtatttttatttataaatattttattagttttttttagtaattgtaaggtttttatttttgtaaatttagtttgtttttgtaattttttttggatattttttgtattttgaataattaaggtcgtattaattaacggttgatttttaggattttttagatcgaaaggagtgtatatgtaataggttttatacggtttttgatagaattgggttgggttttttttttttttttggatgattttagaaattttatttatattggtatttttttgagtttttttttttaattttttaattaatgtttttcggtatttttttagtttttttatatttggttttttatttggattttattgagggttcgtttttggtagttgaatttttatgtatttttggggattttgataattggttgggatgtgtttttttagttatttaattgttgtttgtagtatttgttgttttttatgtgttttaaagaggtatatgagtagttggtggtaattagtttaagtaggattttgagtttggataattttttgaagtaagttaattagggtttgaggttttttagtgtaagatggagtgttatttttttagttgagtagtttagtagaggtaaaagggtgatatataaaagtatgtttttttatcgtatgtttgattttatttgttttagtatatcgttgtttttttagggtatttgaattttcgttttgggtcgttaagcgggttgttagggaagtggattttttcgtagttttatttttgtttttgtttattttgggtggtttaggggttgtgggtttaggagaagggggtttttttattggataaggggttgagggtattgttggtgttattttttgttttgagttttcgagttttgggttaaatagaattttaggtgttggttttttttggtcggtggagcgagaatttttttgaaataaatgtttttttgttattattattgttgttgtttgtttttttattattgtagaggatttaaaattagttgtaattaggaatttttatatggaaattgatatgggtgtaggtatattatgagcgattaggttaagttttcgtttaggtggagtggggtaagttgaaaagatttgttttattaagttttagatgtttggattttaagtgttagtttttttttggtgtttagttattgtgttaatttttcgcggggattattgttttggcgaggcgtttaatcggggttattttttatttgggagcgttttttggattttattttttaggttggttagagtttttggtagtttgagggatgtttcggttttattttataaggtatgtttaatttgtttaaggagttgtttcggtcgtttattagttattttgtttttaggttagggaattaagaaatgtagtaggataagcggtagataaaatttttagatatcgagttgtagaaggaagggtgttatttatttgggagtatcggatagttattgttttaaaattcgagttttttaagtgtataatttttgttttttttaagggtatataatattaaagatgttatatgaaagggtcgtgattgatttgaataagttagggatatgcgataaggattatatgtattcgtggttagggagaaatagaatatggaagggagttttataatgtttttttatataatgtttggaatttatgaataatatcggtttttaaattataagttgatttgtaattattgggtttaggttaattaggtttaggtttggttttgtgtttttgattttgtttttttgttgtttttattgaatagaaaataatataaaataagaggatagggtttttttttttttttaatattagtattggattgtagaatttgttgttgattttggtttggtatttaagttaatttttttttttggtatttgtatatatttttgatgttagtgtttagtatacgtggtttggttattttatggttaaaaacgtgtttgtggaagataagtttggtttggtgagtttgtgtggttagtagtttttgattcgtgtagggtattaatgtgttagggttgagtgttttgagatttatttagaggttgggaagggtttttgaattagttgttttcgttttgtcggtttgttagggttggaaagtttaagttataggatttagtttttttttttagtttacgttatttattagagtatcgtgggttgttatttgttttgagttggaagcggttcgtatttatatcggtaaatgtatttatttttttaatttatgtaaagttttttagtatgtaattttcgattttttaagagttgataataaattttggttttttgttgttatgtgagaatattaggttatagtaatatgttattgtgtaaggaaaaataaaagtgttattatatgtaaaaaaaaaaaaaaaagaaaagaaaagaaatattaatgtttaagaggttattgagatgatttttatgagagattttttgatgttttttattagttaggattattattgataattttttttagattatgaataaatagtttgtttttaagtatttatttatgttattatttatattgtaaaatgtgttttttataggaatataaatagtttttggaaaggatattgataattttaaagtaaaatgaagtttttttggttgttttttattattgggttttgttgggtttagtattttttaaatatataataaggacgaatatttattgtttatttgtttgaatggcgatgggttgatattgtttttgaatgtgagcgatatttagtttttaagggatttggaggggtttaggtgggtatgatttatagtattaattgtagaatttattgtgtttgtagtaaatattattttgattttttacgtgaagtttgggtaatattttattttataggtaagtattttaagtaaaagaattttttgaggaaaaaataatgtagtattttttgtaattgtatattttgtttttgatataatttttttttaataagagtttttcgatgtgttgttaatatttttaagagatagttgtttatattaagatttaagaattttttgtattattgattagattttagaatatttaatgatatatagtaagatagaatttggtatttatgaagattgtttaatttgtagg

SEQ ID NO: 104 - DNA, 5514 bp, Artificial Sequence
  chemically treated genomic DNA (Homo sapiens)
tttataaattaaatagtttttataagtattaaattttgttttattgtatattattgaatgttttagaatttaattaataatataaaagatttttgaattttggtataggtagttattttttgaaaatattaatagtatatcggagggtttttgttgaagaaagattatattagaaataaaatatatagttgtaaagaatattatattgttttttttttagaaaatttttttatttagaatatttatttgtgaagtaaaatgttgtttaagttttacgtagaagattagaatagtgtttattataagtatagtgaattttgtaattgatattatgaattatatttatttgaatttttttaaattttttgggagttaaatatcgtttatatttaagagtaatattaatttatcgttatttaaatagatgaataatagatgttcgtttttgttgtgtatttgaggaatattgagtttagtagaatttaatggtgaaaagtaattaaaagagttttattttgttttgaagttgttagtgttttttttagaaattatttatatttttgtaagaagtatattttataatgtaaatagtagtatgaataaatatttgagggtaaattgtttatttataatttgaaaaggattattaataataattttaattggtgaagaatattaaaaagttttttatggaaattattttaatgattttttagatattaatgttttttttttttttttttttttttttttttgtatatggtagtatttttatttttttttatataatgatatgttgttgtggtttaatgtttttatataatagtagaaaattaaaatttgttgttaatttttaaaagatcgagaattgtatattaaaaaattttatataaattaaaaggatgaatatatttatcggtataaatgcgaatcgtttttaatttaaggtaagtaatagtttacggtgttttggtagataacgtaagttaagaaaggaaattgggttttatggtttggattttttaattttgatagatcgataagacggaaataattggtttaggagttttttttagtttttagataaattttagaatatttagttttgatatattaatattttgtacggattagagattgttgattatatagatttattaagttagatttgttttttataagtacgtttttagttatgaagtgattaagttacgtgtattaaatattgatattaaaggtatgtatagatattaaggggaagagttaatttgaatgttaggttaaaattagtaataagttttataatttagtgttgatattgagaagagagaaagattttgtttttttgttttatattgttttttatttagtaaaaataataaggaagtaaaattaaaggtataaaattaggtttgggtttggttggtttaaatttagtagttataaattaatttatgatttagaagtcgatgttatttatagattttagatattgtatagaagaatattgtgaaatttttttttatattttgtttttttttgattacgggtgtatgtagtttttgtcgtatatttttggtttgtttaaattaattacgatttttttatgtgatatttttagtgttgtgtgtttttaaaagggatagaaattgtgtatttggggagttcggattttgagatagtagttattcgatgtttttaggtgaataatatttttttttttataattcggtgtttgagagttttgtttgtcgtttgttttgttatattttttggttttttgatttggaagtaagataattgatggacggtcgaggtagttttttaggtagattaggtatgttttgtggagtaaggtcggggtattttttaggttgttagggattttggttagtttgagggatgggatttaaagagcgtttttaggtaggaaatggtttcggttgaacgtttcgttagagtagtgattttcgcggaggattaatatagtggttgaatattaggaaggaattggtatttggagtttagatatttgaaatttagtaagataagtttttttaatttgttttattttatttgagcggaagtttggtttgatcgtttatggtgtgtttgtatttatattaatttttatatagagatttttagttatagttagttttagattttttatagtggtaaaaggataggtagtagtagtagtagtagtaaagggatatttattttaggaaagttttcgttttatcggttaagagaagttagtatttaaagttttgtttgatttagagttcgaggatttaaggtaggagatggtattaatagtgtttttaattttttatttagtggggaggttttttttttttgagtttatagtttttagattatttagagtagataagaataaaagtgaaattgcgggaaaatttatttttttggtagttcgtttaacggtttaagacgggaatttaaatgttttgagagagtagcgatatattaggatagatgaggttagatatacggtagaaaggtatgtttttgtgtattatttttttatttttgttgaattatttaattggaaaaataatattttattttatattgaaaagttttaagttttaattgatttgttttaaagaattatttagatttagaattttatttaggttgattgttattagttatttatgtatttttttaaaatatataaaaggtaataggtgttgtaggtaatagttaaatggttggaggagtatattttagttaattattaaagtttttaagaatatataagaatttagttgttaggaacggatttttaataggatttaaatgaaggattagatatggaaaggttaagagggtatcgagaggtattaattgaaaggttgaaaaaaggggtttaaaagggtattaatgtaaataaagtttttgaagttatttaaggaaaggaggaaagtttagtttagttttattaaagatcgtgtgaggtttattgtatgtatatttttttcgatttggagagttttgaaaattagtcgttgattaatacggttttagttatttagagtgtagaagatatttagagaaaattgtaaaaataggttaggtttgtaggaatgaaaattttgtagttattggaaagagttaatgaagtatttgtaaatagagatgtaataagcggttaagaaagtcgtaaggagggcgaacgttaggttaggtgaaacgttagtttgttggttgtgataattagaggaatttttttgaaaaggtagaaaaaagggggttttgggaggaatgttttgtttaattatttatatttgtagtatgattaatgtgtttattgtaaagaaataggatattagaaagataaatgtttttaatttaaagaaaattagagtgatgtagagttaaagattttaaattaagatgaaaggattttgtttaatttagttgaggggttgttagaattaaggggaataggtttaaatgtttttaaggagtttatggttaggatgataataaggggtaaggatattaagtttttagtggatataagagtcgaatatttagtagtaagtattttagtggtttttttatttataaagattattgatagaattagagtaataggagtttttattaagtaggatttttgtttatcgcgtaattgtttagtgggaggatataaagtgatttatttatttttgtatatgtttgattgttttttgtttttgttgagaagagatttgtttagtaagttaagagttattatttttttgataaaataaggtattttatagttggagttgttagaaataggagttattatggtttttttagttttttaggaagaagagtggagatttttgttaattgagttagtttaggaaataaaagtggttttagttgagtgacggttttgagtagagatggaggataattttttgaggttggtaattaattaagttttcgtatttatagaagtttagtttacgatttagttaattggataaaagtcgtattttgtttttagggaagtttttaaaggaatagagatttattttatatgtttaaaagtttttggaattttagttttttgttagtttttatggaatatttattttttatttgtttttaaattaaggattaaagattatcgattcgtataggatttgaaagatgttttttttatattaggttagtttttgagagttaaaagttgtttgttttttagtaggaagattcggagttagatgttattatttagtatatttagattcgatttttttaaaggtttaaaaagttttttattatttttggggaggtttcggttggagatttttaaatgttttttgttaaagatttaggttgtattttgttttagtatgtagatgattttttgttaggatattttatggtagttaggtgtgtaaaaaggacgggtgttttgtttcgatatttggaggattgtggatataaagtgtttaaaaagaaagtttagatttgtagatagtaggtatattatttaggatttattatttgaaaaggggagtgtagtttatggttagtaagaaagtaggttatttgtagtttattagaatttaaaattaggaggtaaataagagaatatttaggagttgtgagatttttgtagattgtagattttaaattttgtggtgttagttaaagtattgaatggagttataaagggggtgatcgagagttttttaaatagaggtttttataataataagatttataagttaaaagaaaaatttatgttagtttaagttgattttaatgtaattttaaggaatattaaaagatattattggttaataaatgttatattaattaaatattaaagtttgttatgtgaaaattaatgtataattatagaagtttgtaattttttaaattttgttattttgtttttagtattagatagttttgttaaatataattgtgtagaggtgttggattatgtttattttagtagattagatttttgagattagttataggtattggtagattaggagttttatatggatagaagtagttttattaattcgtaaagagaaaggtgtgtaggatatgtagtagtaaatttagatgatgttgttgaagttaagttattgttttagagtattttagtttaaaaagtagaatttatttttttaattcgggttttggaatttagtgaatttaagattgtaaatatttatattgatttttgatatgtttttttaattttttaagtatgtggagtattgtataaggaaaaaattttagaggaaaagatataaaatgttagtaagaaattttataatgattagaagtagtgtagaaattttaaaaggtggtatttatgtattgtaggggatattagcgagttttcgtttcggtttgttaaggaaagttttgagtagatatagaggtaggaaaagtagtatttattttttattagatattagttatagttttgttatttttttaaatgtttgatttggt

SEQ ID NO: 105 - DNA, 5421 bp, Artificial Sequence
  chemically treated genomic DNA (Homo sapiens)
  unsure 1609, 1670, 1778, 1802, 1810, 1831, 1967, 2036, 2051, 2067: n is a or g or c or t
gatgttttattattatttgaaattttattaatttcgtaaatttttaggtgttaataagggtgatcgatttgttttggtttattagatatattttttattttagtattaaatgtttagtattttggaaatttttttattaaaaggaaaattggtataaatagtttttttaggtttttatattatatttattaaattaatttttttagggaaggaaggaatttacgaatttggttttattaggttttttaagtgatatgatatatattagggtttaagaattattgttttattataggtagaaaaagttaaaaaaagagtaataggtatattttttttataagatttattttttaaatttaatttttatatataaatgggttttaatttgtagttatagttttgacgtttaatgggatttaattgtatagataggtatttttttaaaaaaaaaaaaaaagagatatttgaattattattttgttaaatttttatttttaattttattttaagaattagttttgtttttttattatgttttatttatatttatttttattaatttttaatattttttttttttttttttaggattttgttttggtttagtagatcgagtaaattgttaataatttaaaattaaggttttttttatgaatatgtaagtaattttttttaaataatttttaaaaattttttagtgtatggtgggagtatggttttttaatttattttgagtgttttttgtttttttttatgatttgagaggaaattaataattaattttttttttatagttattattttttatatttgggtttttgtttttttatttattttgttgatttttagtttgtaaattgtattgattattaaaagtaagatggttaattaatgatatattttagttattaaaatttttatgtagaaatataaattataataaaatgataaaatgaattagtttttttatgattttaaatgtatttttggatattttagttttttagtatgtttatgtatttttgagttgtataagtgaaatatttaaatttggttgaaattgaataattttatgttgttgaagtttttttattaaaaatttaaataatattgttatttgatttagtaaggtgggtttaattgtaacgaatgaatatttattgttagaatgttaattgtggaaatttttaaagggtaatatgaaaattaattttagttatatttttttaaaaattatatagttttgaaatagatggatttaaaggatataattattatgggttttttaaaaagtatatatttattagttttttttaaggtttttgttgttgtttttttattaggaagtttaatgaaagtttgtttttttatacgatttttttttattaaacgtatattaaatttagaaggaagaaatagttttgatttaaagaatgttagttttaatgtgaatgaaaatgtgttgaataatttaatattttgttattttaaataaaagtgattatattatttgataggtacgttaattatttagttttttaaaaatatattttatgttttgtattaaaattgattttataagtaggtagtatttgtttaagatatattnttaattatttttattattataaaagtatgtgatttaaaaatatattattagtaattagaanaataaattttttttttttttttttttttttgagatagagttttattttgttatttaggttgagtgtagtggtatgattttcgtttattgtaagttttattttttaggnttacgttaatttttttaatttagntttttaangtagttggggttttacgtgtntcgtattacgttttggttaattttttgatttttagtagagatgggttttaatcggttaagtaggatggttttgatttttgatttttgatttttggatttgtcgttttggtttttaaggtgttggatttaagcgtgnattacgttttggcggaattttttaatatttattatttaaatgttaagtttttaatcgtttttttgtttnggttaaaataatttnttttattaaagtgaantgaaggtaatattatatatatatatattgtattatatatatatggaatatatatatgtttgtgtatatatatatgtttgtatgtatgtgtgtgtatatatatatgtttgtttttatgttgttataaagaagtgtttaagattgagtaatatataaaggaaaaagatttaatttatttatagttttatatgattgaggaagttttaggaaatgtataattatggtggaaggggaagtaaatttatttttttttatttgatggtaggaaggagaaattttgagtaaaagggggaaaagttttttatgtaattatgaggttttgggagaatttatttattattatgaaaatatttgtatgggattatcgtttttatgatttaattttagttattttttattaggttttttttataatatatgggggttatgggaattatatttaagatgagatttgggtggggatatagttaaattatatatatatatatatatatatatacgtatatatatatagagtttatatatatatatatatatatatataaggattgtgtagatatgtgtgtgtttgtgtatatatatatataaatatagtttttatgtgtttaaatatatatttattgtttttatttatgtgggtttgtgtgtgtgtgtgtgtgtgtgtgtgtgtgtgtgtgtatattgttagaggtttaaaaaggttaagattttattagtaagaaaaaattagttatttttgttagtttatgtattatgttgttttgtcgttttattgttttatttttttattagtcgtaatggaagaagagattgtcgtattggtgattgataatggttttagtatgtgtaaagttggttttgttggggacgataatttttagttatgtttttttttattatcggtgttttcggtattagggtatgatggtgggtatgggttagagggatttttatgtgggttatatggttgagagtaagtatagtattttgattttgaagtatttttattaagtatggtattatgattaattgggatgatatagagaagatttggtattatattttttataagggattgtatatggttttggaggagtatttggtgttgttgatcgaggattttttgaattttaaggttaatagagagaagatgatttagattatgtttgatatttttaatattttggttatgtacgtggttatttaggttaggttgtttttttatatttgtggttgtatattggtattgttatgggttttggagatggggttatttatatggtgtttatttataagggttacgttttttttgatattattttgtatttggatttggttggttaggatttgattaattattttatgaagatttttattaaggttggttatagttttagtattattgtcgagcgggagattagatattacgttaaggagaaattgtgttatgttgttttggattttgagtagtagatggttattgttatattttttttttttttggagaagagatatgagttgtttgatggttatgttattattatcggtaatgaggttgtagtgtttcgagacgttgttttagtttttttttttggatatggaattttgtggtatttatttagattatttttaattttattatgaagtgtgacgtggatattcgtaaagatttgtaggttaatacggtgttatttggtggtaatatgtatttaggtattatcgataggatgtagaaggagattattattcgggtatttagtattatgaagattaagatgatcgtatttttagagtataagtatttcgtgtggattagcggttttattttggttttattgttagttttttagtagatgtggattagtaagtaatagtataatgatttggttttttttatcgtttatcgtaaatgtttttaaatggattgtgagtagatggttagtaattgttttatgggttaatttagaagtaaaaatttgtttttggtaaatgtatatattttatgttagttttattaaattggaataagttttagaaaataagttgtttttaaagtttgtatttgatattagtattggattgtagaatttgtttttgattttgatattgtatttaagttaattgttttttttggtatttgtatatatttttgattttagtttttagtatatgtggtttggttattttatggttaaaaacgtatttgtggaagataagtttggtttggtgagtttgtatggttagtagtttttgatttgtgtagggtattaatgtgttaggattgagtgttttgggatttgtttataggttggtaagggttttttaattagttgtttttgttttgtcggtttgttagggttggaaagtttaagttataggatttagtttttttttttagtttttgttgtttgttagaatattatgggttgttattcgttttgagttggaagcggtttgtatttatatttataaatgtatttatttttttaatttatgtaaagtttttttgtatgtaattttcgatttttaaagagatgataataaattttggttttttattgttacgtgagaatattaggttttagtaatatattattgtgtatggaaaaataaaagtgttgttagaattaaaaaaatattaatttttaaaaggttatttagatgatttttatgagagattttttaatgttttttttttgttaggattattattgataattttttttagattatgagtaaatagtttgtttttaagtatttatttatgttaatatttattttgtaaaatgtgttttttataggaatataaatagtttttggaaaggatattgataattttaaagtaaaatgaagttttttttgttgttttttattattgggttttgttgggtttagtattttttaaatatataataaggacggatatttattgtttatttgtttgaatggcgatgggttgatattgtttttgaatgtgagcgatatttagtttttaagggatttggaggggtttaggtgggtatgatttatagtattaattgtagaatttattatgtttgtagtaaatagtattttgattttattcgtgaagtttaggtaatattttattttataggtaagtattttaagtaagagttttttgaggaaaaaataatgtagtatttttggtaattttatattttgtttttgagataatttttttttaataagagttttttaatgtgttgttaatatttttaagagatagttgtatatattaagatttaagaattttttatattattgattagtttttagaatatttaatgatatagagtaagaatttggtagttatgaagattgtttaatttgtagg

SEQ ID NO: 106 - DNA, 5421 bp, Artificial Sequence
  chemically treated genomic DNA (Homo sapiens)
  unsure 3355, 3371, 3386, 3455, 3591, 3612, 3620, 3644, 3752, 3813: n is a or g or c or t
tttataaattaaatagtttttataattattaaatttttattttatattattgaatgttttagaaattaattaataatataaaaaatttttgaattttggtatatgtagttattttttgaaaatattaatagtatattggagggtttttgttgaagaaagattattttagaaataaaatataaagttgttaagaatattatattgttttttttttagaaaatttttatttagaatatttatttgtgaagtaaaatgttgtttaagttttacggataagattagaatattatttattataagtatagtgaattttgtaattgatattatgaattatatttatttgaatttttttaaattttttgggagttaaatatcgtttatatttaagagtaatattaatttatcgttatttaaatagatgaataatagatgttcgtttttgttgtgtatttggggaatattgagtttagtagaatttaatggtgaaaagtaatagaaagaattttattttgttttgaagttgttagtgttttttttagaaattatttatatttttgtaagaagtatattttataaagtaaatattagtatgaataaatatttgagggtaaattgtttatttataatttgaaaaggattattaataataattttaataggagaagaatattaaaaagttttttatggaaattatttaaatgattttttagaaattaatgtttttttggttttggtagtatttttatttttttatatataatgatatattgttggggtttaatgtttttacgtaatagtagaaaattaaaatttgttgttatttttttaaagatcgagaattgtatataaaaaaattttatataaattaaaaggatgaatatatttataggtataaatgtaaatcgtttttaatttaaggcgagtaatagtttatggtgttttggtagataatagaagttaagaaaggaaattgggttttatggtttggattttttaattttgatagatcgataggatagaaataattggttaaggagtttttattagtttgtagataaattttagaatatttagttttgatatattaatattttgtatagattagagattgttggttatgtagatttattaagttagatttgttttttataagtacgtttttagttatgaagtgattaagttatatgtattaaagattgaaattaaagatatgtatagatattaaggggaatagttaatttgaatataatgttaaaattaggaataagttttataatttagtgttgatattagatataagttttaaagataatttattttttaaggtttattttagtttggtgaggttagtatgaggtgtatgtatttgttaggggtaaatttttatttttgaattaatttatgaagtaattgttagttatttgtttatagtttatttagaagtatttgcggtggacgatggagggggttaagttattgtattattgtttgttaatttatatttgttggaaggttgatagtgaggttaggatggagtcgttgatttatacggagtatttgtgttttggggatgcgattattttgatttttatggtgttaggtgttcgggtggtgatttttttttgtattttgtcggtgatgtttgggtatatgttgttattagatagtatcgtgttggtttataggtttttgcggatgtttacgttatattttatgatggagttgaagatggtttgggtggatgttataagattttatgtttaggaaggaaggttggaatagcgtttcgggatattgtaattttattgtcgatggtgatgatatggttattaggtagtttatattttttttttagggaggaggaggatgtggtagtggttatttattgtttaaagtttagggtaatatagtatagtttttttttgacgtagtgtttgatttttcgttcggtagtggtgttgaagttatagttaattttggtaaggatttttatgaggtagttggttaggttttggttagttaggtttagatgtagaatggtgttagggagggcgtagtttttatagatgggtattatgtgggtgattttatttttaaagtttatgataatgttagtgtgtaattataggtgtagagggatagtttagtttggatggttacgtatatggttagggtgttgaaggtattaaatatgatttgagttattttttttttgttggttttgaggtttagggggttttcggttagtagtattaggtgtttttttaaggttatgtgtagttttttgtagaaggtgtgatgttagattttttttatgttattttagttggttatgatattatgtttaatgggggtattttagggttaggatattgtgtttgtttttagttatgtagtttatataggagtttttttggtttatgtttattattatgttttggtgtcgggggtatcgatgatggaaggaaatatggttgggggttgtcgtttttagtaaagttagttttgtatatgttggagttattgttaattattagtacggtaatttttttttttattgcgattggtggaggagtgggatagtggagcggtaggataatatggtgtatgggttggtagaggtgattggtttttttttattgataaaattttaatttttttaaatttttggtagtgtatatatatatatatatatatatatatatatatatataaatttatataaataaggatagtaaatatatatttaaatatataaggattgtatttatatatatatatatataaatatatatatatttatatagtttttatgtgtgtgtgtgtatgtatatatagattttgtgtgtgtgtgcgtgtgtgtatatatgtatatatgtatggtttggttgtgtttttatttaaattttattttgaatgtagtttttataatttttatgtgttatgagagggatttggtaggaggtaattgaaattgaattatgggggcggtaattttatatagatgtttttatgatagtgagtgagtttttttaagattttatggttgtataaggggttttttttttttttgtttagaattttttttttttgttattaagtgaagaaggatgggtttgtttttttttttattatgattgtatattttttgaggtttttttagttatgtggaattgtgagtggattgaattttttttttttatatattatttagttttggatatttttttatagtagtatgagaataaatatatatatatatatatatatatatataaatatatatatatatataaatatatatatattttatatatatataatgtagtgtatatatatatagtgttatttttantttattttgatagagngagttgttttgattnggatagaagggcggttgaggatttaatatttgaataatagatattaggaagtttcgttagggcgtggtntacgtttgaatttagtattttggaggttaaggcggtaaatttagaggttaaaggttaggaattaaggttattttgtttaatcggttaaagtttatttttattaaaaattaaaaaattagttagggcgtggtgcggnatacgtgaagttttagttatnttggaagnttgagttagagaaattggcgtgantttggaagatggagtttgtagtgagcggagattatgttattgtatttagtttgggtgatagagtgagattttgttttaaaaaaaaaaaaaaaaaaaagaagtttgttnttttagttgttaatagtatatttttaaattatatatttttatgatagtgagaatagttaanagtatattttaaataaatattatttatttgtagaattaattttagtgtagaatatgaaatatatttttagaaaattgaataattgacgtgtttattaaatagtgtagttatttttatttgaaatagtaaaatgttagattatttaatatatttttatttatattgaaattgatattttttgaattaaaattgttttttttttttaggtttgatatacgtttgatgaaagaaggtcgtatgaaaggataagtttttattggattttttaatgaaaaagtagtagtaaaagttttaaaggaagttaatggatatgtgttttttggaaaatttatggtggttgtattttttaaatttatttattttaaaattatataatttttagaaggatataattgaaattaatttttatgttattttttagaaatttttataattggtattttagtagtagatatttattcgttataattaaatttattttattgagttagatgatagtgttatttagatttttaataaaagagttttagtagtatgaggttgtttaattttagttaagtttaaatgttttatttatgtagtttaaaagtatataggtatgttaagagattagagtatttagaagtatatttggagttataaaagaattaatttattttattattttattgtaatttatatttttatatgagaattttaataattagagtatattattgattaattattttgtttttagtagttaatgtagtttgtaaattagaaattagtaagataggtaaagaagtaaaggtttaggtataaaaaataatgattgtaaaggaaaagttaattattaatttttttttaagttatgaagagaggtaggaggtatttaaggtaaattaaaaaattatatttttattatatattagaaagtttttgagaattatttagaaaagattatttgtatatttatgaaggaaattttaattttaaattattagtagtttgttcgatttgttagattaaaataagattttaaggaaggaaaaagaaagtgttaaaaattaataaaggtaagtgtgaataaaatataataaaaagataagattaatttttgagataaaattaagaataaaagtttgataaggtagtaatttaggtatttttttttttttttttttgaggaaatatttatttgtgtagttaagttttattaaacgttaaaattatagttatagattaaaatttatttatatgtgaaaattaagtttggagaatgaattttataaggggagtgtgtttgttattttttttttaattttttttgtttatagtaaagtaatggtttttaaattttaatatgtattatattatttggagagtttaataagattagattcgtaggttttttttttttttgaaagagttgatttggtaggtatgatgtggggatttagggaaattgtttatattagttttttttttaatgaggggatttttaggatgttggatatttagtgttgaaatggggaatgtgtttggtaagttaagataggtcggttatttttgttggtatttgaaaatttgcgagattaatgaggttttaggtaatgatgaggtatt

SEQ ID NO: 107 - DNA, 6111 bp, Artificial Sequence
  chemically treated genomic DNA (Homo sapiens)
ttttaataatattaagatttattgcggataatattaaaatttattataaaatgtattattagttgtagtagtaatgaagatagtatgatattagtattgagatagatttataggttaatggattataggagagagtttttttttttaataaatttatgtatgtggagatttaataaacgatgaatatgatatagtttagttgggagaggatgggttaattaatggtgtagggatattttattatttatatagtaaaaattagaatttaatttatattatatataaaataagttaagtggatttaaagatttaaatatgagaagtaaaattataggtcgggcgtggtggtttatgtttgtaattttagtattttgggaggttaaggtgggtagattatttgaaattaggagtttgagattagtttgattaacgtggtgatattttgtttttattaaaaatataaatattagttaggcgtggtggtgagtgtttgtagttttagttattcgggaggtcgaggtaggagaattgttggaattcgggaggcggaggttgtagtgagttgagatggtgttattgtattttagtttgggcgatagagtaagattttattttaaaaataaaaaataaaataaaataaaataaaaattttataaaataaatataatatagaaaaaattgtataagtttagggtagaagtggattttttaagataaaagaaatataaattataaagaaaatgattaatatatttgatatattaaaatttatattagttcgttaaaagatattattttaaaaagtgtaaagaattatatattgggaggagatatttttaatgtatataattgaaaaatgattcgtatttagattgtagagaatttttttatttcgataagaaaaagataaataatataatagaaaaatgggtaaagggtttgaatagtaattttatagaagaggaaaagtaaatggtttataaatatgtgaaaagatgtttaattttattagtaattatggaaatgtaaataaaaagtattatattatattattttatattaattagattgataaaaatattaaagtttgataatattaaatgttgttgaatttgtagggtaattatataattttgttgttgatagtgtaaattggaagagttaattttaaaaataagttagtgttatttaataagattgaagatatatgtacggtaaaatttagtaatttttttgttagtatatatattagaaagattttatatacgtgtattgggaagtttttataagaatgtttatagtaataatgttttaataggaaaaagttgaaaatagtttaaattgtattagtagtaaaatggataaatatttgtggttttagtaatttaggaggttgaggtaggaggattgtttgagtttaggagtttaaggttgtagtgaatcgtgatggggttattgtattataagtttgggtgatagaatgagattttatttggaaaataaataaatattgtgtattatttgtttataatgggatattatatagtagtgaaaaggaataaatgaattttggttgaattttaggaatatgacgttgtagtaaaaatgtaagtagtagaagaatttatatagtataataattttatttatttatagtttaaaaatatggtaaaattaaataagatattgtttaaagatataattataaggtgaaatttcgtttttattaaaaatataaaaattagttgggtatggtggcgtgtgtttgtagttttagttattcgggaggatgaggtaggaggatggtttgaatttgggaggtagagtcgagattacgttattgtattttagtttggtgatagagcgagatgtcgttttaaaaaataaataaataaaaattatataattataagtggaaaaattatagagagaaataagggatgataaatataaaatttaggataatgtttttatttttgttggggaggggagtagggtatgaggtcgatggaattttatgaaagattggggtattggaatttagagtttttttgttagttgggttatgggtatatgatattattagtttattatttttttgttgttttttagatgggtatagatatagatggggaacgtatattgtttaattgtgaattgaattaaagcgttaatttaatgtaaaatggtttatatggtttttagattttagatttaaatggtttgggtagaaatttggtatcgtgtttttttaagtagtttttttaattttttcgtgttttcgtttttttataatgattggatttgacgagagtgaattatagtgtaattataagggttttatgtatgattaaatattttgttaagtgtttaaagtagtatttggtattaggaaagtattatatatatgtttgttaaataaagggtgggggtttgtgaaggggtttgggggagtggagaggagtattgaattttttaggtgtttttataattcgggagtaaaattttaaaagtttggttttgtatttttagcgtggggatagtttttgcggtttttttttagagattcgagggaaataaggtattttatggtagataatttgggaagtttttggggtagtttgttggtgaagggagggataaatgttattttaatttatagtttatgatatgtttgtttttagttttttgttacgggggtagttgtttttaggggtgaatttgagggttttaagtatatcgtgagttcggttttttgaaattaggttgtttttcgaaattagtttagtttttttttatttgggtgttggtttgtttttgagtatgtttggttttttttttcgttttttgtatttaagggagaggagttttgtgttgtttggggtgatttagttttggggttaaattttgaaatgatttggtttttagagaagttgtgttggttcgttttaagtttgagggattggggaggtattatgttgtttatcggaagtattgtataaggaattagtaggattttaagttttggaattatattttttatttataggatgttttttatattatgtgatattttgtgtttatatgttggtgtttttttttttgagtgtgggaattttaaagagaaaaatattgtttttttttttttttggatggtgaaacggtttttagttttcgttatttttgttggtgataattacgggttcgttttagaagttattattgagtatttgttatgttttgagttagttaatatttaagttttatttttgtttttgagtggggtgtatgttacgttgtttttttatgagtgagtttggtttagtatgtgttgttaagtgagattatttgtttttcggggaggttgtttgaaattatgtttaatgtgatttgttttttttatattttttagttttttggtttttttaaaataaataaataataataataataataataaatagttattgttttgagtttaagtgttttaaaaggtttttgtttaaggattgtgttgtggtagatatggcggttttttttagtttatatgtggtttagaattttgttagttttgttaggtattagttttcggggagatggtttagcgtttatggggtgcgttttagttgttgtggaaaatatagacgggttatgaagttgatttcggtggtattttttcgtagtagttgtgtttttatggtaaggttagtttggtgttgcgggaaagttttaaagttagatggcggtttcgttaggggatttggattagcgtgggtttagtaggaggttaagtattacgtgaggaaggttggagagattttttttagggaggattgtattagaggtttttagcggtgatatttatttttagaggaaattatggagggagatagtttttattttaatggtattatttttagggtttagggaggttgttatgtttttggtttcgtagtttagtttttcggggttatttgttttttttgttagttattaattgttattttaggatatggtgtttttattgataaagttattttgggtagatgatattttatttcgttgttggacgggcggacgttgtaaaaggcggttttttaggttaggtttgtaggagtttggtttgggatggtttagtttggttggtgggtagtttcgattttttggtagttgcgggatcgtttgggcgtttttttgttcgcgttattttacgtttttttagtcgttgtttgcggtgatttatttcggtttttaggaacgttgttatttttggttttggtgttattaagattgtgtttagattttttgtaaatcggttattaagtagtatggggttttagtgaaagtacgcggagaatagagggggtagcgcgtttcgggaggtttttcggttttggagagttttagttttttcggggggcggaggggtcggttagaaggatttttgcgttttatattcgtagcgtcgatagggcgtgcgttttggtttagcgtttttcgattgtttttaatttaggggtatttagggtcgaagttttttttatagagtttttttttttttaggaaataaaataaaataaaataaaaattaggaaaggtaaattgtgtagatgttattaaaaagaaattttcgtttagtattgttttttttgtatttagcgatttttagataagtagaagaggagatgttttgttcgcgattaaatcggatttttttttatttattatttttttagcgtgtggtttgatgtttaattttgggttttgaatttagtttttttcggttgttttcgatttcggggtaattaggggttcgcgtcggtcgaggtttggggagcggggttttttggggttgggggaggaggtgtttttgtaatttgcggtttttaggcgggcgttattttttcgttcgttcgtgtcgggagcgttcggttcgatagtaagcgtttttggggtcgataaggttttcgggggtttggttcgtacgttataggtttcgtagaggttgcggtgagttcgttagttttagttgtttttttttaagtttttaaggtttttcggcgggtttttgttgaaagatcggtatgttttattttgtgggttttcgcgaagtgagtattgggcggttgttcgggtggacggggagatgttaggagggggttatttaggtcgcgttagtaggtagtacgcgagtaagagtagttttgtatattttattcgtttcgttttttcgtgggttttttgttttagtatagcggtatatcgattttgtagttgaaggtagtaggtggattttgttttattcgttgaagttagttttatattttttatatttagagatttgttgttaaattgagttttaattatttgggtttttgaattatgttttgttagtaatagcgttggggagggatggtttttggattatagtttaaatttattgagattttagaggtttttttttgagtttgttaaattgcgttttgtaggtgtgttattataggttgcggggtgggttattcggttagggggttgttattgttatttggaaggggattttggtttgtttttttaaagatttacggaggtcggtggttttatggttatatttgttcggtttttttaatttatgttgttaatttatggagagaaatatgtttacgaaggaagggaaagagcggcggcgtggtttggggagataggtttttatggatattttttaagtgataatggcgcgttagtaaggttattttagtttttttgttttttttgtgtagatagaattcgttttatttttgtttggtagtacggttagtttgtgttatgtgttagtgttttttgttgggtacggtttttagtttagtgatggatttagagtttagagttggatattaggttatatatacgttgaaagggtagtaagtgaaaaggagtttggtttagtcgcgggtagggtatttcgttttttgtttgtttaaaagtcgttgggtgtagaggaagtaatattaagcgggaatttttttttagtggtatttgtataatttgttttttttggttgattttttttttttttttaaggagagagaggttttgtagaggaagtttgggttt

SEQ ID NO: 108 - DNA, 6111 bp, Artificial Sequence
  chemically treated genomic DNA (Homo sapiens)
aggtttaagttttttttatagagtttttttttttttagaaaaaaaaaaaaaattaattaggaaaggtaaattgtatagatgttattaaaaagaaattttcgtttagtattgttttttttgtatttagcgatttttagataagtagaagacgaaatgttttgttcgcgattaaattagatttttttttatttattatttttttagcgtgtgtgtggtttgatgtttaattttgggttttgaatttattattaaattaagaatcgtatttaataaaggatattgatatatggtataggttggtcgtgttgttaggtagagataggacgggttttatttatatagggagaataagaaggttggagtggttttgttaacgcgttattattatttgaaaaatatttatgagagtttatttttttaggttacgtcgtcgtttttttttttttttcgtagatatatttttttttatgaattaataatataaattaaaagaatcgagtaggtgtgattatgagattatcggttttcgtgagtttttgagaaaataagttaaagtttttttttaaatgatagtgatagttttttagtcgggtggtttatttcgtagtttgtaataatatatttataaaacgtagtttagtagatttaaaggaaagtttttaagattttaatagatttggattataatttaaaaattatttttttttagcgttattgttgataggatataatttagagatttaggtagttggaatttaatttgatagtaaatttttggatgtaaaaaatatgaaattggttttagcgagtagggtagagtttatttgttgtttttagttataaggtcgatgtgtcgttatgttaaggtagggagtttacggggaggcgaggcgggtggggtgtgtaaagttgtttttgttcgcgtgttgtttattggcgcggtttgggtggtttttttttgatattttttcgtttattcgagtagtcgtttagtatttatttcgcggaagtttatagaatagggtatgtcggttttttagtaggggttcgtcgaagggttttgggggtttgaggaggagtagttggggttggcggatttatcgtagtttttgcggggtttgtgacgtgcgggttaggttttcgagggttttatcggttttagaggcgtttgttgtcgggtcgggcgttttcggtacgggcgggcggaggggtggcgttcgtttggggatcgtagattataagagtatttttttttttaattttaggaggtttcgttttttaggtttcggtcggcgcggatttttggttgtttcggggtcgagagtagtcggggagagttgagtttagagtttagagttggatattaggttatacgttgagagggtagtaaatgaaagggagttcggtttagtcgcgggtagggtatttttttttttgtttgtttaaaagtcgttgggtgtaggggaagtaatattaagcgggaatttttttttagtggtatttatataatttgttttttttggtttttgttttgttttgttttgttttttaaggagggggaggttttgtagaggaagtttcggttttgggtgtttttgggttgggagtagtcggggagcgttgagttagggcgtacgttttgtcggcgttgcgggtgtggggcgtaggagtttttttggtcggttttttcgtttttcggggaggttggagttttttaaggtcggggagtttttcgaagcgcgttgttttttttgtttttcgcgtgtttttattagggttttatgttgtttagtggtcgatttgtagggaatttgggtataattttaataatattagggttaaaaataataacgtttttgggaatcgaggtgagttatcgtaaatagcggttaggagggcgtgggatggcgcgggtaggggggcgtttaggcggtttcgtagttgttagaaggtcggggttgtttattagttaggttggattattttaggttaagtttttgtaggtttggtttaggaagtcgttttttgtaacgttcgttcgtttaataacgggatgagatgttatttgtttagaatggttttattagtgagaatattatattttggaatggtagttggtggttggtagagggaataggtgatttcgaggagttgagttgcggggttaggggtatggtagtttttttggattttgggggtggtgttattaaggtgggggttgtttttttttatggttttttttaggggtgggtgttatcgttgggggtttttggtgtagttttttttgagaagggtttttttagttttttttacgtgatgtttggttttttgttgggtttacgttggtttaggttttttgacgaggtcgttatttggttttagagttttttcgtagtattaaattggttttgttatgagggtatagttgttgcggaaagatgttatcgagattagttttatgattcgtttgtgttttttatagtagttggagcgtattttatggacgttgggttattttttcggggattagtgtttgatagagttgatagagttttaggttatatgtgggttagaaggaatcgttatgtttattatagtatagtttttaagtaggagttttttgaagtatttggatttaaaataatggttgtttgttgttgttgttgttgttgtttgtttgttttgagggagttagaaagttaaaaaatgtaaaagaagtaggttatattagatatgattttagatagttttttcgaaggatagatgattttatttggtaatatatattgggttaggtttatttatgagggggtagcgtggtatgtattttatttaggggtaagaatgaagtttaaatattagttgatttagaatatagtaagtgtttagtaatggtttttggaacgaattcgtggttgttattagtaggagtgacgaaagttagaagtcgttttattatttaaggaagaggaggaataatatttttttttttggagtttttatatttagaagagagaatattagtatatgaatatagagtgttatatgatgtaggaaatattttgtaggtagagagtataattttaaagtttaggattttgttagttttttgtgtagtgttttcggtgggtaatatggtgtttttttagttttttaggtttgaggcgggttagtatagtttttttgggagttaggttattttagaatttaattttagaattaggttattttaggtaatataaggttttttttttttggatataggaagcggaggaaaaggttaggtatgtttaggggtaaattaatatttaggtgaaagggagttgggttggtttcggggagtagtttggttttagggagtcggatttacgatgtgtttgagatttttaaatttatttttggaagtagttgttttcgtgataaggaattaaggataggtatgttatggattgtgaattggagtgatatttgtttttttttttattaatagattgttttaagagttttttaagttatttgttatagaatattttgtttttttcgagtttttgaaagggggtcgtaaaagttgtttttacgttggaaatgtagggttaggtttttaaagttttgttttcggattatgagaatatttagaaaatttagtgtttttttttatttttttaaatttttttataagtttttattttttgtttaataaatatatatatagtgtttttttggtattagatattattttaagtatttgataaaatatttagttatatataaaatttttataattatattgtaatttattttcgttagatttagttattgtgaagaaacggaggtacggggagattaagagagttatttaagaagatacggtgttaggtttttatttaagttatttggatttagggtttggaggttatgtgagttattttgtattagattaacgttttaatttagtttatagttagataatatacgttttttatttatatttatatttatttggaaggtaataaaaagataataaattgatagtgttatgtgtttatgatttagttaataaagaggttttgggttttaatgttttagttttttatgggattttatcgattttatgttttgtttttttttttaatagagatggaaatattattttgaattttgtgtttattattttttgtttttttttatagtttttttatttatggttgtatgatttttgtttgtttgttttttgagacggtatttcgttttgttattaggttggagtgtagtggcgtgatttcggttttattttttaggtttaagttatttttttgttttattttttcgagtagttgggattataggtatacgttattatgtttagttaatttttgtatttttagtagagacggggttttattttatggttgtatttttaaataatgttttgtttagttttgttatgtttttggattgtgaataagtagaattattatgttgtgtgaatttttttgttatttgtatttttgttgtaacgttatgtttttgaaatttagttaggatttatttatttttttttattgttgtgtgatattttattgtaggtaaatagtatataatatttatttattttttagatgggattttattttgttatttaggtttgtagtgtagtgattttattacgatttattgtagttttgaatttttgggtttaagtaatttttttgttttagttttttgagttgttaaggttataaatatttatttattttattgttaatgtaatttgagttgtttttaatttttttttattaaaatattattgttatgaatatttttataaaagttttttagtgtacgtgtgtgagatttttttagtgtgtatgttagtaggagaattattgagttttatcgtatatgtatttttaattttattagataatattgatttgtttttgaaattggtttttttaatttatattgttaatagtagggttatgtggttgttttgtaagtttaataatatttggtattgttagattttaatatttttgttaatttggttggtataaaatggtatggtgtggtgttttttatttgtatttttatgattattaatgaggttgagtatttttttatatgtttatgggttatttatttttttttttttatgaaattattatttaagttttttgtttatttttttgttatgttgtttgttttttttttatcgaggtggaggagttttttgtagtttgaatacgaattattttttagttatgtgtattgaaaatatttttttttagtgtgtagttttttatattttttaaaatggtattttttaacgaattaatatgggttttaatgtgttaaatatgttgattattttttttatggtttgtgttttttttgttttaaggagtttatttttattttgagtttatataattttttttgtattatatttattttatagggtttttgttttgttttgttttgttttttgtttttgagatggagttttgttttgtcgtttaggttagagtgtaatggtattattttagtttattgtaattttcgtttttcgggttttagtaatttttttgtttcggtttttcgaatagttgggattataggtatttattattacgtttggttaatgtttgtatttttagtagagatagggtgttattacgttggttaggttggttttaaatttttgattttaagtgatttgtttattttggttttttaaagtgttgagattataggtatgagttattacgttcgatttatagttttattttttatatttaggtttttaaatttatttgatttattttgtgtatgatgtgagttgagttttgatttttattatgtggataatgaaatatttttgtattattgattagtttatttttttttagttgaattgtgttatgtttatcgtttattaagtttttatatgtatgagtttgttggagaggagaatttttttttatgatttattggtttataagtttattttagtattgatgttatattgtttttattgttattgtaattaataatatattttataataaattttaatattgttcgtaataagttttagtattgttgagg

SEQ ID NO: 109 - DNA, 6240 bp, Artificial Sequence
  chemically treated genomic DNA (Homo sapiens)
taggagttatttagaggaataattttttttttttttttttttttttttttttttatttgagatggagttttattttgtcgtttaggttggagtgtagtggtacgatttcggtttattgtaattttcgtttttcgggtttatgttatttttttgttttagtttttcgagtagttgggattataggcgtttattattacgttcggttaattttttgtatttttagtagagatgaggttttatcgtgttagttaggatggtttcgatttgttgatttcgtgattcgttcgttttagtttttcgaagtgtagggattataagtatgagttaatacgttcggtttaggaataatttttaaattaatagttatgaattgttaatataaattaatatatttaattatgattttatcgtttagaaggaggttaagaaagtgaattgatttaaagaaaaatacgaagtaaataattataaaggtggattacgaaggtggtttgtgtatagtttagaagtttaggaaggaatgtcgggtagagagggtggaatttgtttcgaggattaaggttttgaagttttatttttaattgttgttttttatttttgtattgatgttttattttataagtacgtgttgtttttttattgtacgttaggtgtagaggatacggtatatttggtgttatttttatggaggtatttggagggttgtttgggggtagtattattgatttgtgtttttagggtaagtggggagtggatgaagtaaaggtaggaagttttttaggtttaaggattagtttgtgtgtagggaggaagggagaatgaagcggggaaaagtaggttggatttgaattgaaagaggttattggggtggagtatagaagtgataggggagagcgtttgagatgaggttagagaattattgggggttggattatataggttttgtaggttacggtaaggattgtgggtgttgttatttatttggttaatatgtattgggtttttgttttgtgttgggtatggaggggtatacgatgttattaggtttttttttgaggtgtttgggtgtagtagtaggtttttgaatatattggtagtatttttttttttttttttttttttttttttttgaaatagagtttcgttttgttgtcgtttagattggagtgtagtggtacgattttcgtttattgtaatttttattttttgggttcgagcgattttttcgttttagttttttaagtagttgggattataggcgtgcgttattacgtttagttaattttgtatttttatttatttatttatttatttatttattttttgagatagagttttatatcgttttttaggttggagtatagtggtataatttcggtttattgtaatttttgtttttcgagtttaagcgatttttttgttttagttttttgagtagttgggattacgggtatttgttattatgtttagttaattttttgtatttttattagagacgaggttttattatgttggttaggttggtttttaatttttgatttcgtgatttgtttattttagttttttaaagtgttgggattataggtatgagttatcgcgtttagttttagtggtatttttttaagtgttgtgatagaggtgggaattggagattggggaagcgtagaggggagtgggggttggtgtgtatgataaggtagtgatattgagttgggttttgaaggatgagtaggagtttgataagagggagaggaaaggtatttttggtagtgggaatagaatgagtaaagttatagaggtatgaaaaagtttcgatgatttggggagacgttggtagttggagttatagtgggtagtagaaagaggataggttagagggttaagtttatagaaggtattaaggtttaagttagagttaaggttttattttgtaggttgggtattaggtttgaatgggagagttttatttatatttttaggtagagttttttgttgacgtgtgttggtggggttgggtgataggggagggtagtatagtcgttattgttcgatggggtgtggaggtggttaggtttgggttgtggtaggggattggacgagggaagtttttttgtgtgtttttgaaggtgggggttgtagagtatggttgtttttgtgtttttagtttgggttggtttggtgtttagagtagggattttttattatagagttaattttgggttatttgttgtattaatttggaagattagaggttttgtttagaagagtaaagattttagttagttgggtttatggtttgaatttaaagtaaataggaagagagtatggtgggttaggtagggtttttttttttgtttagaaaagggattagtttaggtcgatttgtgggtttttttgttgtaaaggtgggagggggttgtaggtttcgttagggatatattaaaaggttttttaggggtaggtatggtgttttagtgttagtttggggggtgttgtaaagatgggtttttttggcgaattttatttattttgatgggaggagtttggtagtatgtgttgggagttattgtttttttttttattacgtttaagttggagttttttttgatatttgatttcgtacgattgttttttggggttattatttaagtttaatggggtgtttgttagttattgtagtgggaggtttattttggttttagattaaggttttttggggaaatgttaaaggtttagaatatttttagttttaaaggtgggtatttaggatttttttaaagattttgggtttagattcggtttttatatattagacgagaggcggtaggtatttgtgttttgtttatgtttgattgaattaatttacgtgtttttttagtttatatattgtatttatttaagaagtttttttgtaagtttaggggtggtaggggtggtaggggtggtagacgagtgaggtttttagggagtagagttgagggagtaggaaggtatgtggggttttgatatgttggggtttggtacgagttcggtttgtttgttatgtttggagaagggtttagaagaggtaggtattttttttgggggtaggtgtggggtggggataagttgggagatagaggttagaaagattttggtaaggagttttttttggattgatttatttatttatttatttaatttttcgtgtatgtgcgtatttatttaatattttagtaatgaggatttattgtgtgttaggtattgtgttaagtgttggtgaggttttgttgttatggggtttgtagtttaggatttaagttattattatatagattaaagggaaaattacgttgagttttggggttttgtagaataggtttgtggagttaatggagtttataggagtttgatttggttagggaggttagggcgcgttcgttgcggaagatttgtaggatggaaaggaattaattaaggtaatagggaagagaagatttaggtagagggaataggttgtgttaaggttttggggtttgatgaaggttagagtggttggggtattgtaataggggggaagaggttaggaaatgggtaggttgattgtattcgggtttgtgggtgtttttagaaggtttggtttggattttataagtaaaaggaaggttttttttagtagtggtataaaatgatttaatttgtgttgagtaggtttaagtaggttcgaatggaggtagggagtttataggggcgttgttgtgtttatataaatgatgagaatggttttgattaagtgtattttgcgatgggggaatgtgggtgaattggatgtggagtgaggttaggcggtgtcgaggtttgagaaattgggttggtggatggggaaagtgataatgaatataatttttttgtaaggtgtgtattttattttgtatggtaagtaatatttttatttttattaaggatagaaagaggtaattgttgagttttgggtaagaaagaagggaacgatttttttttttttttttttgagttttattttgttatttaggttggagtgtagtggtgcgattttagtttattgtaatttttgtttttcggatttaagtaattttttgttttagttttttaagtagttgggattatagacgttcgttattacgtttaattaattttttttgtatttttagtagagacggggtttcgttatgttggttaggttggttttgaatttttaatttcgtgatttatttatttcggttttttaaagtgttaggattataggcgtgagttattacgtttagtcgggaatgatttttaattattttattatttggtgtttaatatgtttttttattaaatttgtttaataaatttgagaggtaaatattgttatttatttatgaggagagaggtttagaagggtaaagttatttgtttaaggttatagttggaaagaggtgaagtttttagtaaaaaaagtaaaataatttattttattttatttcgtgagttgataatggaggaaaaagtatttggtaagaagcggtagggaggggaatttggaggaattttttgtttttgaagaatgtaagggaggttgggattttgttattgaggagtttttggtatttttttagagatgtaattaaaggggtgattttagtgtgtttttaataggagtcgggaattttttttttgtgtattttttattttttgtttttgggaagtttttttttgattttaattttagttttgatgttgtttttatttttttagtttttaagtagattaatgtaatgttatttggtcgtttgttttgtttattgggtttatagtcggaagtttgttttttagttttcgggtttgattttaggtcgtttgtagtttgtaattagatattgtttgtttttagtaggtatttttcgagtttagttttatatatcgtttttggattttttttttttaggcggagcgtgtttttgtttagtttagtgattttcgtttgttggagttttggttaatttttgtttagtttgtttgttgtggggttttttttttttggggatataagttcggtttggggttgtttcgttttttgtttggtttgaggttttttgagtcgtttttttattattattatggttaagggtttttatatttttaagtttttgggtattttggggatttttttgggcgtggtagtcgtgtgtataattatcgtattgttagtggtgtatttttaggagaagaataagaacgttaatagttttttcgtggtttttattatttcgttcgttttagttattattaatttcgtttcggttattattttggattaaagtaaagcgtggaatcgttatcgtttttttaatacgttgaaattcgatttttatcgggtgacgttgagatcgtattttatttttaatgataggggtttgtacgtttttaagggttttagtatcgttcgttttatttgtaaggaggttattgacgttattattatttatagtaagaagtttaattatatttttagttagggtatagggtggttttgcgtggtgtgggaggtttttagtttttcgatattgataagattgagttggtggagtttatcgagtatttggtggtgtattttaagggttttttggtgaaggatagttagtatgagatggatagcgagttcgagggggagttggtagatgatttggcgggtttttatcgtagcgagtatatggagggtaatgttagaaagtgagtttcggttgggttgttcggtggggtggattcgaggtgttgaggtaaggttggattttgagggttaaggaaggatttagtttgtaggtttttgaattttgtggagttcgagattggtttattgttttatttttagttgttggtaaagtagttgtaaatgtatcgaattgggagggtttttttattttttattagggagttggggatgagggatagagcgttttttggatagataggaaaatcgaggtttagaggagagaaatttattcgaggtttttgagagtttgttggtatttcgaatttagaaggagttttaatttttacgagttagttggtttggtagggtttcggaggttttcggcgaggcgggggtgggagtaggagtaggggttaggttggggtagttttttatgtatttttttttttgtatgtttggtagtatttttagagttttttttatatttttagttttggtatattttttaatttttttgttggggtagg

SEQ ID NO: 110 - DNA, 6240 bp, Artificial Sequence
  chemically treated genomic DNA (Homo sapiens)
tttgttttaataggaaggttagagggtgtgttagagttgggggtgtgggaggggttttgaggatgttattaggtatgtagggaaaggggtatatggaaggttgttttagtttaatttttgtttttgtttttattttcgtttcgtcgggagttttcggagttttgttaggttagttgattcgtgggggttggggttttttttggattcggggtgttagtaggtttttagggatttcgggtgagttttttttttttgagtttcggtttttttgtttgtttaagggacgttttgttttttatttttagttttttggtgaggggtggggaagtttttttagttcggtgtatttgtagttgttttgttagtagttggaggtgaagtaatgggttagtttcgggttttatagggtttaaaggtttgtaagttaagtttttttttggtttttagaatttagttttgttttagtatttcggatttattttatcgggtagtttagtcggaatttattttttgatattgttttttatgtattcgttgcggtagaagttcgttaggttatttgttaattttttttcgaattcgttgtttattttatattggttgttttttattagggagtttttgaggtgtattattaggtattcggtgggttttattagtttagttttgttaatgtcggggggttgggagttttttatattacgtaggattattttgtgttttggttgagggtgtagttgagttttttgttgtggatgatgatgacgttagtggtttttttgtaggtgaaacggacggtgttggagtttttaaaaacgtataggtttttgttattgggggtgaggtacggttttagcgttattcggtaggaatcgggttttagcgtgttggggaggcggtaacgattttacgttttattttggtttaaggtggtggtcgaggcggggttggtggtggttgaggcggacggggtggtggaggttacgggggagttgttggcgtttttgttttttttttgggagtatattattgatagtgcgatgattgtgtatacggttgttacgtttaggaggatttttaggatgtttagggatttggaaatatagaagtttttggttatggtgatggtggggaggcggtttagggagttttaggttaggtagagaacggagtagttttaggtcgggtttatatttttaaaggggaggagttttataataggtagattgggtaaaaattaattagggttttaataggcgaaggttattggattgggtaggggtacgtttcgtttggggagaggagatttaggaacggtgtgtggagttgggttcggggggtgtttgttggaagtaaatagtgtttggttataggttgtaggcggtttgggattaggttcgagggttgaagggtaggttttcggttgtaggtttagtgggtaaagtaagcggttaggtggtattgtattgatttgtttgagagttgagagggtgggaatagtattagaattgaggttagagttagggaaggattttttaggggtaagaggtgggaggtgtatagagaaggggttttcggtttttattaagaatatattggggttatttttttggttgtatttttggaaggatgttaggggttttttagtgataaggttttagttttttttgtattttttaagagtagggagtttttttaggtttttttttttgtcgttttttgttaaatatttttttttttattattagtttacggaataaaatgaaatgagttgttttgttttttttgttgaaggttttatttttttttagttgtgattttgagtaggtaattttatttttttgaatttttttttttataaataaataatagtatttgttttttaggtttgttgaatagatttagtgagaaaatatattaaatattaaatagtagaatgattaaaaattattttcggttgggcgtggtggtttacgtttgtaattttagtattttggaaggtcgaggtgggtggattacgaggttaggagtttaagattagtttggttaatatggcgaaatttcgtttttattaaaaatataaaaaaaattagttgggcgtggtggcgggcgtttgtaattttagttatttgggaggttgaggtagagaattgtttgaattcgggaggtagagattgtagtgagttgagatcgtattattgtattttagtttgggtgatagagtgagatttaaaagaaaaaagaagaaaatcgttttttttttttttatttaaagtttaataattgtttttttttatttttggtagaaatgaagatattatttattatataaaataaaatatatattttataggaaaattatgtttattgttattttttttatttattagtttagttttttagatttcgatatcgtttgattttattttatatttaatttatttatatttttttatcgtaagatgtatttggttaaaattatttttattatttatgtggatatagtagcgtttttatggattttttgtttttattcgggtttgtttgaatttgtttaatataaattggattattttatgttattgttaaaaaaaattttttttttgtttgtagagtttagattagattttttaaaggtatttataagttcgggtatagttagtttgtttattttttggtttttttttttttgttgtagtattttagttattttggtttttattaagttttagggttttggtataatttgttttttttgtttggatttttttttttttattgttttggttaatttttttttattttataagtttttcgtagcgaacgcgttttgatttttttgattaagttaagtttttatgagttttattagttttatagatttgttttgtaaagttttagaatttagcgtggttttttttttgatttgtgtggtgataatttgagttttggattgtaggttttatgatagtagggttttattagtatttagtatagtgtttggtatatagtaggtttttattattgagatgttgagtggatgcgtatatgtacgaaggattgagtaaatgaatgaatgagttagtttaggagaaattttttattaaagtttttttggtttttgttttttagtttgtttttattttatatttgtttttagaagaagtgtttgttttttttgagtttttttttaagtatggtaggtaggtcggattcgtgttaggttttagtatgttagggttttatatgtttttttgtttttttagttttgttttttgagggttttattcgtttgttatttttgttatttttgttatttttgagtttgtaggaaggttttttaaataaatgtaatgtgtgaattgaagggatacgtggattagtttaattaggtataagtaaaatataaatatttgtcgtttttcgtttggtgtatggaggtcgagtttgagtttagggtttttaggggagttttgggtgtttatttttgagattgagggtgttttgagtttttggtatttttttaaggggttttggtttgggattaggatggattttttattgtagtgattagtagatattttattaggtttgggtgatgattttaaggggtaatcgtgcgaaattaggtgttaggaagggttttagtttgggcgtggtgagagaaggagtagtggtttttagtatatgttgttaggttttttttattagggtggatggaattcgttaagggagtttatttttatagtattttttaggttggtattggggtattatgtttgtttttgaaaagttttttgatatgtttttgacggagtttgtagtttttttttatttttgtagtagaaagatttataagtcggtttggattaattttttttttaaataaagaaagaggttttgtttggtttattatattttttttttgtttgttttggatttagattataggtttagttggttggaatttttatttttttggataaggtttttggttttttaagttggtgtagtaggtagtttaaagttggttttataatgagaggtttttgttttaggtattaggttaatttaggttgggggtatagagatagttatgttttgtagtttttatttttaggaatatataaaagggtttttttcgtttagttttttgttatagtttaggtttggttatttttatattttatcgggtagtggcggttatgttatttttttttgttatttaattttattagtatacgttagtagagggttttgtttaagagtgtgggtgggatttttttatttaaatttggtgtttaatttgtagagtgaaattttaattttggtttgggttttaatattttttgtgaatttgattttttggtttgttttttttttattgtttattgtggttttagttgttagcgtttttttagattatcggggtttttttatatttttgtgattttgtttattttgtttttattgttaggaatgtttttttttttttttttgttaaatttttatttattttttaaaatttaatttaatgttattgttttattatgtatattagtttttatttttttttgcgtttttttagtttttagtttttatttttattatagtatttaggaaaatgttattgaggttgagcgcggtggtttatgtttgtaattttagtattttaggaggttgaggtgggtagattacgaggttaggagttggagattagtttggttaatatggtgaaatttcgtttttaataaaaatataaaaaattagttgggtatggtagtaggtgttcgtaattttagttatttaggaggttgaggtaggagaatcgtttgaattcgggaggtagaggttgtagtgagtcgagattgtgttattgtattttagtttgggggacggtgtaagattttgttttaaaaaataaataaataaataaataaataaataaaaatataaaattagttggacgtggtggcgtacgtttgtagttttagttatttggggggttgaggcggaagaatcgttcgaatttaagaggtggaggttgtagtgggcggagatcgtgttattatattttagtttggacgataatagaacgagattttgttttaaaaaagaaaaaaaaaaaagaaaaagaaaaatgttattagtgtgtttaaaagtttgttgttgtatttaagtattttaaaggaaggtttggtggtatcgtatgtttttttatgtttagtataaggtaggagtttaatatatgttggttaaatgaatgataatatttatagtttttgtcgtgatttatagggtttgtgtgatttagtttttagtgattttttggttttattttaaacgtttttttttgttatttttgtgttttattttagtggttttttttagtttaaatttaatttgttttttttcgttttattttttttttttttttatatataagttgatttttgggtttggaaagttttttgtttttgttttatttattttttatttgttttggagatataagttagtggtgttgtttttaggtagttttttaagtgtttttatgagggtagtattaggtgtgtcgtattttttatatttggcgtgtagtgggagggtaatacgtgtttgtggaatggggtattagtgtaagaatgagagatagtagttaaggatggaattttagagttttgattttcgggataggttttattttttttattcgatatttttttttgggtttttgggttgtgtataaattattttcgtgatttatttttgtgattatttatttcgtatttttttttaaattaatttatttttttagtttttttttgagcgataaaattatggttggatgtgttaatttatattaataatttatgattattggtttaaaaattgtttttgggtcgggcgtgttggtttatgtttgtaatttttgtatttcgggaggttgaggcggacggattacgaggttagtagatcgagattattttggttaatacggtgaaattttatttttattaaaaatataaaaaattagtcgggcgtggtggtgggcgtttgtaattttaattattcgggaggttgaggtaggagaatggtatgaattcgggaggcggaggttgtagtgggtcgaaatcgtgttattgtattttagtttgggcgatagagtgagattttattttaagtaaaaaaaaaaaaaaaaagaaaaaaagaaaaaattgtttttttaggtagttttta

SEQ ID NO: 111 - DNA, 5970 bp, Artificial Sequence
  chemically treated genomic DNA (Homo sapiens)
  unsure 3948, 4112, 4820, 4827..4828, 4830: n is a or g or c or t
cgaagtttttattggttttattggatttaatttaggtaggagtttattattgataatttataattagatagttgttaggtgtgataagagtgtttaagatgggggatgagtttttggttaatgataagatggtttttattttttttgtatatttgatttatatttttaattattgtgtttagagtttttatttttttttagatagaggttttttagggatagtgtattttttttaggagtttaggttgtatttatttttattgtgaggttgaagataaaagtgttatagaggttaaaggttgttttttaaagaggttttatttgtataaaattgagttttggtgtgtggattggtttgaattatattttgaatttatttttttttttaatatttgtaaatttagtgtttgtaaaatagtatgtgtgttttttgtggtggtggttatatattttagaatatttatattgttttttatgtagatttttaaggttgttattgattgttttaggtgtaatgttttaaaatatgaaggtgaatttttgttattggttatttggtgggttttttttgatggggaggatggagtttcgttttgtcgttaggttggagtgtagtggagttatttcggtttattgtaattttcgtttttcgggtttaagtgatttttttgttttagtttttttagtagttgggattataggtgtatgttattatgtttagttaatttttgtatttttagtatagacggggttttattatgttggttaggatggtttcgatttattgatttcgtgattttttcgtttcggttttttaaagtgttgggattataggcgtgagttattgtgtttggtcggtgttgtatttttaattaaatttaatttttatagttttaattataattttaaaaagattttgttatgtaaattttttttgattttgaaaatttgatatgacgtgcgttgtgttagtagtaaagtgaatattgattttagaaatttgggttaaataattatttgtgattatttttgttggaatataatttaggtattattattatagtagttgtttattttcggttttgtatagatataaatatatttttatgttatatttttatttataattttaagattttttttttatattttttttatttttttattatatagtgtggattttttttttatatattataaataatgtaatataaatttttaaatatttatttatttattgttttgagacggagtttttttttgttgtttaggttggagtgtagttgggtggttttggtttattataatttgtgttttttgggtttaagcgattttttttttttagtttatttagttttttaattagttgggattataggtatttgttattatatttagttaatttttgtatttttagtagagatggggtttttttatgttggttaggttggttttgaatttttgattttaagtgatatatttagtttagttttttaaagtgttgggattataggtatgagttattgcgtttagttttttaagaatgatttttttaagtttagaaggtgaaataaatatagaaaaatgttgatgaatataattattatgtttgtttgttagtgttatataattaatttttaaatttagtagtttaaagttaattgttagtttgtggatttgtaggttagaggtttaggcgtggtgtggttgagttttttatttggggttttgttagttttaattaaggtgttagtagggttgtgtttttatttggagttttgagtttttttttacgtttatatgtttgtgataggtttatttttttaaagttgtaggatggaggtttcggggtttttgtttaggtttttgtcggttattaggtaggatttgtttttagtttttggagggtatttgtacgtagttttttttatttttaaagttagttttggttaggtatagtgatttatttattgtttgtaattttagtattttgggaggttaaggtttgtggattatttgaggttaggagtttgagattagtttagttaatatggcgaaattttgtttttataaaaaaatataaaaattagttgggagtggtggtacgtgtttatagttttagttatgtaggaggttgaggtacgagaattatttgaatttgggaggtagaggttgtagtgagtggagattgtattagtgtattttagtttgggttatagagtgagattttgttttaaaaataaataaataattaattaaataattaaaaatattagttagatttgtttgttaagttttttttgtaatttgatattttttgaagttttttgtttttggtttttagattttagattgaagggattatgtgatgaggttgggtttatttagataattttttttttgattaatttatatgtaattaattagtaattttagttatatttgtaaaattttttttgttatatatgtagtatgattatagaagtgatattttgttatatttataggttttgtttattttttaggggggtattttaaaagggtgagggtcgtgagaattttgtttattatagttatattataattaaaaatttttattttttaaatgatattataagaaggtaaaagggtaagttatagaatgggatgtaagatttataatatatataattgataagggagttgtttttaggatatatatttaattaatttatttagagatgatgttttattttgttattcgtgttggattgtagtagtgtaatcgtagtttattgtggttttgattttttaggtttaagtgattttttaattttcgttttttaagtagcggggattataggtatatgatatatgtttagttaatttttttattttttgtagagacgtgggttttattatgttgtttaggttagtttcggatttttgggtttaaatgattttttcgttttagttttttaaagtgttgggattataggtatgagttattgcgtttggtaaagaatatatattttaaattttatatattaataagaaaaaagataatagaaaaagagataaatgaaataaatatatttttataaaaaaaatttaaaatattaatatttgtatgaatatatgtgtatttttttttttattttatttatttatttttttgagatggagttttgttttgtggtttaggttggagagtgtagtggcgtgatttcgatttattgtaattttcgttttttgggtttaagtgatttttttgttttagtttttcgagtagttgagattataggtgtatgttattatattaagttaatttttgtatttttagtagagatagggttttattatgttggttaggttggttttaaatttttgaatttatgtgattcgtttattttagtattttaaagtgttgggattataggcgtgaattattgtattcggttatgtgtatttttaattgtggaaaaatttggtgtttagtgtttggttttttttgttttgggaggtttaggtgattttgttatagtttgtgttattttgtgatttgtaggtattgggagatttatagggaagatattgggatattttagaagttgggaaatgaaaagaagagtgaagaatgtaattatatatggatggatggttttttttataatataatgtttgttttttaggttttaattttaaagcgaattatttatagttaatttttgttttttgggttgattattttttttaattattatttgttgttttttaaaagaattgtttatattttttattttttttttattttgtgaaaaatggtatgttagattttatattttatcggtaggttgggaaattattgattattttttgttttatatattaatttatttgtattaaaaataagtgaaaatttaggggtcgagagtagagatgataaacgtcgcgatgaatttttgattngtgtgatagaggtttatgtttatttttacgaatagaaggtgtttagtttttattttagagatagagaagtaggtagagtgtatagtagttattatagtagtagagtgaaagtgtttagtgtggagttttaatattgtaattataaggatatatatattttattntgtgatcgtcgtattattagataacgtcgtttttttatagatgttattaaatatgatacgaagggagattttattattttgttgagaacgaggaatatattattattttagataatattttatattgttttttaatgagatattgggtttatacgaatgagtttgatattaggatttttacgagagaggatgattgtcggataaggatatatatttaggaaaaagtgtattgtatatattagagggtatattaaattttggatggatagtatttacgttataattaaaatagtagtggatagtcggagtttgtttcgttttttataggaagtgtaggcggtttataattcgtcgaattgaaagggtcgtggtaaaattataattatgggttttagaagttatatttttttagggttaattttgtaatttatgaatgtaattaggtgtttaataatattaatataattaggcgtttttaataagaaatatgcggttttgtaattagagtttttgttttaagatttggaaggatttagttagagttttttttgggtagttcgttttttcgttcgatgaattaatgatgtttagttttaaaatttttagtagttttaggatttgtaagatagtatttattttattggggtttggtaggcgtttttattgtaaataggtgagtaaaaatagggaggtaggaattaaaaaagnaagaagnnangttttttttttgtattgtttttggtatttggggtagtcgcgttcgcggagtttttcgttcggcgttgacggttgttgcgttcgcggttttttagtgtttcgagtgtttcgcgggtttcgcgagcgggagtgggatttagttttaggtagaatttaggcgtcgcgttcgggacgttcgcggagagagttattttcgtttacgttttatttcgtttttcgcgttcggagttttcgtggttaggtgagtgagggtttcgagtcggttgggggtttgggattaggcggcggtagtgtatcgcggcgtcgcgggtgaggttcggggttgtttttattttgggcggaaggacggagttagggtttatggcgtgtattgttatagagtatatgattaagcgatatagtattgagtaatacgagttagataaaattgaatgtaaggagagattgtggtataattaatatagattgatatgaagatgagagcgtatgaaagaggtagagagttcgataaggaagggtagagaagtaggtaaacgtagtgaaatgtgtgagtagtacgaatagtagattagaaatgtgtagtattcggattgttttttaatattagcgatatttacgtgatagtcgtagatatatatttaggaggtcgtaaggttagtgatgagggagtaagatgggtattggggtagagggagtaatattaggtgaatataatagtgaaaagtttgattaaagtagtagaggaaaatgtaatgtaacggatgaattatataattgtgatcgtgagtgtaatataaggtagaagatgtgttacgggtgagaaattaaagtaagaattgtattagaagaaaatataaataggtatttatatggagtgatgatgagttaagcgggtttttattagtattttagagttacgatgattgttgtaatatagagtaatatatgcgatggagtagtaatatttggagagaatttagtaatgattgtatcgatgatttggaaggatggaagaatgcgataggtgagatatagtagtttgtgtgtacgttaggggaaatttgggtaagaataggtaataagatgattatgtatcgtaagattaaagacgtataaggtatcggggtttaattttgttttt

SEQ ID NO: 112 - DNA, 5970 bp, Artificial Sequence
  chemically treated genomic DNA (Homo sapiens)
  unsure 1141, 1143..1144, 1151, 1859, 2023: n is a or g or c or t
agagatagggttaaatttcggtattttgtacgtttttgattttacgatgtatagttattttattatttatttttatttaggttttttttgacgtatatataggttattatattttatttatcgtatttttttatttttttaaattatcgatataattattgttaaattttttttaaatattattattttatcgtatgtgttattttgtattgtaataattatcgtaattttagagtattgatgaaaattcgtttagtttattattattttatgtaaatatttgtttatgtttttttttagtataatttttattttaattttttattcgtggtatattttttattttatgttatatttacgattatagttgtgtgatttattcgttatattatatttttttttattattttaattaaattttttattgttatgtttatttaatattattttttttattttagtatttattttatttttttattattaattttacgattttttaaatatatgtttacgattgttacgtgagtatcgttagtattgagaaatagttcgagtgttatatatttttgatttattattcgtattatttatatattttattgcgtttatttatttttttatttttttttatcgaattttttattttttttatacgtttttatttttatattaatttatattaattatgttatagtttttttttatatttaattttatttaattcgtattatttaatattgtatcgtttaattatatattttgtgataatatacgttatgagttttgatttcgttttttcgtttaagatgaagatagtttcgggttttattcgcggcgtcgcggtgtattgtcgtcgtttggttttaggtttttagtcggttcgggatttttatttatttggttacggggatttcggacgcgaggggcgaaatgggacgtgggcgggagtggtttttttcgcgggcgtttcgggcgcggcgtttgggttttgtttagggttgggttttattttcgttcgcggggttcgcggggtattcggggtattggggagtcgcgggcgtagtagtcgttagcgtcgggcggaaaatttcgcgggcgcggttgttttaggtgttagaggtagtgtaagggaggggtntnnttttttntttttttaatttttgtttttttgtttttgtttatttatttataatgagagcgtttgttaggttttagtggggtggatgttgttttgtagattttgaggttgttgaaggttttggaattgaatattattaatttatcggacggaggaacgggttgtttaagggagattttggttaaatttttttaaattttaaagtaggagttttggttataaggtcgtatattttttgttgggaacgtttggttatgttagtattattggatatttaattgtatttataagttgtagagttggttttggaagaatatggtttttggaatttatggttatagttttattacggtttttttaattcggcgggttatgaatcgtttatattttttataaagggcggggtaaatttcggttatttattgttgttttagttatgacgtgggtattatttatttagaatttggtatattttttggtgtgtataatatatttttttttggatgtgtgtttttgttcgataattattttttttcgtgagggttttagtgttaaatttattcgtgtaagtttaatgttttattagagagtagtgtaagatattgtttgaaatgatggtgtgtttttcgtttttaatagggtgataagattttttttcgtgttatatttagtaatatttataaggagacgacgttgtttgatgatacgacgattatanaatgaggtgtatgtgtttttatggttgtaatattgagattttatattgagtatttttattttattattgtaatagttattgtgtattttatttgtttttttgtttttgagatgaggattaaatattttttgttcgtggagatgagtatagatttttattatatnagttaagagtttatcgcgacgtttgttatttttattttcgatttttgagtttttatttatttttaatatagatgaattaatgtatggggtaggggatagttagtgattttttagtttgtcgatggggtatagaatttgatatattattttttatagggtaaggaggagatagggaatgtagataatttttttgaggggtagtaagtgatggttagggagaatgattaatttaggagatagaaattaattgtaaatgattcgttttggaattggagtttgagaggtaggtattatgttatggaaaagattatttatttatgtgtggttgtattttttatttttttttttattttttagtttttaggatgttttagtgttttttttgtggattttttagtatttgtaggttatagagtaatataggttgtggtagagttatttgggttttttagagtagggaagattaagtattggatattaaatttttttataattaaaaatatatatggtcgggtgtagtggtttacgtttgtaattttaatattttgggatgttaagatgggcggattatatgagtttaggagtttgagattagtttggttaatatagtgaaattttgtttttattaaaaatataaaaattagtttagtgtggtagtatatatttgtaattttagttattcgggaggttgaggtaagagagttatttgaatttaggaagcggagattgtagtgagtcgagattacgttattgtattttttagtttgggttatagagtaagattttattttaaaaaaataaataagtaaaataaagaaaaaaatatatatgtatttatataagtgttgatattttgagttttttttgtgaaaatatgtttattttatttgtttttttttttattatttttttttttattaatatgtaagatttaaaatatatattttttgttagacgtagtggtttatatttgtaattttagtattttgggaggttgaggcgagaggattatttgaatttaggagttcgagattagtttgggtaatatagtgggatttacgtttttataaaaaatagaaaaattagttgagtatgtgttatgtgtttgtagttttcgttatttgggaggcggaggttggaggattatttgagtttaggaggttaaaattatagtgagttacgattgtattattatagtttagtacgggtgatagagtgagatattatttttaaataaattaattaaatatatattttagaaataatttttttattaattatgtgtattgtaaattttatattttattttgtagtttgtttttttatttttttatagtgttatttgaagaatagaagtttttaattataatataattgtggtaggtagaatttttacgatttttatttttttaagatgtttttttgaagagtggatagaatttgtgaatatagtaggatgttatttttgtgattatgttgtatatatggtaaaagaaattttgtaggtgtaattaggattattaattggttgtatatgagttaattaagagggagattatttaggtgggtttaattttattatatgatttttttaatttggggtttagggattagagatagaaaattttagagagtgttaaattgtaggaaaaatttggtaagtaaatttggttggtgtttttagttgtttggttggttgtttgtttgtttttaagatagggttttattttgtggtttaggttggagtgtattggtgtaatttttatttattgtaatttttgttttttaggtttaagtgattttcgtgttttagttttttgtatagttgggattataggtacgtattattatttttagttaatttttgtatttttttgtagagatagagtttcgttatgttggttaggttggttttaaatttttgattttaagtgatttataggttttggttttttaaagtgttgggattataggtagtgagtgagttattgtgtttggttaaggttgattttgaagatggaggaggttacgtgtagatgttttttaggaattaagagtaggttttgtttgatagtcgataaggatttagataaggatttcgagatttttattttataattttagggagatgaatttgttataagtatgtgagcgtgaaagaggatttagggttttaggtgagaatatagttttgttggtattttgattgaagttggtaagattttaagtggaaagtttagttatattacgtttgggtttttggtttatagatttataagttaatagttggttttaagttgttaaatttgaggattggttgtgtagtattggtaaataaatatagtagttgtatttattagtatttttttgtatttattttattttttgagtttaaaaaaattatttttggaaggttgggcgtagtggtttatgtttgtaattttagtattttgggaggttgagttgggtgtattatttgaggttaggagtttaagattagtttggttaatatggagaaattttatttttattaaaaatataaaaattggttaggtatggtggtaggtgtttgtaattttagttaattgggaggttgagtaggttgaggaagaagaatcgtttgaatttaggaggtataggttgtggtgagttaagattatttagttgtattttagtttgggtaataagaggaaatttcgttttaaaataataaataaataaatatttagaaatttgtgttatattatttgtaatatataaaaaaagagtttatattgtatgatggaagaatgagaaaaatataagaaaaaagttttaaagttatagatgaaaatatgatataaagatatgtttatatttatgtaaaatcgagagtggatagttgttataataataatatttgggttatattttaataaaaataattatagatggttgtttagtttaagtttttaaaattagtgtttattttgttgttgatatagcgtacgttatgttagatttttaaagttaaaaagaatttgtataataaagtttttttggaattatgattaaaattgtgagaattgaatttagttaaaaatataatatcggttaggtatagtagtttacgtttgtaattttagtattttgggaggtcgaggcgggaggattacgaggttaatagatcgagattattttggttaatatggtgaaatttcgtttgtattaaaaatataaaaattagttgagtatgatggtatatatttgtagttttagttattagggagattgaggtaggagaattatttgaattcgggaggcgaaagttgtagtgagtcgagatggttttattgtattttagtttagcgatagagcgagattttattttttttattaaaaaaagtttattaaataattagtaataagagtttatttttatattttagagtattgtatttaaagtaattagtagtaattttggaaatttgtatggaaaataatataaatgttttggaatgtatggttattattataaaaggtatatatattattttataagtattagatttataagtattgggggagaaaataaatttaaaatgtaatttagattaatttatatattaagatttagttttgtgtaaataaaatttttttagaaagtagtttttgatttttgtagtatttttgtttttagttttatagtggaggtgagtatagtttgggtttttgggagggatgtattgtttttgaggagtttttgtttgaaaaggagtaggagttttgggtataatggttaaagatgtggattaaatgtataagaaggataaaggttattttgttattgattaggaatttattttttattttgggtatttttgttatatttgataattatttggttgtaggttattagtagtgggtttttatttagattaggtttaatggggttagtaaaagtttcg

SEQ ID NO: 113 - DNA, 6061 bp, Artificial Sequence
  chemically treated genomic DNA (Homo sapiens)
ataggaaaattttttttttattaatttgtaaagttttgtgtatttagaataatgaaatttttattaaataattttttttgaattttttttttggataattataaatttggattttaatagtattttttaatatttttttttaagaaaatttattttttggggaaaaaatagttttataatatgttatagtatgtttttaatataaatggtggtaattgggttgttgatataattagaaaaatttaaaaaatgataaaagtgtatttgttaaagttattattaggaaattaaagaagttaaattttgaatggtttaaataattaaaataaagtttatatgtaaaatattatttgttatttatttttttttggttataaatttagttttatgattttttagttgtttggaatataattcgtagaatttattgagtttttttgagtttgtgtttgtatttgtaaaatagaggtaattatatttaatttatagttagttggtaagtatgatatagattacgtacgttaagtgtattatttagtgtttggtataaataataataaatattttgtttttattttatgttaattttagaattttttgaggtaatatggggatttaatagtttattgtggtgaagtttgaatgggagttaggaattattatgtagaatagaatgtagaatattattttatttttttttttgtagaaagtttattatttcggatttgtagatttgagagggtttttagggtattggttttttaagtatgattatttttgtttttttcgttgtagttttttttaaattagtggtttttaaattttaggatgtattagaattatttgatggcgtagggttttagggaatttgtatttttaatgagtttttaggttttaggatttagttttaaggattaagattgtaatttttttaatttatatttaagtagttttagttatgtttattttttaaaaattttttgtgttttatttgtttattttatttttttttaatttttagaaattagtgattttttttattgttttcgtagtgttgttttttttggaatgttatatagttggaattatagtgtgtagtatttttaaatgggttttttttttttaataatatgtatttaagttttttttatgtgtttttatagtttgatagttaatttttttttagtgttgaataaaattttattgtatagatgtattatagtttatttatttatttatttacgaattatattttggttgttttcgatttttgatatttaggagtaaagttattataaatattttatgtgtaggtgtttgtggaggtaagtttttaaatttttcgggtgaatatataaggggtttagtgatgattgagtgtaagtaatattttttatttacgtggtttcggataaattattttatttttttaagttttagtttttttttttgtaaattgtgataaaaatagtattttttagagtttttttgaagataaaagaggtaaggtatttaagtattttaatgtttgatatttaatatatggtaattttttttatattttttagtatataattgtttataatttttttatacgagtagggttttaattttttagtttcgatgatttgttttgtttttttaaatgtttagaatgtttttttaggttatcgtttttttgagtttttggttggaatttttatattagagggttaatacgtttagtagaggaattattgaaatagttgggttttaaatattagttttggtatttattttttgtgtaaattggttgaagttatttaacgtttttgtattttaatttttttatttataaaatggggataatagtatttattttatagagttgttgtcggagttattttaatggtaaaaatcgtaattatttttgtattaatttaataaattcgcgtatatttttaaagaagttagaatagtgtttggtataaagtaaatgttagattaatgttattaatgttaggtgttcgttatttatgttacgtagtgagttttttaggtatagggatagtttaattttcgaatttatattgtttagaataaaataagtattgtagtatatttgagaaagtaaaggtgtagtggaaatcgagagcgaaatgagggcgtagggagaaaagggtggggaagtttagagatcggtgagggagtagagttggggcgtttgtgtatagggatagagttcggcggtagtagggcgcggtttttttttttcggggtttggggtcgtaattaggtggagtcgagaggtcggaggaggggtaggaggaaggggtgcggtcgcgattcggattcggagttagcgcggagtatttgcgttcgcggttgatattttcgttcgtagtttgttcgtagtttattcgtatattagttttttttatcgcgttttgggtaagtttagtttttcggcgcgttttcgcgagtttcgtttatagtcgtttgttgacgggtggtttggggaggtcgcggcgtttcgtttagttttttcgcgagtgtagttcgattttgggtagggttggcggttggcgttcgcgttcggttttaatttagttgcgtgggtggggagttggagggattttagttttgtattttagagtcgaggagattgggtttacgggggggaaagtgtcgtgttatgggtgggttatttaggttttggtggggtttaagttgatatttagttgttttcgttttttgaaagtttcgtttattatagttagtagcgtaagggatttatttagttatttcggtttttttagttttaaaggtttaggggatagaaaaaagttgggagtcggaaggtttttcgggttttcggtatggtagacggggttggtttagaggtttgttttgtggatttggaatcgtatttattttgtgagtatttttttttttttatataggtaatttattttattttatttattttttttagaaggtagaaaatagtggatttgtatattgagggttggaagtttaagaagtttgtttttttttgaaaagattaatcgttttttttgtaatagaattttattgattagatatgaattatttttttggtatttgagttattaggtggaagatttggatatttgattgtagatgattatatataggaaagtatgtaggtgttgggaggttttgggtcgttggaggtttttttggttattgatacgaaattgtatagtttaggtcgaattttttttaaggatttgtgtttagtattgatagtaagattttgtttttcgggaaagatatatttattatgtttattaatattattttttaaaatgtaattaattaaaacgttattttatgaagatattatttttggtttttacgaagacggaaaattttagattgattagaaagggaatttttaaatgtaaagaaaattagaattttgtttttagaattttgtggttgtgtagagaaatttgtttagaaataatcgtagaggaggaagtaaaaggaaatgatgtaattttttttaggaaaggatatattgaaattttgtttaagttatttggttttcgttgtggagtaattttttatattttaaaagttaaatgatagattagtaataatttttaataattttttagttttgttggattaatgtatattaagtgttagatttggttaggtgtgggttaggtagtagattaaggtagaagtatgggggttaggtttatatttttagagtttagttgtttagatgtagtaggggtttatttattagttgtgtgattgtgggatattattatatttttttgggttttagtttttttatatgtaaaacgaagatgtaatatttaatttattggatgattgtgcggtttgtattaaattatttatttaattaataagttttttttttaaatatttatcgtgtattagtgtatatagataagaagaatttttagttttgtgaaattgatttcgtttaatgttggtaatatttttttttttattttttatagatgaggaaattgaggtttaaagaaattgtgtttagttttaagaggtaaaatgagaattaataatgttttgtttttattgtatagatggtttgatttttgatttttagattttagaatagtttatttggttgtaattttttataagttaaagagtatgtatttagagagatgtagtattagattttaattggagagttgattgttttaggttatagagagtttgaaaaaattaaggtgaaatatttttagagattaatagtgtaattttttattgaatttttttttgggggtgttagggaatttttagaatattttgtttttaggaagggtgggagtaatttgtatttttaaattaattttggagatatgttagtatgtttgaataatatttatttaagaaaaatgtgtttggttttttaattaaagaattgtgttttttatttttgtattttattaaggattggattatttttttaaagagtagatgtgtttttataatagattgtaggtttggagttttgtaaaatgtatatggagttttataattaagtataaggaatttaattgaaggtagttaaattttgtgttgatttggtgaggaggagtaaaattttgtgtttttgttgttattgattttcgtagtggtagtttgttagtaattagtagagtttttttggattttaaataagttaaaaattggttttttaggaagtatatttgtaagtattttaagtataaagatttttttttgttttttgttttgaagtttttataggtttagtatagttttttgtatatggtagatgtttagtaaatgtttgtttagtaaatgggatatttaatgttagatatatgttttttttgagaaggtttttttgtgaatgttgatatttgttttttggatttaagattaagggttggattaagattattgtgttttgaattatatattgatattatttattaattgtttttttttaatagattagtgtgattttagtttaaggtaaaggtgggatattatggtatttatttgggtaagtaaaaattaagtttttataatatagtaatatatatgagttaaattaaaatatagaaggttaagatagtaaggaaaattttaggaaagtttttaagtttatttggtaaaattaatatgttagaaaagttagaggatgttaaaaataataaaatatttttaaaaatgtattgtaaagttatatagttaaaataatttatgatgatattaaggcggaaaggttaaaattagataataaatttagtatataatttgggaatttattatatgaaaaagatgatatattagagaagaagagacggattatttaataaatgttaggaaaatttttagttgtttggggaaaaagtaaatttgtatttttttttttttttataataaaataatttttatgtggataaaatatagaaatgaagaagatgaaatatgaatgggtcgggtgtggtggtttatatttgtaattttagtattttgggaggtcgaggtgggtggattatttaaagttaggagtttgagattagtttggttaatatggtgaaatcgtgtttttattagaaatataaaaatagttcggtgcgatggtagatgtttgtaattttagttatttaggaggttgaggtaggagaatcgtttgaatttgggaggtagaggttgtagtgagttgagattatgttattgtattttagtttgagagatagagtgagatttcgttttaaaaaaatagaaaaagagaaagaaatatgaatggattgaagaatatttttggagtggggaagatgtttataattgtgatataaaattaaacgtttaaaagaaaaatattgatttattttaattatatataagtttattattatgatagttaataattttattggtagaggtagaagatagttcgtagggaaaaaatatttgtagtatattagataaaagatttatttttttaatatataaataatttgaataaattggtttaaaaaatgaatttgatagaaaaagt

SEQ ID NO: 114 - DNA, 6061 bp, Artificial Sequence
  chemically treated genomic DNA (Homo sapiens)
attttttttgttaagtttattttttaaattaatttatttaagttatttgtatgttaaggaaataagttttttgtttaatgtgttgtaaatattttttttttgcgagttgttttttgtttttattaatgggattgttggttgttatagtgataaatttgtatgtagttaaaatagattaatattttttttttaggcgtttggttttgtgttatagttgtaagtattttttttattttaagaatattttttaatttatttatatttttttttttttttttatttttttgagacggagttttattttgttttttaggttggagtgtagtggtatgattttagtttattgtaatttttgttttttaggtttaggcgatttttttgttttagttttttgagtagttgggattataggtatttgttatcgtatcgggttatttttgtatttttagtagagatacggttttattatgttggttaggttggttttaaatttttggttttaggtgatttatttatttcggttttttaaagtgttaggattataggtgtgagttattatattcggtttatttatattttattttttttatttttgtattttatttatatggaagttattttattgtaaggagaaaaaggaatatagatttattttttttttaaatagttagaagtttttttaatatttattgaataattcgtttttttttttttgatatgttattttttttatataataaatttttaaattatatattaaatttattatttgattttgattttttcgttttggtgttattataagttattttaattatgtaattttataatgtatttttaaaaatattttattatttttgatattttttggtttttttagtatgttaattttgttagataaatttaaaaatttttttaaaattttttttgttattttgattttttgtgttttggtttgatttatatatgttattgtgttgtgaaggtttaatttttatttatttagatagatgttatgatattttatttttgttttgagttgagattatattaatttattaaaagaaaataattagtaaatggtattaatatgtgatttagaatataataattttagtttaatttttaattttgaatttagaaaatagatgttaatatttatagaaaaatttttttaggaagagtatatatttgatattgggtattttatttgttaaataaatatttattgagtatttattatatgtaagggattgtgttagatttgtgaggattttaagataagagatagaaaaaaatttttgtatttaagatgtttataaatatattttttgaaaagttaatttttgatttatttaaagtttaggagaattttgttgattattgataggttattattacggggattaataataataaaaatataggattttatttttttttattaaattaatataaagtttagttgtttttagttggattttttgtgtttgattgtgaaattttatgtatattttataaggttttaagtttatagtttgttataaagatatatttgttttttgaggaggtggtttagtttttggtggggtgtagaggtgaaaggtatagttttttgattgggaagttagatatattttttttaaatagatattatttaaatatgttggtatatttttagggttgatttagaaatgtaagttgtttttattttttttgggaataaaatattttaaaaattttttgatatttttagagaaaagtttaatgggaaattatattattagtttttggaaatattttattttggtttttttaggttttttgtagtttagggtagttaattttttagttagagtttaatattgtatttttttaaatatatgttttttgatttatgaggggttatagttagataaattattttgaagtttaaaaattagaagttaaattatttgtatagtgaaaataaggtattattggtttttattttgttttttaaagttaaatataatttttttgggttttaatttttttatttgtaaaaagtgaagaagggggtgttgttagtattgaacgaggttagttttatagggttggagattttttttatttgtgtgtattggtgtacggtagatatttaaaaaaaaaatttattgattaaatgaatgatttaatataagtcgtataattatttagtgagttaggtattatattttcgttttgtatatgaagaagttggagtttagagaggtatggtaatgttttatagttatatagttagtgagtggatttttattgtatttaggtagttagattttaaaggtatgaatttaatttttatgtttttgttttaatttgttgtttggtttatatttgattaaatttgatatttaatatgtattgatttagtagaattggaaaattattaagaattattattaatttattatttaatttttaagatgtaaagaattattttatagcgaaggttaaatgatttaaatagaattttaatatatttttttttgaaagggattatattatttttttttatttttttttttacggttatttttaaataggtttttttatataattatagagttttgggaataagattttggttttttttatatttaaaaattttttttttggttagtttgaagtttttcgttttcgtgaaaattaaaggtggtatttttatggagtaacgttttaattagttatattttaaaaaatgatgttggtgaatatagtaaatgtatttttttcggagggtagggttttgttgttagtgttgaatataaatttttggaaagaattcggtttgggttatgtaatttcgtattagtagttagaggggtttttagcgatttagaattttttagtatttgtatatttttttatatatggttatttgtaattaagtatttaaattttttatttggtgatttaaatattaagggaatgatttatatttagttaataggattttgttgtaaagaaaacggttagtttttttaggaaaaagtaaattttttgaatttttaatttttaatatgtaaatttattgttttttattttttaaaaaaaataagtaaaataaaataaattgtttatgtgagggggagaagatgtttataggatgggtgcgattttaagtttatagagtagatttttgagttagtttcgtttgttatgtcggggattcgaggaatttttcgatttttagtttttttttgttttttagatttttaggattggggaggtcgagatggttaagtggattttttacgttgttagttgtaataagcgaagtttttagggagcgaggatagttgagtattagtttgggttttattaagatttgggtgatttatttatggtacggtattttttttttcgtgggtttagttttttcgattttgaaatgtaggattgaggtttttttagttttttatttacgtagttgggttggggtcgggcgcgggcgttagtcgttagttttgtttagggtcgagttgtattcgcgggggaattgggcgaggcgtcgcgatttttttaagttattcgttagtaggcggttgtgggcgaggttcgcggggacgcgtcgggaggttgaatttatttaaagcgcggtgggggaaattggtgtgcgagtaaattgcgaataaattgcgagcgaaggtgttagtcgcgggcgtaggtgtttcgcgttggtttcgggttcggatcgcgatcgtattttttttttttgtttttttttcggtttttcgattttatttgattgcggttttaggtttcgggaaagggaagtcgcgttttgttgtcgtcgggttttatttttgtatataggcgttttagttttgtttttttatcggtttttaagtttttttatttttttttttttacgtttttatttcgttttcggtttttattatatttttatttttttaaatgtattgtaatgtttattttgttttaggtagtgtggattcggagattagattgtttttatatttaaggaatttattgcgtggtataggtggcggatatttaatattaataatattgatttggtatttattttgtattaggtattgttttaatttttttaagaatatgcgcggatttattaggttggtgtaaaagtaattgcggtttttgttattaaaatggtttcgataataattttatgaggtagatattattatttttattttatagatgaggaaattgagatatagagacgttgggtaattttagttaatttatatagaaggtaaatgttagagttagtgtttggaatttaattattttagtaatttttttattaaacgtgttgattttttggtatgaggattttaattaaaggtttagggagacggtaatttggaagggtattttaggtatttggaagagtaaaataaattatcgaggttaaaaggttaaagttttattcgtatgagggaattatgagtagttgtgtgttgaaggatgtagaaaaagttattatgtattgagtattaggtattgaagtgtttgaatattttattttttttatttttaagggaattttaggaggtgttatttttattataatttgtagaagagaaaattgaggtttagaaaagtgaagtgatttattcgagattacgtaagtaaaaagtattgtttgtatttagttattattgggttttttatgtatttattcgaaggatttgaaaatttatttttataaatatttgtatatgggatgtttatagtagttttatttttaagtattaaaagtcggaagtaattaagatgtaattcgtaggtgaatggataaataaattgtgatatatttatataatagaattttatttagtattgaaaagaaattagttattaagttataaaaatatatggaagaaatttaaatgtatattattaagagaaagaagtttatttgaaaatgttatatattatgattttaattatatgatattttagaaaaggtaatattacggagatagtaaaaaaaattattggtttttaggagttgagaggaggtagggtgaataggtggagtatagaggatttttagaggataagtatggttggagttgtttgagtgtgagttgaagagattatagttttggtttttaaggttgagttttgggatttagaaatttattagaaatgtaaattttttgaaattttgcgttattaagtgattttgatgtattttaaagtttgagaattattggtttaagaggagttataacggagaaggtagaagtggttatgtttaaaaggttagtgttttgggagtttttttagatttataaattcgaagtgatgggttttttgtaagagagaagataggatggtgttttgtattttgttttgtatagtaatttttgatttttatttagattttattataataaattgttaaatttttatgttattttaaaaaattttgggattagtatgaaatgggggtaaaatatttattattatttgtgttaaatattgggtaatgtatttgacgtacgtgatttatgttatgtttattaattagttgtaaattaggtatgattgtttttattttgtagatatagatataggtttagagggatttagtaagttttacgagttgtattttaggtaattaggaagttatagggttagatttatagttagaagaaaatgagtaataggtgatgttttatatgtaggttttattttaattgtttaaattatttaggatttaatttttttgattttttgatggtaattttaataaatgtatttttattattttttgagtttttttagttgtattaatagtttaattattattatttatattagaaatatgttatggtatattataaaattattttttttttaaaggatgagtttttttggaaggaaatattagaggatgttgttagaatttaggtttatggttatttagaaaaagaatttagaaaaggttatttaataaaagttttattattttgaatatatagaattttataggttagtaaaaagggaatttttttat

SEQ ID NO: 115 - DNA, 5398 bp, Artificial Sequence
  chemically treated genomic DNA (Homo sapiens)
tggtagtttgaatatattgagagatttattttttttagagatattataattattttaaatttaaagagtaagaatggggagttattagaataaagttatattttagtattattgttgggatgtagagatgatggtggaaaaagatttgatagagtttattgaggaaggtagttttatttttaattttattttgggattttaagatatgaatgagttgagggtagataggtgatttgaattaaattttaggtgacggttttatagttgttggtattagtagatggggattagagggtttacgtgtggagagaagggtagagggtgggggtttaggttagttgtatgttgataggggttatcgatggtagattttggatgaggtagaataggcgggaagaagggggaatggtattaggaagtattaggttggtttttaagagttggatttgtcgtttttgagagattggttggtaataggttttgttgtagtggagtagtgggtttagaggaggttatttttgtttttaatatgaaggtgggtttttaattattagaataggaattgagaatgatggttagtgtttttgaaagaaaaaagagttatgggggaatggaattaatttttttttataatttgttaggtagttttataaattaatttatttgaaattagtttttattttagataaggaagttaaggattagagaaattatataatttgtttaagttatatttttggtatgtaggtagagtagggatttgaatttaattgtttttgtttttagagagtgtgttttttttagattttgtttggaagatatgatgttttttttttttttttgtatttagtttttattttattttttagttattttttcgttttttttgttttatgtaatttatttttttgttattttttttttttttttaatttgttataatttgtaatagatatatttattaaataaaattaatttttaaagtagattggttgaaaatgttataattttttaaaaaataagattttaatttttttaaaattaaagaagagttgttttgtatttatttataaaaagtttgtaatttatttttttttttttatgtgttattataattaagggaaatagtagggttatgaatatatgattaaaatattagagttgagagatgtagaaattgaaatataaagaagtttagcgatttatttagaataaattggttagtttttgaatgatttaaataattgagagaaatagggaaaattttgagttaataaataaatatagttttaaaagtgtgtttgtaaattagttttttggtatttggtatatttttttaataaaaagaaaattgatgtgatttgagtgttttatagaaaatagttgaaatttattatttatatttaagaatagtataaaaaattttttataattattatgtagtatttataatgaatataatataaagataatatattgagaaagaaggattttaatttttaaatgtgtaagaagagaaaatttaattagaaagatgaaagatttaattggcgaattcggtagagattttaaagatgatatttggatattgataaaggttattgggggatgaatgatagatatttgtttttaagagtgtgaaagttgtttttattaaaatggagttaattgtgttaaaaaacgagataaatttttgataaatggttggggaaggttatgaagggagggttttaatatataaatgtttgataataagaattattgaaaaatattgtaaaaattataattttggataaaggttattgtaattatatatatatatatatatatatatatatatatatatagagagagagagagagagagagagagagagagagaaaatgagaatttttgcggagatatttgtttagtaattgtttgtataatattagattggtgttattttagttattgattattgtagttaaggataattattttaaaaataatgatgtaatttttttttttttttgaaaaatttttgtttttttttatttttttgaatacgtaaaatagtttaatatggtatatatatttttattgtaatgtttatttttaaataaatattatttttttttagaaagtttttttttttgtttgttattaggttgataagaggtagtgaaagagattttttgagtgtttattatttatattatttagtagttaagaatattagttgtttaaaatttattaattaaatatataatttaaagtagaatttttatgtggtaatttttttttattttaaataagtcgttgagtttttttgtgttttagtttttatattttttaattttaatattgtattttttattttagttattttagatagtttaaattatatagatataaagagatatttttttttttttggttttgtagtttatttaattagattatttttttttttttttatagtttgataaaatatttttttttaaaagtttaatttaaatgttatgttaattatttgataaaatattagtttttttttttgaaattaattgtattttgattgtattttaggtattttttttttgatttatagttttttattgtagtgtttatatatatgttttatttataatattaaggtgtaaatttttaggtatggtttttttataggtgtttagtgtatagttgttaaatataattaaattgtattaatttaggtttttgtttaaggttttttagaaatggttttatattatttttgtaaaataagtgttttttttatttttattttttagtttttattttttttatattacgtattatataggatatattagatatttgtttattgtttgttttttttattagaatgtatgatttatgagggtaaggtttttgttttatttgtcgtgtttattttagtatttagatttgtgtttggtttagagtaggagttgaataaattgatattattggaagtgaaagaaatgttatttggagtattttaagattttgagtttaataatttatcgattttgttagtatttagttgtaggatatagagtaagttattaatttatgatgagttttatgtttttgtaaaattaatgattgttaaatataggatttttgaggttttgtttaattttattaatgtgagagtagaaagtgagagaagtaaattgagtttaagtggatatgggtgagaaaaaagaatgttttaggtaagattataggttttgtttttggtgtagggtagagagaaagtagaaaagttggagtaacggagatagatgtttagaaaagggttgtttttagatatattaatatttgtaaagaaaattcgggggaggtgttgatttggggagagtttgaggttgagtagatagttgggttggtggagaggaggtttttagaggaaaggtaattcgttagtggggtgggggtgatggggttggtaagttttataaattttgtaattttgtttttttttttagagaataattattttgttgtgattttgttagggttggaataggtatgtggtttatacgtgaaagcgaatgagaagttttatataaagaattatatttgttgtttatttaatttatttttttttatttttaaagaagattagatttttattttttatttttaatttttacgttgagaagtattttgttttttttattttagtatatgtttagaatattgtatttagtgtcgtaaatttgtttttttgttttttttgttttggtattttttttttttatattagtaagtttgagaaggtttttgtgttttttatttttttttttttagtatatggagataaaagtgattatatttcggatgttaattcgttatgttgatttttaataattttagttttatgaatattttttgatttttaggattttttttttaaattgtttttagtataagaatatgttaattttgatgttattgtttatattgtaggttatgaagtatacggtatttttatttgtttcggagggttgtttttaattgttttgtatagagtagtatattttttttttacggtatataaggttagggtttggggagtaatagtgtagaaatttatttgtttgtcgtcgtttaaggttacgtttttgtttattatattttttaatagtatttttattatttatagattggatttgtttgtttcgttttttggttttttgattttttcgcgtttgggggttgttttgtatataaagtttttttatagaatatagtattatgttagtataatacgttgtagatttttttttttttttttttttttttatatatttatatattttatgttgaattaatatgaggtattgtttaaatttaagttatattaaagttttaggttagttttgaaaatagaaattgattggaagtagaggtttttaaatagtttatatacgttattagaaggttgtatatttaagagagggttatttaggaagtaataataggtattaaaataataataaaataataaaataaaatagaaataaaaataatttgggaaacggttttttttttacgttttttttattttatcgataaaggcgcgttgtttttagttgcgatgattttgtttcgtttttaaaaagacgtttacgtattatgttgagtatttaagtgaggttacggtttttgcggttatagagggtagggaggtttaagtatttttaaaatttcgagttttggatagttttttaggtttttttcgcggcgcgaggataagaggttttcggggttttcgggggagcggcgtttttttttggttttagtagttttgcggtcgttttttatttaggttcgcgagattagcgggatagttcgcgtcgcgggagattaattgggacgagtcgcgatttacgtaggcgcgttgaggtcggggtaggggcgggttcggttggcgcggtcggtttgcggttggggttttggcgggggtgggacgggttaagtcgggtagggtcggggtggggtcgttggcgttttcgttgtttggattagtttaggtgtagttgtcggattttttagcgtttgtatttcggcgtcgtttcgcgtatcgtcgttcggtttttcgtcgttttttcggggtttcggggtatttgggttttatagtttgggtgagtggtcgtagttcggggagggggttttttttggagaggagagcgtggtcgcggggtattggattcgcgcggacgttcggtcgagagttgtttcggtagttgcgagagggcgggtcggtttcgtggcggggtttttcgggttgtttgagcgtcgtcgggttttcgcggatttgcgtttggggagggtacgagttgtaaatggcgcgttaagttcgaggtttttttttttttgtagt

SEQ ID NO: 116 - DNA, 5398 bp, Artificial Sequence
  chemically treated genomic DNA (Homo sapiens)
attgtaaaagagaagaaatttcgggtttagcgcgttatttgtaattcgtgttttttttaagcgtaggttcgcggggattcggcggcgtttagatagttcggagggtttcgttacggggtcgattcgttttttcgtagttatcgggatagttttcggtcgagcgttcgcgcgaatttagtgtttcgcgattacgtttttttttttagaaggagtttttttttcgggttgcgattatttatttagattgtgggatttaagtgtttcgaaatttcgggagagcggcggagagtcgggcgacggtacgcggggcgacgtcgagatgtagacgttgaaggattcggtagttgtatttagattgatttaagtaacggaaacgttagcggttttatttcggttttgttcggtttggttcgttttattttcgttagggttttaatcgtaggtcggtcgcgttagtcgggttcgtttttgtttcggttttagcgcgtttgcgtgggtcgcggttcgttttagttggtttttcgcggcgcggattgtttcgttggtttcgcgggtttgggtggggagcggtcgtagagttgttggaattaggaggaggcgtcgttttttcgagggtttcggagattttttgttttcgcgtcgcgggaagggtttggggagttgtttagggttcggggttttggaggtgtttgagtttttttgttttttgtgatcgtaggaatcgtagttttatttgggtgtttaatatagtgcgtgggcgtttttttggaggcgagataaaattatcgtagttaaggatagcgcgtttttgtcgatgggatagaaaaaacgtgaaaggagggtcgttttttaagttgtttttgtttttgttttgttttgttgttttgttgttgttttaatgtttattattgttttttagatggtttttttttaaatgtatagttttttagtagcgtatgtgggttatttgaaaatttttgtttttaattagtttttgtttttaaaattagtttagaattttaatatgatttaaatttgagtaatgttttatattggtttaatataaaatatatgagtatatgagagagagggggagggagggagaatttatagcgtattgtattagtatggtgttgtgttttgtgaaagggttttatatgtaaagtagtttttaaacgcgaaggagttaagaaattaaagaacgagatagataaatttagtttgtaggtaataggggtgttattggaggatgtggtagatagaagcgtggttttgggcggcggtaagtagataaatttttgtattgttattttttagattttggttttatatatcgtaaggaaagagtatattgttttgtgtaagataattaaaggtagtttttcggaataggtgagaatgtcgtatgttttatagtttataatgtgggtaatagtattaaggttgatatgtttttatgttaaggatagtttaaaaaaaaaattttaggaattaggaggtatttatgggattggggttattaaaggttaatatggcggattagtattcgggatataattatttttgtttttatatgttggaaaaggaaaagtagaagatatagggatttttttagatttattggtgtggggagggaaggtgttagggtagagggggtaagaggataagtttgcgatattagatgtagtgttttagatatatgttagaatgggaagggtaaagtgttttttaacgtggaggttaagggtaagagatgaggatttagttttttttgagaatgaggaagaataaattaaatggatagtaaatgtggttttttgtatagaattttttattcgtttttacgtgtgaattatatgtttattttagttttgataaagttataatagagtggttgttttttgggaaaggaggtaaaattgtaaaatttgtggagtttgttaattttattatttttattttattggcgggttgttttttttttgggagttttttttttattagtttagttgtttatttagttttaggttttttttaagttagtatttttttcgggttttttttataggtattaatatatttgaaggtagtttttttttgagtatttgttttcgttgttttagtttttttattttttttttgttttgtattaaaagtaggatttgtagttttgtttagagtattttttttttttatttatatttatttgaatttagtttgttttttttattttttatttttatattaatggagttaaataggattttagagattttgtatttaataattattgattttatagggatatgagatttattatgggttagtgatttgttttatgttttgtagttaaatattgataaaatcgatgagttattggatttagagttttgaaatattttaggtagtattttttttatttttagtaatattagtttatttaatttttattttggattaggtatagatttaggtgttggggtaaatacggtaagtgaaataaaggttttgtttttataggttatatattttggtggaggaaataaataataaataagtatttaatatgttttgtgtgatgcgtggtataaagaaaataaaggttagggaatggaaatgaagggaatatttattttgtaaaggtgatatgaagttatttttgagaagttttgaatagaaatttaaattgatataatttaattgtatttgataattatatattgagtatttgtggaaaggttatatttaagagtttgtattttaatattatagataaagtatgtatatgaatattataatgagagattataaattaggaaagaaatgtttagaatgtaattaaaatgtaattagttttagaggaaggagttaatattttgttagatggttgatatagtatttggattaggtttttgagagaggatattttattaaattatgaaggggagaaagggtggtttggttaagtgaattgtaaaattaagagaaggaaagtatttttttgtgtttgtgtgatttgaattgtttaaaatggttggagtggaaggtataatattagagttgagagatgtagaaattaaaatataaagaagtttagcgatttatttagaataaagagagattgttatataaagattttgttttgaattgtgtatttaattgatggattttgaataattgatgtttttaattattgagtgatataaatgataggtatttaggaaattttttttattattttttgttagtttaataataaatagagagggagattttttaaaagaaaatgatgtttatttgggaatgggtattgtaatgggaatatgtgtgttatattaaattattttgcgtatttagggaggtaaaggaaggtaaaggttttttaaggaagaaggaagattatattattgtttttgagataattatttttggttatagtaattaataattagagtggtattagtttaatgttgtataggtagttgttgggtagatgttttcgtagaagtttttattttttttttttttttttttttttttttttttttttttgtgtgtgtgtgtgtgtgtgtgtgtgtgtgtgtgtgtggttgtaatggtttttgtttaaagttgtggtttttgtagtattttttaatagtttttgttattaggtatttatgtattagaattttttttttatggttttttttagttatttgttagggatttgtttcgttttttaatataattgattttattttgataaggatagtttttatatttttaaaaataagtgtttgttatttattttttaatggtttttattagtgtttaaatgttatttttagaatttttgtcggattcgttagttaagttttttatttttttaattaaattttttttttttatatatttaaaaattaaagttttttttttttagtgtattgtttttgtgttgtgtttattataagtattatataataattgtggggagttttttatattatttttagatataaataatgagttttagttgttttttatgagatatttaggttatattaattttttttttattagagaaatatattaaatgttagagaattaatttataaatatatttttgaaattgtatttatttgttaatttaggattttttttattttttttaattatttggattatttaggaattagttaatttattttaaataagtcgttgagtttttttgtgttttagtttttatattttttaattttaatattttgattatatatttatggttttattgttttttttgattataatgatatataaagaaaagaaaatgagttataggttttttataaataagtataaaataatttttttttagttttagaggaattggaattttgttttttagaaaattataatatttttaattagtttattttaaaaattgattttgtttaataaatatatttattgtaaattatggtaagttaaagaagaagaaaagatggtaggagaatgaattgtatgaagtagaagaaacgagagagtggttgaggagtaaagtaggggttagatataaagggaaaggaggaatattatgttttttaggtaagatttggaaaaagtatattttttgaagatagagatagttgagtttaaatttttattttgtttgtatattagggatgtgatttggataaattatgtgatttttttgatttttggtttttttatttagagtggaggttagttttaaataagttaatttgtgaaattgtttaataaattgtgaaaaagggttgattttatttttttatggttttttttttttttagaaatattaattattatttttagtttttgttttgatgattaaggatttatttttatattaaaagtaaaaataattttttttggatttattgttttattgtagtaggatttattgttagttagttttttagagacggtaggtttaatttttgggggttaatttgatgttttttggtgttattttttttttttttcgtttattttgttttatttagagtttattatcgatggtttttattaatatataattagtttagatttttattttttatttttttttttatacgtgggttttttgatttttatttgttggtgttaataattgtaaaatcgttatttggaatttaatttaagttatttatttgtttttaatttatttatgttttaaagttttagggtgagattagaggtggggttgttttttttagtgggttttgttaagtttttttttattattatttttatattttagtagtgatattggaatgtagttttattttagtggttttttatttttgttttttaggtttaaagtggttgtagtgtttttggagaaaataggttttttagtgtgtttaggttgtta

SEQ ID NO: 117 - DNA, 9052 bp, Artificial Sequence
  chemically treated genomic DNA (Homo sapiens)
ggatattgtttagatggttttttttgtggaataagaagataaagttatataagattatgtgatagtatattgggataaaatatttaatatggtagggtgcggtggtttatgtttgtaattttagtattttgggaggttgaggagggcggattatgaggttaggagatcgagattattttggttaatacggtgaaatttcgtttttattaaaaatatataaaaattagtcgggtatggtggtgggtgtttatagttttagttatttgggaggttgaggtaggagaatggtgtgtatttgggaggtagagtttgtagtgagtttagattatgttattgtattttagtttgggttatagagtaagattcggttttaaaaaaaaagaaaaaaataattgttgggggcggtggtttacgtttgtaattttagtattttgggaggttgaggtgggcggattatgaggttaggagatttagattacggtgaaatcgtatttttattaaaaatataaaaaattagttgggtacggtggcgggtatttgtagttttagttattcgggaggttgaggtaggagaatggcgtgaatttggaaggtggagtttgtagtgagtcgagatcgcgatattgtattttagtttgggcgatagtgtgatattttgtttttaaaaaaaaaaaaaaaaaaaaaaaaaaaaaaatttaatatgtaaaattttatgttaaatgttaaattgatgtgtgtgagttatgagtagtattatgtataaagtatgtgtatattttatttttttttaataaaatagattttaggtagatgaaggatttatatttatataaatgaatttattaatttattaggagataaatattttagtttaggttgtttttataaaatattataggttaggtgtagtggtttacgtttgtaattttagtttttcgggaagttaaggcgggtgggttatttgaggttaggagttcgagattagtttgattaatatggtaaaattttattgttattaaaaatataaagattagttgggtatggtggtatatgtttgtaattttagttatttaggagtttgaggtaggagatttttttgaatttgggaggcggaggttgtagtgagttgagattgtattattgtattttagtttgggtgatagagtaagattttgttttaaaaataaaaataaattataaattgggtgatttagaaataatagaaatttattttttatatttttggaggatgggaagtttaagattaaggaaggtattggtatatttggtatttggtgagggagtttttttggtttatggatgggtttagttttgtttttatatggtggaaggagttagtttttcgtggttttttttatgtgggtgttaattttaattttttaaaggttttattttttaatattattatattaagattgaggattttagtatatgagttttgagggggaagatatcgtaaatatttagatatagtaataatattagagattttggtttaattttggagaggggagaatttttagaattatgataaaaaaattagcgttataaaggaaatattaagtaaatttgataatttaaaattgaaattttttatagttaaaaaaaaaaatattataaattaagttaaaagaaaaattatatattgatgaaaaatatttgttataaaaatgataatttaatataataatttaatataaaaatggttaaaagatataagtaggtattttttagaaaaaaggataagtaggtaatgtatttatgagtagatgtttagttttatttatagttgaagaaatgtaagttgttggggaaattaaaattaaatttaaatttattttgtagtaattttgttgtttttggttttatcgggttattttagagattaatttattaagatggttatattttataggttatttaaggggatataagtttagtaggtggattattaggatattttttttttttttaatagttattgttgaagttataaagaaagtttaggagttaggggataaaaagatgaaggaaattatcgagatagtgattaatatagttataaatgttattatttatgtagtagaaagtttggataaatttggatagtgagtgtatttgttattacggtttttttttagttttaataaaaagttatgatatgtgtatattgagcgttggatttatttttatttggatggaaatattaggtaaagtatttttttgttgatataatatattttatatatttatggtgtatatttaagtatttattatatgtatagaatagtgattaattagggtgtttggggtgtttattattttgaatatttggtattattatgtgttgggtatattttaagtttttttttttagttattttgtttttttgtttttgtttttgtttttgttttgagatagagttttgttttgtcgtttaggttggagggtaatggtgtgatttcggtttattgtaatttttgttttttaggtttaagtaatttttttgttttagttttttaagtagtttggattataagcgtaggttattatttttggttaatttttattattattattttttattgtttttatttttagtagagatggggttttattatgttagttaggttggttttaaatttttgattttaggtgatttgtttgtttgggttttttaaaatgttgggattataggtatgggatattgtatttagttttttagttattttgaaatatataatatattgttgttaattatagttattttaggtgaagtattttttaatagaaatattttgtatgtttttcgtgttttttttgttgaggtggatattggtattggggtttttgttgttggttggataggtttttatgatgaaatagatgtttttttgttatgttaagtaagattttttatgttaggaaggggtttttttggaagaatagttagtgtttgtgttttattttttaaaaaattgttttattagaaattatatataatttttaggtgttttagtgttttaagatatgttaagggaggatttttatttgttttgtatgtttttgggattttttttgagatgtttttgtaggatttagggtagataatagattagtttgatgaagaatttagtaaggaaggtttttattgagttgttttttgttttcgtagagattagataagtatttttgttggacggttatagaatttggttaaggagagattgagttattgtttattattttagaagttgttgttgattttttttttttttaaagacggagttttattttgttgtttaggtaggagtgtagtggtatgtttttggtttattgtaatttttgttttttgggtttaaataatttttttgttttagtttttttagtagttgggattataggtgttcgttattatttttggttaattttttgtatttttagtagagacggggttttattatgttagttaggatggtttcgattttttgattttatgatttatttgttttggttttttaaagtgttgggattataggcgtgagttatcgtatttggtttagaatatttatttagagattgatgttaggtttaagtgttgatagtgggtagtagtgggtaagatgtttggtttttttttttttttatgagtaagttagtattatagaggttaaatatatttttaagtagtatttaatttaatattttttaattaaaaaaaagagaagtaatttgtaaaaatattgtattttttattttttttgttggaagttatttgtttttagtagaaatgagaaaaaaaggtgttttgtttaaaaaataagtgagttgtttattatatttttggattttatttagaattggatttatagtttgtgaatagtttaggtatagttaatgttttagttttggaacgtttgttattttttagttatagttgaattttatattttggtttggtttttgatgatttttaaatttttttgatttaaacgtaagtttagaagtataagtatattgttggtggtagtatagattgaaatattttttttggatggtagttttttttataggattttattttttaggtatgtataggtatatataggtgtttaaaggataaatatatagatttattgtagtatatttgtattattgagagattagaaatattttaaaatgttaattaaatcgtttggatgaaaagttttgttttgtttattaggtttggcgtataatatggaggtgatatttgttatttttagtgtattatagatattttagttttaaaaatgatatttgtatttagatgggtattaaaagggaatggttaataaatattgtatatataggggtatggggtagtttcggggttggggatggcggcggttaggtttgtagcggttttaggatgagcgggtggatttcgggaagcgtggtgaaatgggttggttttcgagttagtcgggaggacgtttattatagttgtttagaagtattattggaagtttagatgtaggtgttttagttaaatgggttgggtgcggtggtttatgtttgtaattttagtattttggtaggttaaggtgggtagattatttgaggtcgggagtttgagattagtttaattaatatggagttgtgtttattgagtggggttttcgtaggttggagttaagaatttttagtatgcgtaatagttatagtttaaatatttgttagtgagttgtgtaattttttagagtaggtttgggtagtgtttgggtggggtttgggagttataggagatgtttaaagttaggtagagttcgggggcgaggggacggtaggtaggtgtggcgttgttttgggcgggtttgtatttttatatttaagtgagcggtttgtttattttttagttgtaggagttagacgtgtggagttttagtagaggttaatttgtgtttttttatttttttgggaaaggtgttttcgaggtgaaagagatggtttggtggaaattttgggtaagtgggagttggtaggagatttgggtttttgtatggtgttgggtgttggttattagggagttttgagaaatgtaaagtcgtttttggttgggagtggtttagtttatatttggttgttttttgggttaagtatggagggtgggaaggggtcgagaagaaatagttttaggtttagagtgtttacggtagggatgggatttgggtcgggagataggttgatgaagaaatttagaaatgtaagggggaagttgaggtttgagaagagtttaggggagggatttttgtaggggtggggttatttaaaggagggggtattatggttgagttttgtgtgtaaatgtgtatggggtgtatatacgtgtgtatttggggagaattaggtatattgtttttggtagagggaattgtgtgtagagggttagagggtagggagtttggtttcgagggaagttgtttagtatagtttaagggttttggtatcggaggagatggatttggggaagtaggtagggttaggttttgaaaggttttgtttggtaggttgaggagttaggttttattttaagagaagtgggaaggtattgaagggttttgagtatgagagtaatttgaatttgttgttggggatttattaatgtttttattttagggattaatgatgtttatttgttaagattggagagggaagaggggaagtaggaggatttggtttgttagagtttggaggaattcggggtttagggtagtttatttttagtagaattgatgggttttcgggagttttttatttatggttgagtttgaggttatcgttgtgttaaggagttgaatatttagaaggggatagaggtgatatttttcggttgtcggttttgtatattttttttttttttttttaggtagttttaggatgttagggttgtattttttgttttgtagatgatgaaatgaaggtttagagatattgagtgatttgttagggtttaatggttagtaggttttagttagagagtagttgggtttttttgtttagttttaggttttttgtgagtttttgtgggatatttaggtttgtttagttttagggagtttttggattatagatgtcgtaatttaagtaagtgtttttagggttagatatgttaggttttggataggtgggataaagaggaagttaggttgaggtggggtagttgttttggtttttagggaagtagtttttttttaggataaggggttatggaggtttgtagttttaattagattgttgggaatttgtttttgaggaggtggatatggtagggagagtttagtgttgggtggtttttaaagttagttgttggttaaggtagtttggtattgggttttgtatttagtgtagtaggataaagggttgtttatgtagggatttgttaaattgataggattattgtgatatttattgagtttttattttgtggtcggatttttttttaagtattttatatttaatattttttttgaattttataaggagtttatgaagtagatattagtatttttatttatagatgaggaaattgaggtataagtaggttaggtaggtgttcgaatttattagtaagtgtgagagtttaggtgagaatttgaatagtttgattttagggttaaaattatattttggtcgtttatattttatgtgagagttggttaggggtagtaagtttataggtagattttatttgtaatagttgagttgttagcgaagatttagtgttttttaggtataaagttgggttaggaacgcgatgggaggagatgagggagttattggagagagatttgtttgtaggtagggtttatttgtatttttttttttggtgttgtttttttttttgtgttttttatagagataaatttattttttaggtttttgggtagttacgtagtaggggaaggttaaggcgtggtagtttttttgtgtttgttatagaataagttatattaatagatgtagttataggttggtttgagttatttttttagtgaaaatgtgtttgtttggattagtacggttttgggtaagattttgtaggagtttgaggttgattttttttttttagtaggaggtttggagttttaggattttatattgatagttagggtttcgatttttagaatatttattttttaaaattttagagtgggaagtgagatagaggttttttaatgtagtaaaattagaattagttagggagttgtttataaatgttgtatttgagatttatcgtatttttgcgggattgtatgttttttagggatgcggttatatagtttggttattcgttggtgtattatagttttcgagtgttggggtagagggaagtcggtaggtattgagagttgagatgttttttatatttttagatgatttgcgtttttgtgggtgaagttttttttagtggaacgttttaggaatatttattgtttgggaaaggtggagttattagtagggtaggggaggtagatagagtttagtttttgagttaggttggggagttttaatagtattatttattagttgtgtaagggagtttagttttttttttgtaaagtgaggtattagtatttatttagtataattgttgaggaagttatgatataagtattgtttttaaagtatttggtttaggtttggtatatataaggggtttgaagtgttaataggagtaatagtagagcgtgattttataagtaagggatatcgtgtgtgtggatatcgatgagtaatatttgggattatattggttttttttggatggaatttttataggaattatttttaataatttttgttgtgaaatatggtgttaagaaatgatttaggaagatttgttattagatatttgaaattaaagtaaagagtttagaaagatgttttattttttatttaaaggaaagatatttatagatatattatttattggaatttttgtatttttataatttaatttagggtttcgatggatggatggatggatggatggatggatggatggatggatggatgggcgggtgtatagatggatgggtgggtggatggatggatggatgtggtagttaaatgggtaagtgcgtaggtgggaaagtagatgggtagatgatggaggtgatggaaggaataagtgaataggtaaatggaagataagattggatgggattaaatttttttttattttggaggatttttgagtttttttttaatttaatatttatttttaatatttttttattttttattatttttttatttaaaatatatttatgtttatgttaattatttgagaaattttgtagggtataagtttaaagagtttttaggtaagttttgaattggaggtttggaaattaagggtttaggtatttggttatttggtttattttataatttgtagagtatcgtgcgggtttttttaaatttgacgttttgagttttatgggtttgtggatttgtaaatattttgaattattaatatgtttagttgggtttttgttttttaagttgttgtaagttttaattttttaggaagagggtagattgagtttaaattattttttagaaaggtagaattatgtttagttttttaattttatttgtatattttgaaggtggtgtatgtagttttaggaagtttttgttttagtgttttttttttttttaattttgggtgagtttgtttttttttgttgttggtgggtgatgttggaaggagttgggtgtggttggggttgttgtttgtagttagatggtatagatagggataggaaaggttttgtggtttttttttataagttttggttttggttattttattttgttggttaaggggttgaagggtagagtattggtttgtaagggttgagtagattttcgtgtttagggaaggggtttattttgttagggcgggttattagatgggttgggagtttgttttgttttttttgtttttgtttgttttgagtaggtttggtttttttgtaga

SEQ ID NO: 118 - DNA, 9052 bp, Artificial Sequence
  chemically treated genomic DNA (Homo sapiens)
tttgtaagagaattaggtttgtttaaagtaggtagggatagggagggtagagtaggtttttagtttatttggtagttcgttttgatagggtgagttttttttttgggtacggagatttgtttagtttttgtaggttagtgttttgttttttagttttttggttaatagggtggagtagttagagttagagtttgtggggagaagttataaaattttttttgtttttgtttgtgttatttgattgtagatagtagttttagttatatttagttttttttagtattatttattagtagtaggaagggataaatttatttaaagttaggaggggaaagaatattgaagtaaaggttttttggagttgtatgtattatttttagagtgtgtagatgaggttggaaggttgagtatggttttgtttttttgaggaatggtttgagtttagtttgttttttttttggggagttgggatttatagtaatttagagggtaggggtttagttgagtatattgatagtttagggtgtttgtaagtttataggtttatggggtttagagcgttaggtttagaaaaattcgtacgatgttttgtagattgtgaaataaattagataattaagtgtttgagtttttgatttttaagtttttagtttagggtttgtttgaaggttttttaaatttgtgttttgtagaattttttagatgattaatatggatataagtgtgttttgggtggaggaatggtagagaatggagggatattggagataggtattgaattagagggagatttagagattttttaggatgaaaaagagtttagttttatttagttttgttttttatttatttgtttatttattttttttattatttttattatttgtttatttatttttttatttacgtatttatttatttgattattatatttatttatttatttatttatttatttatttatgtattcgtttatttatttatttatttatttatttatttatttatttatttatttatcgaagttttgggttagattgtgaaaatatagagattttaatggatggtatatttgtaagtattttttttttgagtaagaggtaaggtatttttttgaattttttgttttaattttaaatgtttggtgatagatttttttgagttattttttagtattatgttttatagtagaaattgttagaaataatttttatggaaattttatttagagagagttagtgtggttttagatattgtttatcggtgtttatatatacgatattttttgtttgtggagttacgttttgttattatttttgttagtattttaagttttttgtgtgtgttagatttgggttaggtgttttagaagtaatgtttatgttatggtttttttaatagttgtgttaggtaagtattgatgttttattttatagaaagggagttggatttttttatatagttagtaagtgatgttgttgggattttttagtttgatttagaagttgagttttatttattttttttgttttattgatgattttattttttttagataatgagtgtttttggaacgttttattgaaggaagttttatttataggaacgtaggttatttgggaatgtgggaggtattttagtttttagtgtttgtcggtttttttttgttttagtattcgggggttgtggtgtattagcgagtggttaggttgtgtaatcgtatttttgaggagtatgtagtttcgtaggggtgcggtaggttttaggtgtagtatttgtaagtagttttttggttggttttgattttgttgtattgagaagtttttgttttattttttattttaaggttttagaaaataagtgttttgggaatcggagttttggttattagtgtggagttttggagttttagattttttgttgagaaggaagggttagttttaggtttttgtagggttttgtttagggtcgtgttagtttagataggtatatttttattgaaaaggtgatttagattagtttgtgattatatttattaatataatttgttttgtgataggtataggggagttgttacgttttggtttttttttgttacgtggttgtttagaggtttgggagatgggtttgtttttatgagagatatagaggaaaaggtaatattaaaaagagaggtgtagatggattttgtttgtagatagatttttttttagtggtttttttatttttttttatcgcgtttttggtttagttttgtgtttagaggatattgggttttcgttagtagtttagttgttgtaggtggggtttatttgtgaatttgttatttttagttagtttttatatggggtatggacgattagggtatggttttggttttggagttaggttgtttagatttttatttagatttttatatttattagtgagttcgggtatttgtttagtttatttgtgttttagtttttttatttgtggataaggatattggtgtttattttatagattttttgtgaggtttaagggagatattgaatgtgaggtgtttagagaagggttcggttatagagtagggatttagtgagtgttatagtgattttgttaatttggtaggtttttatatggatagttttttgttttgttgtattgggtgtaaggtttagtgttagattgttttggttagtaattgattttggaaattatttagtattgggttttttttgttatgtttatttttttaaaggtaggtttttagtagtttggttgaagttgtaggtttttatggttttttgttttggaagaaggttgtttttttgggggttaggatagttgttttattttagtttggttttttttttgttttatttgtttagaatttagtatgtttgattttgaggatatttgtttgggttgcgatatttatgatttagagattttttgaagttggataagtttgggtattttataaaagtttatagagaatttggggttgggtagagagatttaattgttttttgattggagtttgttggttattggattttagtaagttatttagtgtttttgagtttttattttattatttgtaaaatagaaagtgtagttttgatattttgaggttgtttgggaggaaaggaaaagggtgtgtagagtcggtagtcgggagatgttatttttgtttttttttggatatttaattttttagtatagcgatggttttaggtttaattatagatggaaagttttcgagaatttattagttttgttggggatgggttgttttgagtttcgggtttttttaggttttagtaggttaggtttttttgtttttttttttttttttttagttttgataaatgaatattattgatttttgaggtgaaggtattgatgggtttttaatagtaggtttaggttatttttatgtttaaagttttttagtgtttttttattttttttaaggtaaagtttaattttttagtttgttaggtaaggttttttaggatttggttttgtttgtttttttaggtttatttttttcggtattaggatttttgagttgtgttgagtagtttttttcgaagttaagttttttgttttttgattttttgtatatagttttttttgttaggagtagtatgtttgattttttttaaatgtatacgtgtgtgtattttatatatatttatatataaggtttaattatgatatttttttttttgagtggttttatttttgtaagggttttttttttggattttttttaaattttagttttttttttgtatttttagatttttttattagtttgtttttcggtttaggttttatttttgtcgtgggtattttaggtttgggattgttttttttcggtttttttttattttttatgtttggtttaggaggtagttaaatgtagattgagttatttttagttaagggcgattttatattttttaggattttttggtgattagtatttaatattatgtaggaatttaaattttttgttagtttttatttatttaggatttttattaggttattttttttatttcgggggtattttttttagggagatgaagagatataggttggtttttgttgggattttatacgtttggtttttgtagttgaggagtgagtaggtcgtttatttgggtgtgggggtgtaagttcgtttagggtagcgttatatttgtttgtcgttttttcgttttcgggttttgtttggttttgggtattttttgtggtttttaggttttatttagatattgtttaggtttgttttggggaattatataatttattggtagatatttgggttgtggttgttacgtatattggaaatttttagttttagtttgcgaaagttttatttagtaaatatagttttatgttgattaggttggttttaaattttcgattttaggtgatttgtttattttggtttattaaagtgttgggattataggtatgagttatcgtatttagtttatttggttggggtatttatatttgagtttttagtggtgtttttgagtagttgtagtaagcgttttttcggttggttcgggagttagtttattttattacgtttttcgggatttattcgtttattttggagtcgttgtaaatttggtcgtcgttatttttagtttcggagttgttttatatttttgtatatgtaatatttgttaattatttttttttggtgtttatttaggtataggtattatttttggagttaaagtatttataatatattggaagtaatagatgttatttttatattgtacgttaaatttaataagtagagtaaaattttttatttaagcgatttggttaatattttaggatgtttttaattttttagtaatataaatatgttataatagatttgtgtgtttattttttgggtatttgtgtgtgtttgtgtatatttggagaataaagttttgtgagaggaattgttatttaaagagggtgttttagtttgtattgttattaataatgtgtttgtgtttttgagtttgcgtttgggttaggagaatttgaaagttattaggaattaaattaggatataaggtttagttgtagttggaaagtggtaagcgttttaaagttaagatattggttatatttgggttgtttataaattgtgagtttaattttagatgagatttagaagtatggtgagtaatttatttattttttaagtaaaatattttttttttttatttttgttaagaataaatagtttttagtaagagaaataggggatgtaatatttttataaattattttttttttttttaattaaaaaatgttaagttaaatgttatttaaagatatgtttaatttttatgatattgatttgtttatgagaaggagagagggttaggtattttgtttattattatttattattaatatttaggtttgatattagtttttaaataaatattttgggttaggtgcggtggtttacgtttgtaattttagtattttgggaggttaagataggtggattatgaggttaggagatcgagattattttggttaatatggtgaaatttcgtttttattaaaaatataaaaaattagttaggagtggtggcgggtatttgtagttttagttattggggaggttgaggtaggagaattgtttgaatttaggaggtagaggttatagtgagttaagaatatgttattgtatttttgtttgggtaatagagtgaaatttcgtttttaaaaaaaaaaaaaattaatagtagtttttaggatgatgagtagtgatttagtttttttttgattagattttgtaatcgtttagtagaaatgtttatttgatttttgcgagaataggaagtagtttagtgggggttttttttgttaaattttttattaagttggtttgttatttgttttgagttttgtaagaatattttaagaaaaattttaaaaatatgtaagataaatgagggtttttttttagtatgttttgaagtattgaggtatttgaaagttgtatatagtttttggtgaaatagttttttaggaaatgaagtatagatattaattatttttttagaagagtttttttttgatatgaaagattttatttagtatgatagagaagtatttgttttattatgaggatttatttaattagtagtaggggttttagtgttagtgtttattttagtagaggagatacgggggatatgtaaagtgtttttgttgaaaaatattttatttagggtgattatagttagtagtaatgtattgtatattttaaagtagttagaaggttaggtatagtattttatgtttataattttagtattttgggaggtttaggtaggtagattatttgaggttaggagtttgagattagtttggttaatatggtgaaattttatttttattaaaaataaaaataataaaaaataataataataaaaattagttagagatggtggtttgcgtttgtagtttaagttatttgggaggttgaggtaggagaattgtttgaatttgggaggtagaggttgtagtgagtcgagattatattattgttttttagtttgggcgatagagtaagattttattttaaaataaaaataaaaataaaaataaaaaaataaagtagttagaagaagggatttgaaatgtatttaatatatagtaatattaaatatttaaggtgatagatattttaaatattttgattgattattattttgtgtatgtaataaatatttaagtgtatattataaatatgtaaaatatgttatgttaataagaaaatattttgtttagtgtttttatttaaatgggaataaatttagcgtttaatgtatatatgttatggttttttattgagattggggaagggtcgtggtagtaggtgtatttattgtttaagtttgtttagattttttgttgtatgggtgatggtatttgtgattgtgttggttattgtttcggtgattttttttatttttttgttttttgatttttgggttttttttatggttttagtaatggttgttggaaagaggaagaatgttttagtgatttatttgttgaatttgtgtttttttgagtggtttgtgggatgtggttattttaatggattagtttttggagtggttcgatgggattaagggtagtaggattattgtagaatgaatttgaatttggttttaatttttttaataatttgtatttttttaattgtgagtgagattgagtatttatttatgggtatattgtttgtttatttttttttttggaaaatgtttgtttatgttttttgattatttttatattgggttgttatattggattattatttttatgataaatattttttattagtgtataattttttttttggtttggtttatagtgtttttttttttggttatagaaaattttagttttggattgttaaatttatttaatattttttttatggcgttgatttttttgttatagttttaaagatttttttttttttaagattaggttaaagtttttgatgttattattatgtttaaatgtttacgatgtttttttttttaaaatttatatgttgaaatttttagttttaatgtaatgatattaaggggtggggtttttgggaggttgaaattagtatttatataaaagagattacggagagttagttttttttattatgtgaggatagagttgggtttatttatgaattagaaagatttttttattagatgttaaatgtgttagtgttttttttgattttggattttttattttttaggagtgtgagaaataaatttttgttgtttttaagttatttagtttatggtttgtttttgtttttgagatagagttttgttttgttatttaggttggagtgtagtggtgtaattttagtttattgtaattttcgttttttaggtttaagggagttttttgttttagatttttgagtagttgggattataggtatgtgttattatgtttagttggtttttgtatttttagtagtaatggggttttattatattggttaggttggtttcgaatttttgattttaggtggtttattcgttttggtttttcgaagggttaggattataggcgtgagttattgtatttggtttatggtattttataagagtagtttgagttaagatgtttattttttagtaagttaataaatttatttatgtaaatgtaagttttttatttatttggaatttattttgttgaaaaggaatgagatatatatatgttttgtatatagtattatttatagtttatatatattaatttaatatttaatatagaattttatatgttaaatttttttttttttttttttttttttttttttggagatagagtattatattgtcgtttaggttggagtgtagtgtcgcgatttcggtttattgtaagttttattttttaggtttacgttatttttttgttttagtttttcgagtagttaggattataggtgttcgttatcgtgtttagttaattttttgtatttttagtagagatgcggttttatcgtggtttggattttttgattttatgattcgtttattttagttttttaaagtgttgggattataggcgtgagttatcgtttttagtaattatttttttttttttttttgagatcgagttttgttttgtagtttaggttggagtgtagtggtatgatttaggtttattgtaagttttgttttttaggtatatattatttttttgttttagttttttaagtagttgggattataggtatttattattatgttcggttaatttttatgtatttttagtagagacggggttttatcgtgttagttaggatggtttcgattttttgattttatgattcgttttttttagttttttaaagtgttgggattataggtatgagttatcgtattttgttatgttaaatgttttgttttagtgtgttgttatatagttttgtgtgattttgtttttttattttatagagagaattatttagatagtgttt

SEQ ID NO: 119 - DNA, 6536 bp, Artificial Sequence
  chemically treated genomic DNA (Homo sapiens)
ggcgtatatttgtaattttagttattcgggaggttgaggtaggagaattgtttgaatttgggaggtggaggtggaggttgcggtgagttgagattgcgttattgtattttagtttgggtaataagagtaaaattttattttttaaaataaaataaaataaaataaaataaaataaaataaaaaagtaattaaaaaatttattgaagtttttataagaaataaaatttttataatggaaattttagttgattaaatttttatgtaattaaataagtatgagtgataggttttgtgttttgtttagtaatttaataattttttaattttttgaaagtagaattattttaatttttatttgaaaaatttttataagagtttagaaaagagttatgtaaattgatatttaagttatatgggtttgggtaatttatttttagtgtttattgttaagatgatataggatatattaggtttttttttttttgtagggttttattttgttatttaggttgagtgttgtggtgtaattaaagtttattgaaattttaaatttcggggtttaagtaattttttaattttaattttttaagtagttgggattataggtatgcgttattatgtttggttaattttttgtattttttgtagagatagggttttattatgttgtttaggttggttttgaatttttgagtttaagattcgtttaattcggttttttaaagtgttgggattataggtgggagttattatatttggtttattaggtttttatttagtagagagaagatattaaagtaatatatttttaagttttttatgtattattttttttttttttttatataggaaatggtttgaagataatgatatagtgtgattttttgaaattttttttgggtagtggaagggtttagattttttttttttaatttaattagatgaagagtgagagtaagtagtatttaagagtatatagataggtatatatatgtatttgtattttaattattagggtcgtgttagtacggaaagtatttaataaagatttgatagatcgatttttagatgttgaattacgtgttttagtggtaaagattttaatggttttgttaaaattttagtgagtttttaagtattttaagatgttaaatatttgttttttatttggaaaatgtttataaatgttttatggggatatatttttattttaaaatttattatgaataaatattttgtaataaatagtaattaaagtatatttgttttaatttttgtagtaaaagattttataagagtaattaagaggtaattatttaaataataattatagaatttgtttataaaaaatatatataatatatatattttagagagatagggttttgttttgttttttaggttggagtatagtggtataattatgggttattgtagttttgattttttagatttaagttatttttttattttagttttttaagtatttgggattatagcgaatgttattatatttggttaatatttaaaaatttttcgtagatacggttttattatgttttttaggttggttttaaatttttgattttaagtaattttttcgttttagttttttaaagtgttgggattataggtatgaattattgggtttggtttttaaaattatttttgatatagtattgtgttattattttgtaaatatagtttaaattaaatttttttaatgaatgtaatatatttattataatgtaatataggaattattaatagtaaatttttgatgtgagggaaattttatttttataaagtttagttttttattaaagtttattttaggatagtaattaatttttttaaaatataaaaggttatttatttatttaggcgaagtttcgttttgttatttaggttggagtgtagtagtagattttggtttattgtaatttttattttttaggtttaagtgatttttttgttttaatttttgagtagttgggattatattaggtttagttaatttttgtgtttttggtagagatagggttttattatgttggataggttggttttaaatttttgattttaagtgattcgtttgtttcggttttttaaagtgttaggattataggcgtaagttattgtatttggtttaaaaaggttttttttttaatttatttaaaggaggttaagtattttaaggtataagagtcgtttatttaaaatagtaaatttagtatatttattttttttagattaaaattaatatatttcgtattagtaaaataaataatgttatttgttttttttttttttttttttgagaaggagttttgttttattttgtaggttggagtgtagtggtacgatttcggtttattgtaattttcgttttttgggtttaagtgatttttttgttttagttttttgagtagttgggattataggagtatgttattatgtttggtttttttgtatttttagtagatatagggttttgttatgttggttaggttggttttaaatttttgattttaggtgatttatttattttggttttttaaagtgttgggagtataggtatgagttattgtcggtaggttgataattttattgtttttgaagagggcgtttaattattttattgtgataaaattttgtttgtttgttttttgagatggagtttcgttttgttgtttaggttggagtgtaatggtacgattttagtttattgtaatttttatttttttatttcgagtgatttttttgttttagttttttgaatagttgggattgtaggtttgtgttattaagtttggttaatttttgtattttttgtagagatagggttttattatgttggttagtttggttttgaatttttgattttatgatttgtttatttcggttttttaaagtgttgggattataggtgtgagttatcgcgtttagtcgtaataaattttttaattttgaaaaatatattatttgggatgagttattagtaaagtataattttatatgtagtagtataaaaaatgtttagatgtttagggttttttttaaaattttattattttggaagattaataatagttttattaaataattttatatatgaatgaaaaatggagaaaaattttattaagatgttaattttattaaaatgaaatgggttatttttttttttcgttagaaaaaaaaaggttgggaaaataaaatttataagttggttttttttttttttttttttttacgagttggttttaaggttatttttaatatttattttttttaatgatattaatatatcgttatttatttgattttaaaattgtaattggttagttttaagtgaatataagtgttatgtttttgtagttttattatatttaatttgtaatttatttaataaaagattttaaatttataatgtatgtacggtgattaaaatatgagtatttttttaagttttgttattataacgtttgtttttttgggagtataatgatatggtttttttttttttttttttttgagacggagtttcgttcggtcgtttaggttggagtgtagtgatgcgattttggtttatagtaattttcgtttttcgggtttaagcgatttttttgttttagttttcggaggaattgggattataggcgttcgttattacgttcggttgattattcgtatttttggtagagatggggttttattatgttggttaggttagtttcgaatttttgattttaagtgatttatttgtttcggtttttaaatataatgatttgttttaaggttgtaagtatttttattaggtatttatggggtgagtagggtggggtagatgtgtttcggaatggggtatagcggataggaagtaacggtttataataacgtgaacgtttttgacgtgtagcgggagttttagaaagcgtggtcgaatttgtagtttttaataaatggttcgtttttaaattttagttttaattttttttgagcgataggggtatgttattagtacggggggaaatgagatataagaaacgttcgaaagggaaaaataaggttgggttgttttttttttttggggttaagatagaggtatagaaggtttaggtttgggaggttggattattttcggttggatgttgagtcgggtgggagtttaaatagtagggggtttataggaggtcggtttaggtagtttcgcgtttatttattaggttaggtttaggtacgtttttagcgatagtaggtttaggtacgttcgggggtttgtttagttttcgttttcgttgtttcgggttacgggggttttttcgttttcgtttcgtttttcgggtttcgtagtaggggtttttttgggtttcgatttttttcggttttttattttagatatgtttggagattttaggacgataagtttagggtagtttttttattagggggagtaggacgtggtcgttttggcgttcgtgggaattttgggcggtgatcgcgtttttttatagatttggtatcgtttagagtttagtttttttttttttttcggtattttcgttgttttattgagttttttagttgttagttttatagtttttttaggagaggtgggcggcgattttaatttatagcgttttttattgcgatattgttttaaattcgaggaaatttaaattttcgggcgcgcgtaggtcgacgggattcgaggaggaggggtaggacgaaggggtcgcgcgcgttacgtcgggcgcgtcgtcgttgttcgagttcggtattggtgggaacgcggcgcgtttttgaggtttagttacgtttcgttcgcggggtaggcgggtatttttacgcgcgcgggtatgagtcgtggtaggagtgcgcggcggtagcggtggtcgttttttggggtttggggtgtgtttatttgtataagcgggcgcgcgtcgttcgggttgggtggattcggcgggatttgattgtttcgttgtttagaggcggagaagaagaggtagcgagtggacgtgattgttttatttcgggtaaaagggatagaattagaggtggggagtttgggtagtcggcgattcgcgaagatttgaggtgtcgtagcggtattcggagtagcgtcgggtttttttcggggtgtagtcgtcgtcgggggaagggcgttataggtcgggaagattttttttttttgtgtttagtagtggggtttatcggagggcggttcgtgggtcgggttttatcgcggcgtttcgggattgtggggttaggttgcgttgggtggacgtttatttcgttaattttcggaggtttttgggggttttcgtgcgtttcggggttgtagagatttaggggaggcgtttgtgaggttcggatttgtttcggggcgaagggtatgtggcgagatagagttttgtatttttaattttcggtggaaaatttttgttgtcgtttttttttatcggtttggagttttttagttttgtttcggtagtgtcgttttttttattaagatttaggcgtaaaggtttgggtaagttgattttttcgttttttttttcgagttaggttttttggaggtttggtagttgattttagggattgagaatttgaggatatggaatatttgataattattttgtttttgtattaggaagagaaattttgtaatgaggaagtagtaaatttggggttttcgtggataaacgtgcgttgttttttgttttacgtttatgaagagttttggttttttattttgttgtgggttataaaaggttttgagatttagtttagataagttgtgtagttttaaaacgtatttaagatttgtatattttagtttaataggattaggtgaaattggaaattagttttagaaaattagagtgttttatttgtttagttattggatattatttaaaaaatttatttatttttgtttttttatatcgaattttattattataaattaaggaatattttatgtttaagaggataaaaacgttattaatattttaaaaaatgagagttttgattcgaattaataattttttattagttttgtgtttttgttgggtattttgtaagttttgataagtataggtaaatgttttacgttcgtttttgtttttttaagtgttatatttggtgattttaaaaatagttattgaagtttgataattattgtttttttttgtgagttttaagttatttgtgttttgtttttgtatttcgggtatttatatttttatttttttttttttttttttttttgagtagattgtgaattattttaggtaaatgatttaattttttttgtagttttggtgtttgatatatagggaggggtataaatgtgtattgaatgaatgaattgataaattcgtttagatttttttattttatatattgtgtaaagttttgttaatgttttgaaaatttgtagatattgtgaattgggttttatgtttatggaaaaatttgtattatatttgaaataaagttgttagaaacgttaagtattttattataaa

SEQ ID NO: 120 - DNA, 6536 bp, Artificial Sequence
  chemically treated genomic DNA (Homo sapiens)
tttatagtaaaatatttgacgtttttagtaattttattttaaatataatgtaaatttttttatgggtataaaatttagtttataatatttgtaagtttttaaaatattaatagaattttatataatgtatagagtgaaagagtttaaacgggtttattaatttatttatttaatatatatttgtgtttttttttatatgttagatattaagattatagaaaagattgagttatttgtttgaaataatttatagtttatttaaagaagaaaaagagagagagagtgggaatgtgaatgttcgaagtgtaaaaatagagtataagtaatttggagtttatagaagggggtaataattattaagttttaatgattgtttttgaagttattaaatgtagtatttggaaaaatagggacggacgtagggtatttgtttatgtttgttaaggtttataaaatgtttagtaggggtataaaattgataaaaagttattgattcgaattaaaatttttattttttaaaatgttaataacgtttttgtttttttaaatataaaatgttttttaatttatagtaatgaaattcgatgtgaaaaaataagaatgaatgaattttttaggtgatgtttaatagttaagtaaataagatattttggttttttgaaattaatttttaattttatttagttttgttaaattaaaatatgtaaattttaaatacgttttaaaattgtataatttatttgaattaagttttaaaattttttgtaatttataataaaatggaaagttaaaattttttatggacgtaaaatagaaaatagcgtacgtttatttacgaaaattttaagtttattatttttttattatagaatttttttttttggtataggagtaggatggttattaaatattttatgtttttaaatttttagtttttgaaattagttattaagtttttaaagaatttggttcggggagaaaagcgaggaggttaatttatttaagtttttgcgtttaggttttagtggggagggcggtattgtcgggataagattgggagattttaggtcggtggagggaaacggtaataggagttttttatcgggaattaggggtgtagggttttgtttcgttatatatttttcgtttcggggtaggttcgggttttataggcgttttttttggatttttgtagtttcggggcgtacgaagatttttagggattttcgaaggttggcgaggtgggcgtttatttaacgtagtttgattttatagtttcggagcgtcgcggtgaggttcggtttacgggtcgtttttcggtggattttattattggatataaagggaggaggttttttcggtttgtggcgtttttttttcgacggcggttgtatttcggagggagttcggcgttatttcggatgtcgttgcggtattttaagttttcgcgggtcgtcgattgtttagattttttatttttggttttattttttttgttcgggatagagtagttacgtttattcgttattttttttttttcgtttttggatagcggagtagttaaatttcgtcggatttatttagttcggacggcgcgcgttcgtttatgtaaataaatatattttaagttttaaggggcggttatcgttgtcgtcgcgtatttttgttacggtttatgttcgcgcgcgtagaagtgttcgtttatttcgcggacggggcgtggttaagttttagggacgcgtcgcgtttttattaatgtcggattcgggtagcggcggcgcgttcgacgtggcgcgcgcgattttttcgttttgtttttttttttcgggtttcgtcggtttgcgcgcgttcgggagtttgaattttttcggatttggagtaatatcgtagtggaaggcgttgtgggttgaggtcgtcgtttattttttttaggggaattatggagttggtagttgaaagatttagtgaagtaacgaggatgtcggggagagggaaggggttgggttttgggcggtgttaagtttgtgagggggcgcggttatcgtttagggtttttacgaacgttaaggcggttacgttttgttttttttggtgaagaagttgttttgggtttgtcgttttagggtttttagatatgtttgaggtgaagagtcggaagaagtcggggtttaagggagtttttgttgcggagttcgggaagcggagcgagggcgggaagattttcgtggttcggagtagcggaggcgggggttgggtagattttcgaacgtgtttgagtttgttgtcgttggggacgtgtttgggtttggtttggtaagtggacgcgaggttgtttgggtcggttttttgtgggttttttgttgtttgggtttttattcggtttaatatttagtcggaggtgatttaattttttagatttgggttttttgtgtttttgttttgattttaaaggaaggaaatagtttagttttgtttttttttttcgggcgttttttgtattttattttttttcgtgttggtagtatgtttttatcgtttagaaggagttgaggttaaggtttgggaacgagttatttgttaagagttgtagattcggttacgttttttgaagttttcgttatacgttagaagcgtttacgttgttataaatcgttattttttgttcgttgtgttttatttcgggatatatttgttttattttatttattttataaatatttaatggaaatatttgtaattttaaaatagattattatgtttggagatcgaggtaggtggattatttgaggttaggagttcgagattagtttggttaatatggtgaaattttatttttattaaaaatacgaataattagtcgggcgtggtggcgggcgtttgtagttttagttttttcggaggttgaggtaggagaatcgtttgaattcgggaggcggaggttgttatgagttaagatcgtattattgtattttagtttgggcgatcgagcgagatttcgttttaaaaaaaaaaaaaaaagaaaattatattattatgtttttaaaggagtaaacgttatagtagtagagtttggaggagtgtttatattttgattatcgtgtatgtattatgaatttaaggttttttattaagtaagttatagattgaatatggtaaagttataaaaatatagtatttgtgtttatttaaaattaattagttgtagttttaaaattaggtaaatggcgatatattggtgttattaggaaaaatgaatattagaaataattttaaaattaattcgtaaaaaaagaaaaaagaaaaaaattaatttgtgaattttatttttttagtttttttttttttggcgggaggagggaatagtttattttattttaataagattggtattttaatagaatttttttttattttttatttatgtgtaaagttatttagtaagattgttgttaattttttagagtgatagaattttagaagagattttggatatttagatattttttatgttattatatatggaattatattttattggtgatttattttaaatagtgtattttttagagttaaaagatttgttacggttgggcgcggtggtttatatttgtaattttagtattttgggaggtcgaggtgggtagattatgaggttaggagtttaagattaggttggttaatatggtgaaattttgtttttataaaaaatataaaaattagttaggtttggtggtataaatttgtaattttagttatttaggaggttgaggtaggagaattattcgaaatggggaggtggaggttgtagtgagttgggatcgtgttattgtattttagtttgggtaatagagcgagattttattttaaaaaataaataaataaaattttgttataataaagtgattaaacgttttttttaaaaataatagaattgttagtttgtcggtagtggtttatgtttgtatttttagtattttgggaggttaaggtgggtggattatttgaggttaggagtttgagattagtttggttaatatagtaaaattttgtgtttattaaaaatataaaaaagttaggtatggtggtatgtttttgtaattttagttatttaggaggttgaggtaggaaaattatttgaatttaagaggcggaggttgtagtgagtcgaaatcgtgttattgtattttagtttgtaggatggagtaaaatttttttttaaaaaaaaaaaaaaaaaaagtagatagtattatttattttattaatacggaatatgttaattttgatttgaaaggaataaatgtattgaatttattgttttaaataaacggtttttatgttttaaaatgtttgattttttttaagtaaattgaaaaaaaaatttttttgggttaggtgtagtggtttgcgtttgtaattttagtattttgggaggtcgaggtaggcgaattatttgaggttaggaatttgagattagtttgtttaatatggtgaaattttatttttattaaaaatataaaaattagttgggtttggtgtaattttagttatttagaggttgaggtaggagaattatttgaatttgggaggtggaggttgtagtgagttaagatttgttattgtattttagtttggataatagagcgagatttcgtttaaataaataagtaattttttgtgttttgggaaagttagttattattttgggataagttttaatagaaaattaaattttatgggaataaaattttttttatattaggaatttgttgttagtgatttttgtattatattgtaatgaatgtattatatttattaggaagatttaatttgaattatgtttgtaaaatgataatataatgttatattaaaaataattttgggggttagatttagtggtttatgtttataattttaatattttgggaaattgaggcgagagaattgtttgaggttaggagtttgaaattagtttgggaaatatagtgagatcgtgtttacgaaaaatttttaaatattagttaagtgtggtggtattcgttgtagttttaggtatttgggaggttgaggtgagaagatagtttgagtttgggaagttaaagttgtagtaatttatgattatattattgtgttttagtttgagagatagagtaagattttgtttttttaaaatgtatgtattatatgtgttttttatgggtagattttataattattatttaaatagttgttttttagttgtttttgtgaaattttttgttgtaaaaattgaagtaaatgtattttggttgttgtttattgtaaaatatttatttatagtaaattttgaaataaaaatatatttttataagatatttgtaaatattttttagataaaaagtaagtatttggtattttaaaatatttaaaagtttattagaattttgataaagttattgagatttttattattaaaatacgtaatttagtatttaaaagtcggtttattaaatttttattaaatgtttttcgtattgatacggttttggtggttaaaatataagtgtatatgtgtgtttgtttgtgtatttttaaatattgtttatttttattttttatttgattaagttggagggaaaaaatttgaatttttttattgtttaagaaggattttaaggaattatattatattattgtttttagattattttttatgtggaaagaaaagagaaataatatataagaaatttaaaagtgtgttgttttaatattttttttttgttaaataaaggtttgataggttaggtgtggtggtttttatttgtaattttagtattttgggaggtcgagttgggcggattttgagtttaggagtttaagattagtttgggtaatatggtaaaattttgtttttataaaaaatataaaaaattagttaggtatggtggcgtatgtttgtagttttagttatttggggggttgaggttggaggattgtttgagtttcggaatttgaggttttagtgagttttgattgtattatagtatttagtttgggtgataaagtgagattttgtaaaaaaaaaaaggtttgatatattttatgttattttgataataaatattggagataagttgtttaaatttatatggtttgagtgttagtttgtatagtttttttttaaatttttatagaaattttttaggtaagaattgaggtgattttatttttagaaagttaaaaagttgttaaattattaaataagatataaaatttgttatttatgtttatttaattatatagaaatttaattagttggaatttttattgtgaaaattttgttttttatggaaattttaatagattttttaattgtttttttgttttgttttgttttgttttgttttgttttgttttgagagatggagttttgtttttgttgtttaggttggagtgtagtggcgtaattttagtttatcgtaatttttatttttattttttaggtttaagtaatttttttgttttagtttttcgagtagttgggattataggtgtgcgtt

SEQ ID NO: 121 - DNA, 12705 bp, Artificial Sequence
  chemically treated genomic DNA (Homo sapiens)
  unsure 7028..7029: n is a or g or c or t
tatttatttgttttatttttttattttttatttgtttaatttattgtattgtggtttttgtttttattttttgttaatatagattaaattatggggatttataatttttatgttgttaaatttaaaggatacgtttttttttttttttttttttgttttgattttattggaaattttttttgtatttgatgttgttgattatttttttttttttgaaagtttttttttttttggattttttttatgatattatttttttttgattttttttttatttttttgttaatttttagttttttttttgattgtttttttttgtgttggtttttaaatattggtattttagagtttagtttttagtttttttttttttttattttatatttttttaggtagttgttggaatagttttgttgaattaggtttggttgtttatttttgtaattttagtattttgtgagattaaagtgggaagattgtttgagtgtaggagtttttgatttgttggggtaatatagtgagatttttatttttttataataaataaataaaagaatagttttgttgaagaagggtattggattgagaaagtttttgttaggttttgaatttgatttaggaattttattttatgtagtatgtgggaagattttattttttatagattttttaaatgaaaatcgttattaagaagaaaagaggtgtgttagattaattataagaaaatttataatattaaagtagtatttatatatagtggaggataaagttgtttttattttagaagtgtttttatttttaatagagatgaaagttttatatttttatataggtgatttgggtgttaattgtttagtaattttaattagttagattattaaattaaatagtataaagttattatttttggtaaatgattttagatggatttgtttataatttaatttttttttgataggtttaaggtaataatttttaaagtttgttgttttagaggaatttatattggttagaattaaatgtagtatttgaggtggtttataggttatttattggttgtttttatattatagaaagtattagaagagggaagagattatagtagggaaaggatgggtgaaaggtataggttgattttttattggttaggagattttgtagattttagaggagattaggaatttaggaagatcgtttgcgggttaaatatataaggaaaaagatgtttatgtgaattgtatatgggtatttttagttaattagagttttttttttaattttattatgtaatttatgttttttttatttgaagagatttttttgaatattgtagtttttttgtttaatgagattgggaagataaatattttggtgggttatttgtaaatgggtgatatttttggatttttttttttatttttttaaaaataaatttagatgttattttttaaatttataattttatagttaattaattaattgattattgatttttgggaattttattttttgaatatttattaaatttatgtaattttttttatttttagttttattattagagtttaagttattattatttttaatttggttttttgttttttaattggtttatatttttttaattttgttttttatttatttatttttttttaggagttgaaagcgattttttaaaatgcgagtgtgaatatgttttttttttgttttaaatttttttatgattttttattgtttttaaaataaaggttaaatttttagtttagtatataaggttttttttgatttggtatttttttatttttttattttattttatgttattttttattattataattgttaggttgtttttgtgttgttgtaagtaaatatttgagattgggtaatttataaagaaaagaggtttagggttaggtgtggtggtttatgtttgttattttagtattttgggaggttaaggcgggcggattacgaggttaggagattgagattattttggttaatacggtgaaattttatttttattaaaaatataaaaaattagttgggtatggtagtgggtgtttgtagttttagttatttgggaggttgaggtaggagaatggtgtgaattcgggacgcggagattgtagtgagtcgagattgcgttattgtattttagtttgggggatagagcgagattttgttttataaaataaaaaaaaaaaagaaaagaaaagaggtttaatcggtttatagttttgtaggttatataggaaatatagtattagtatttgtttggtttttagggggtttttaggaagtttttatttatggtagaaagtaaagtgggagtaggtattttatatggttgattagaagtaagagagtgtggggggagaggttttataaattatttatttatttatttatttatttgagatggagttttattttgttgtttaggttggagtgtagtggcgtgatttcggtttattgtagttttcgttttttgggtttaagtaatttttttgttttagttttttaagtagttgggattataggtgttcgttattatgtttagttaatttttttgtgttttaaatagagatgggattttattatgtggattaggttgttttcgaatttttggttttaagttgatttgtttattttggttttttaaagtgttgggattataggtttgagttattacgtttggttatgttatatatttttaaataatcggattttataagaatttatttattatggggaagatagtattaagttatgagagatttatttttacgatttgaatattttttattagattttatttttagtattggggattataatttaatatgagatttgattagggataaatatttaaattatattaatatttatattgatttttttgtattttttttgttatttggaatatttttttttttttttggttgatttttagtttttttattttttttttttattgaattgttattttttatgaaagttttttaaattttttaggttaaattaagtttatttatatagttttcggtatattttttttaagatatttattatatttttaattatatatttaatgttttttttttttgttaaattttaagttgtatgagagacggaattgtattttgttttttgatttgttgttagtattaaggatagtattttatatatagtaattatttgatgaaagaaaatgaatgaatgaatgaatgaggatatttttgtttttttgggtaatttttttttattttttaagaatttaggttagatgttattttttttaggtgagatgtagttaaatttgattcgtttttagatttttagggtttggtttgggatttgatatatggtttatatattataggtatttgttaaattattataaattattggttgtgaatttataattgttgaaattgaatgataggtatatgagggtttattatattgttttgtttgttttagtatatattggaaatttgttataataaaaagttaaaatatttatatttattataagtaaaataaaagtatatttaaagatgattttgaagtttttggtttgggaagttagtagttggtgttatttattggaatggatggaatggagttgtgtttagtgtgggatgtgtgttgtgttgtgtgtgttgaagagggtttttttttattttagtgaaattttttaaaagattaataaagggggatgaaataataaattgaggttggatattgtgtttgacgtttgtaattttagtattttgggaggtcgaggtgggaggatcgtttgaatataggagttttagattagtttggggaatatagtgagattttttttttattaaaatataaaaagttaggcgcggtggtatatgtttgtggtttaggtatttcgggggttgaggcgggaggaatttgagttttggaggttgaggttttagagagttatgattttgtttttgggtgatagagtgagattttgttttgaaagaaagaacgaatttagatttggatatttttagttttaggtatttgagagggattagtatgtagaggttttttggatggtaatataattttttattatttttgatggtttttgggttattgatttgattattgggatgtattttattatttagggagggtttgtagtaagtattgtattttattattttttttatatttttatattttttatttataatatttttttttttgtgaatttttatcgggaagtaatgtatttttgatattttttaggttttgatgttagttttatgtttagtagtagaggtattttagtgttaagaaatatcggagttttagtttaaatttattattaattgtgattgcgggtaagtcgttttattttttttaattttagttttagtttttgaaaaatgaggataataattttggtgattttatagagttgatgtgaagattaatgcgcgttaacggtttaatagagagttcggtacggtgtaagtggttaataaatacgagttattattatgagtaacgttgtgtttttagagtttttttattaggacgttagggagcggtgtagtaggagcggcgtagagtgtttttcgggaattttttttcgcgcggtcgcgcgtcgtatagtcgtcgttattcgggttttagttcgttcgcgcgtttttcggcgtgggtgcgggattagggcgttgcggggcgcgagggtgagtttgtggaatagtagtggaggacggcgtcgcgttaggcgggtgttttagggagtcggttgtaggggtgtttgttgggagggttggatcgcggggtttatcgaggttcgagggtcgttcgtagtgtaggtttttaagaagttgcggtaagtgcgtatcgtcgagttcgttttcgcgttcgttttaagatggcgtttttttttttttttttgcgcgcgttttcgtcgttcggggcgcggtttcggttcgcgcgtttttgggcgggggatgttgtgatggagaagtcgcgcggagttcgaatttcgtagtttgagttattttcgttatttgggttcggggttttatcgcgtaggtaggaggtgtttttgtttcggtttagtttcggtggttgcgtttcgattattagcggtcggcggattttgtagtttttattttgcggtaagtcgggtttttcggtcggttttattttttattttcgggtcgtttttttatcgcgcgttcgtagatcgtttttttatatttattatcgtagggtttattcgggtttttatatcgtttttttcgttgttttttattttttgtttttcggggtgattaggggcgggtatggaggacgcgaagcgaggggtagtgggtgttgggggaggggaggtttaggttcgggaaggggacgtggggtggggtgggttggtaggtcgcgtcgattttagtaggggttttaggttttggatttgttaagtcgtattttgttgtttttagcgatcgaggggtgtgttttggggcggttgtgtttttagtttagttaggaggtttagtattggtaagaatattgattagaagtagtttttttattgttaatttttaatttgttttgtattagtttgtgtattttttgtattttgagtttttttagttatagttttagtttttttcgttttttagagttaacgtttgttgtttttatttttttattttttatttatttttaaaagtattttattttgtgtttttgatatttattgaaattgtttaggttaaggttatcggagatttttttgtggagaattttagtggatattgttattttttttatttttgagtagtattcggtggggtatgttaatttattttttttgaagtatttttttgttttttgttttatagtattgtttgttttttttaattttatttgttttttttttttttttttttagatgttggtgaggtttttggttttgtttcgagttgtttttttttagtatttgttttttttttttagatattttatttatttttaaagttttaaattttatatatatgttaatgatttttaaatttatatatttagtttagattttttttttgaaatttagatttatatgtttagttgtttttttgatatttttttgaaagataaataggagttttaaatttatagattttaagttaaattattttttgtggttttttttgtattttatttttaaatttgtttttttttcgaattttaaaaatggttttttgttaatttggagttatgagtaagatttgagattaattttttttttattttttgtattttattttattaagttttgttatatttattgtttaaatattttttaaatttatttatttcgttttttttttattgttattaaagttaatttgggttattattattttttttttttgattattttaatagtatatttttttgtttatttttttttaattgtttttaatatagtatttagagtaattttttgaaaaatgtttttaattatttatttatgtaataaatatgattttagtatttaatatatgttaggtattgtgttatgttttgaagatataattgtgagtaaaagagattgagtttttggagttgataatttaggagaaaaattaaataagaataatattataaatgtaatatgtattatgaagaaaagttgtatggtgttttgagaacgtataagagtagtagttaaattggtttcggggatagggagagagggttggaggatagtttttttgagaatatgacgtttgaattaaaatatagtggatgagtagaagttaatttagtttagagagtaggagaagaggttttaggaagtatggaaattatatgtaaatattttgtagaaggaaaatatatgttttcgaggaattagaagaaggttattgaggttgtagagtagtgtgattaaagttaggggtagggaggaggaaggtaggcgttagattgagtaggaaatttaggttatgttaagaatttggttttaaggnngttattgattgtacgtttgtaattttagtattttaggagttaaggcgggcggattatttgaggttaggagtttaggatcggtttggttaatatggcgaaattttatttttattaaaagtatataaaaattagtcgggtatggtggtgtgtgtttgtaattttagttatttaggaggttgaggtagaagaatcgtttgaatttaggaggtagaggttgtagtaagtcgagattttgttattgtattgtagtttgggtgatatagtaggattttatcgtaaaaaaaaaaaaaagggaattttgttttaaggtttttgtttttgatggtagtggatgtggagagtagatgaagtttagaaattttttttagagaggaaattattagtatttagagatggattgaatatagtaagtgtaggagaaggatatgttaagatgtatttttattttagatttatagaataggatggattttattattttatgagtcgggattttgaaagaggattagttagtgtgtgggagtgggaaatatgagtgggtttattagtttgagatatttaagtggagatgttgagtagaaagttgaatgtatttgtttggagtttaggtgaggggtttgaaatggagatttgaattgggaaattattagtgtataattgaagttgtgggtattaatgaatatttatattgattataggatgagaaagaggaaggggtatgagaataagttataagaaattttagtaggtaatggttaatagaggaagatgagttagtagaggagtttaggaatttagtaaatagtaataagaagtgtaaaagatgagatgagatgaggagtgtggagatgagagtgtggaggtttcggatagaggttggatgagagatttacggggttagatgttgttgggaggataattaagacgagtattgtgtttgttggattgaatgatataggggttatgttgattttggtaggagttgttattgagtcgtgttgggagtggaagtaggtttggaaagggttgaggagtgagtgggaggtgaggaagtggtaatagtgagtggagataatttttttaggaagtttgtttgtatgggggaggaaagagagtagtgagtggatttggaggagcgttaggttaagttgggagatcgtggattttattgagaaggagaggttgattatatagaggagaaaatagataaatagtggtataaaatttttggaaaggtattataggaagaatttaaattataggtgaagtagttggttttgggaaggagagaaagggataggtgttgaagtttggttaggtttttatgtttgaggatgttatttagttggatggttttttttttttttgtgaattaggaggggagattagtttttgagacgggtggttaatggagagttatgttttagttttaggtaggtttttgttgatgttttggttgtagtaagttttaggtttttgtaatgttttttttttttttttttatgatatttagttaataaatagggaatgttatgggtgttaggtattgttttagatgttggtgttatattgtattgtaataagttgtttaatgattgtttttcgttgaattgagaatttttttagaggaagaattattttttttgtttttattatttttttttgtgtttagtatagtgtttggtatatgggaagttgttagattagataatttttgattttgagtaagatttaattttaatttttgtggtttgatgttaggatttttaggtttagtgattattttttttattttttgtttcgaggtttttgtttaattttttgttttgagttagaatttagttggttttttgtattttttggtaattttaatgagaggggagagattaggttgtgttttttttttaaaaaattggattgagattatttttttgatttcgagtagtggggtgttggtgattatattattttaggttagatgtttaggttttagtatttaaatagttttattattttttttttaatattttttgttttggtgattagattggcggggttgttttgaggttaatttggttttttattgttttagttttatagtgtatgtattttttttagattatattttttagtgtttaggaggttggtttttgtttgatttttgagaaatttggttttgtatattattgttttagagaagggtttgttatttttaaggttttttgagtatggtagagttgtggagttttttgttttttgatatttatggagatgttatttttgaatagtgtttgtgttaagatgttggtttaagttatttttttcgttttttttttttagattttagtttttatttttttaggatttttgttttattttattttttatttagggattttttggtattttttgatatttttttaaatattttttttgtttttttttagtttattgggttatatagttttttttggtatttatttttagttagttttgagttttttggatttttttattttttgtgtttgtttcgtttattcgttttttttttttgtaatagtttagtttgtgtcggtatacggtatattttttttggtaatgggaatgtgaaattgaataagatatcgttttagatattttgatagaatgtggttttgggtgttgtgagatacgaaggagagaatagttatttgatggtggggagagaataggaaagattgtttaggagttgtaattgttgaggttagttttgaaatataagtagaggtttttataaggggagatagaattttaggtcgagggagtagtataaataaagatttagggttttaagagtgtgcgatatgttttagaattcgttacgttttatgtggttagagtataaggtataaaggaggcgggaggtggggaggggattgataggttatagaggtcggtttaagagggtttttgggtgtttgcgaacgagtgtaggcgttattcgaaaggtagtggtgagtttttttattttttgaattagggagtgatataatttggtttttatttttggaagattattgtggttttgggaggaggtagagttatttttttttttatttattttagtggttgtgagtttttttattggttaggaggagttatattgagtagattaatagttttacgtgaggtagatacgtgcgtagaaattttttttattttatagatgtgtgggtagtatagtattagtgtttgaggaattagagacgtagaaaggtgagttatggggtcgggcgcggtggtttacgtttgtaattttagtattttgggaggttgaggcgggtggattatttgaggttaggagtttgagattagtttggttaatatggtgaaattttatttttatttaaaagaaaaaaaaaaaaagaattataaaaattagttgggcgtggtggtgggtatttataattttagttatttaggaggttgtaggaggttgtagtgagttgagatcgtgttattgtattttagtttgggcgtatcgtatttggagagatgggtaagttttgtttaggtagttgtaagatttgtgtttagcgttgagaatatagagggaaggggggtagtggtgagttagggaaagaaagaattttttagtagaggaatagggagatagggaatttttagataagatattaaggagaaaggtttgtatagtgggaatgagaaagagtatagtgtagtgtttgttgggatggttagtgagggagaattgtttgttgggggaagggtcgggtagggtaagagaattagtgaggttatcgagggaggagagagtaatgtggtaggggttgtttgaaggagggtttgtatggagggtttaggatgagagagaagtgggtagtggttggttagggagaaataattgaaatcgggggttggtgagggtttagggagagagtatttttttttgggggttcgggaaggagagtagtagagtaattggaaggttagggagagtggggaggatggaatggggtcgagggtgggtttttgggtggcgggttggaaggatagttgggatttaaatggttgcggagaaattgatttacgaagggttgtgaggaggtagagggaggggtttggagggggagttgtttttgcggaataggacgtttttttatttgagaggtaggtggagtttgtttggggtattatgaggtatagtaacgtaattaaagtgttttttgatattggtagaggagatgttaaagcgaagtttggaggaaatggggattgatttatatatttatttagtaaatattaatggagtttttgttttgtgttaggattacgttaggtattaggtatattgtatttaattaaaaaggtaaaatttttattaatatggaaattataaattatagttatgaggagataattattagataaagtaaataataaattggtttgttagatggtgataggcgttggggaagagtttagggattgttgaggaggggcggaggtagtttgtggttttaaaatgggtgtttagggaaggttttattgaggttgtgatatttggttaaagatttgaaaggttgggtcggacgtagtggtttatgtttgtaattttagtattttgggaggtcgaagtgggcggattacgaggttaggagtttgagattagtttgattaatatggtgaagtttcgtttttattaaaaatataaaaattatttgggcgtggtggtgggtatttgtaattatagttatttaggaggttgaggtaggagaattatttgaattcgagaggtagaggttgtagtgagttaagattgtgttattgtattttagtttgggtaataagagtaagattttgttttaaaaataaataaatagataaataatttttaaaaaataaagatttgaaaggttgaggggtttaggggaaaggtttttatagtgatttaggatagggtattatgagggttggtagagggattagtgtttaaggggagttattttatggaaattgttattaagatgtagttttatttggttagagaagttatgaattgtagtcgagcgttttttttttgtgatttgttttttagtgttatgttttgtagggttggttttgtagtttatttgtttttgtttttatagtttttagtatggggtgggtttgggggttggttgagttgagtgatttatgggaataggaatatagtcggaggagtttatagtgatggggtttgggatggaagtgcggtcggagaggggtagttagtgattagtgtttaaaatatacgagtcggttttattttagtggtgtttttggtatagtaagtttcgggtggatgagttggggggtggggaggtatagagagttattgtgtggaggttttgttggtgggatcgagggtaggcgttagttgtgttattttagaaagtttagggtaggggatatagggatggggtgggttttagatttgggtttggattgtgatggggatgatagtgttgggatagaagttgaatttagttatttttataggatagagagttatgggtgttagtttgtttagtgtagggagatgaggaggtatagggtatagttttggggtagaagtagtgatgttgttgttttggattagaggtttaatagtatttttttttcgtattttatagg

SEQ ID NO: 122 - DNA, 12705 bp, Artificial Sequence
  chemically treated genomic DNA (Homo sapiens)
  unsure 5677..5678: n is a or g or c or t
tttgtggggtgcggaggggagatgttgttgagtttttggtttagaatagtagtattattgtttttgttttagggttatgttttgtgtttttttatttttttgtattaagtaggttagtatttatggttttttattttatgagaatgattgggtttaatttttgttttagtattattatttttattatagtttaggtttaggtttgaggtttattttatttttatattttttgttttgagttttttgggatggtatagttggcgtttgttttcggttttattagtaaggtttttatataatggttttttgtgtttttttattttttagtttatttattcggggtttattgtgttaggaatattattagagtgggatcggttcgtgtgttttggatattgattattgattgttttttttcggtcgtatttttattttaagttttattattgtaagttttttcggttgtgtttttatttttataaattatttagtttaattagtttttaagtttattttatattagggattgtgaggataggagtaaataagttgtagaattagttttatagggtatggtattggaaggtaggttatagagggagggcgttcggttgtaatttatggtttttttggttagatgaagttatattttggtgataatttttatgaagtagttttttttgggtattggtttttttgttagtttttataatgttttgttttggattattatgggagttttttttttgggttttttagttttttagatttttgttttttgggggttgtttgtttgtttgtttgtttttgagatagaattttgtttttgttgtttaggttggagtgtaatggtataattttggtttattgtaatttttgtttttcgggtttaagtgatttttttgttttagttttttgagtagttgtgattataggtgtttattattacgtttaggtaatttttgtatttttagtagagacggggttttattatgttggttaggttgattttaaatttttgatttcgtgattcgtttatttcggttttttaaagtgttgggattataggtatgagttattgcgttcggtttagttttttagatttttgattaaatgttatagttttagtgaagttttttttgaatatttattttaaaattataggttattttcgtttttttttagtaatttttaaatttttttttagcgtttgttattatttgataagttaatttattatttattttgtttaatgattgtttttttatgattataatttataatttttatgttggtgaggattttgtttttttggttaaatatagtatgtttagtgtttagcgtagttttggtatagagtaggaattttattaatatttgttgaatgaatgtatgaattagtttttattttttttaggtttcgttttggtattttttttgttagtgttagaaaatattttggttacgttattatgttttatggtgttttaaataaattttatttgttttttaggtaagaggacgttttgtttcgtaaggatagttttttttttagatttttttttttgtttttttatagtttttcgtgggttagttttttcgtaattatttgagttttaattatttttttagttcgttatttagggatttattttcggttttattttattttttttattttttttgattttttagttgttttgttgttttttttttcggatttttaagagaaagtgttttttttttggatttttattagttttcgattttagttatttttttttgattaattattgtttattttttttttattttgagttttttatgtaagtttttttttagatagtttttattatattatttttttttttttcgatggttttattgatttttttgttttattcgattttttttttaatagataatttttttttattgattattttaataaatattgtattgtgtttttttttatttttattgtatagatttttttttttgatgttttatttgagagttttttatttttttgtttttttattaaggagttttttttttttttgatttattattattttttttttttttgtgtttttagcgttgagtataggttttgtagttatttgagtagggtttgtttatttttttaggtgcggtgcgtttaggttggagtgtaatggtacgattttagtttattgtaattttttgtagttttttgagtagttgggattataggtgtttattattacgtttagttaatttttgtaatttttttttttttttttttttaagtagagatagggttttattatgttggttaggttggttttaaatttttgattttaggtgatttattcgttttagttttttaaagtgttgggattataggcgtgagttatcgcgttcggttttatagtttatttttttacgtttttagttttttagatattagtgttatgttatttatatatttgtaagatgaaaaaggtttttgcgtacgtgtttgttttacgtggggttgttgatttgtttagtgtgattttttttggttaatgagaaaatttatagttattggaataaatgaagaaaaaaatagttttatttttttttagaattatagtaattttttaaaaatggaaattagattgtgttattttttggtttagaaaatgagagggtttattattgtttttcggataacgtttgtattcgttcgtagatatttaagagtttttttaagtcggtttttataatttgttagttttttttttatttttcgttttttttatattttatattttagttatatgaagcgtggcggattttgaaatatgtcgtatatttttaaagttttgggtttttgtttatattgttttttcggtttggaattttgtttttttttgtgagaatttttgtttgtattttaaaattaattttagtagttatagtttttaagtagttttttttgttttttttttattattaagtgattgttttttttttcgtgttttataatatttagaattatattttattagaatatttgagacggtgttttatttaattttatatttttattattaaagagagtgtgtcgtgtgtcgatatagattgggttgttgtagaaggaaaggacggatgaacgggatagatatagggggtgggaggatttaggaagtttagaattggttgggaataaatattaagaaaggttgtgtggtttaatgggttggggaggagtaaagggagtgtttgggagggtgttagagaatgttaaagggtttttgagtgggaagtaagatgggataggaattttggagaggtgagggttgagatttaggaaaagggagcgagggaggtagtttaaattaatattttggtatagatattgtttaagagtggtatttttatgggtgttaggaagtagaagattttataattttgttatgtttagaggattttaaggatggtaaatttttttttgaagtagtagtgtatagagttaggttttttaaaggttaggtagagattaattttttaggtattaggagatatgatttgagaagagtgtatgtattgtgaggttgaaatagtgaagagttaagttgattttagggtagtttcgttaatttggttattagggtaggaagtattagaggaagaatggtgaaattgtttaagtgttgaagtttgagtatttagtttgaggtggtgtggttattaatattttattgttcgaggttaaaaagatgattttagtttaattttttaaagaaggaatataatttaatttttttttttttattggagttattaaaggatgtaaagagttaattgggttttggtttaaggtagggagttgggtaggggtttcggggtaggaagtgaaagaagtagttattaagtttgaagattttggtattagattataggggttggggttgagttttgtttaaagttaggagttgtttaatttgatagttttttatatgttaggtattgtgttagatataggggagagtgatgaagataaaagaaatggttttttttttggaggagtttttagtttagcgggaaatagttattgaataatttgttataatgtagtgtaatattaatatttagaatagtgtttggtatttatagtattttttatttgttgattgaatattatgaaggaggaagaggagggtattataggaatttggggtttattatagttaagatattagtaaaggtttgtttgagattaggatataattttttattggttattcgttttagaggttgatttttttttttgatttatagaggaaagggaagttatttaattgggtaatatttttaaatataaaaatttaattaaattttagtatttattttttttttttttttttaaaattaattgttttatttatgatttggattttttttatgatgtttttttaggaattttatattattgtttatttatttttttttttatatgattaattttttttttttaataggatttacggttttttaatttgatttgacgtttttttagatttatttattgttttttttttttttttatataggtaaattttttgagagagttgtttttatttattgttgttatttttttattttttatttattttttaattttttttaaatttgtttttatttttaatacgatttagtaatagtttttattaaggttaatatgatttttgtgttatttaatttaatagatatagtgttcgttttggttgtttttttagtagtatttgatttcgtgaattttttatttagtttttattcggggtttttatatttttatttttatattttttattttattttattttttatattttttgttattgtttgttgggtttttagatttttttgttggtttatttttttttattagttattatttgttggagttttttatggtttatttttatgttttttttttttttttattttataattagtataagtatttattaatgtttatagttttagttatatattgatgattttttaatttaaatttttattttagattttttatttgagttttagataagtatatttaattttttatttaatatttttatttggatgttttaagttaatagatttatttatgttttttatttttatatattaattggtttttttttaggatttcggtttatggaatgatagaatttattttattttgtgaatttgaagtaggggtatattttgatatgttttttttttgtatttgttatgtttaatttatttttaggtattgatgattttttttttgagaaaaatttttggattttatttattttttatatttattattattaaggataaagattttaagataaaatttttttttttttttttttgcgatggagttttgttgtgttatttaggttatagtgtagtggtaagatttcggtttattgtaatttttgttttttgggtttaagcgatttttttgttttagttttttgagtagttgggattataggtatatattattatgttcggttaatttttgtgtatttttagtagagatggggtttcgttatgttggttaggtcggttttgaatttttgattttaggtgattcgttcgttttggtttttaaagtgttgggattataggcgtgtagttagtgatnnttttaagattaaatttttaatatggtttaaattttttgtttagtttggcgtttgttttttttttttttgtttttggttttggttatattgttttgtagttttagtagtttttttttgatttttcgaagatatgtgttttttttttataaggtgtttgtatgtgatttttatgttttttgggatttttttttttattttttaagttgaattaatttttatttatttattatattttagtttaaacgttatgtttttagagaagttgttttttaattttttttttttattttcgagattagtttagttattgtttttgtgcgtttttaaggtattatatagtttttttttatggtatatattatatttgtaatgttatttttatttgattttttttttagattgttagttttaaggatttagttttttttgtttataattatatttttaggatataatatagtgtttggtatatattaggtgttgaaattatatttattgtatgaataagtgattggaagtattttttaaaggattattttgggtattgtgttgagaatagttaaagggaggtaggtaagagggtatgttattaaagtagttaaggaaaaaaaatggtggtggtttagattaattttggtggtagtgaggaaagagcgaaatgaatggatttgagaaatatttaggtagtggatgtgatagaatttggtgaaatgagatgtagagagtgagagaggggttaattttaagttttgtttatgattttagattggtaaagagttatttttgagattcgaaggaagaatagatttggaagtggggtatagagaaaattatagaagataatttagtttggaatttataggtttggaatttttgtttgttttttaaggagatgttaagagagtagttggatatatgagtttggattttaggaaagaagtttgggttggatatataaatttgggaattattagtatatatatgaaatttgaagttttgggagtagataaaatatttggggagaaagaatagatattgagagaagatagttcgggatagagttaagagttttattagtatttaaagagaggaggagaggaagtaaatgagattgagaagagtagataatgttgtagggtagaaagtaggaaaatgttttaaggagagtgagttgatatattttatcgaatattatttaaaggtaaaggagataatagtgtttattggagttttttataaggaggttttcggtgattttggtttagatagttttagtgggtgttagggatatagagtggagtgtttttaagaatgaatgggaagtaaggaaatgaagatagtaagcgttgattttgaagggcggagagagttgggattatagttagaggggtttagaatgtaagagatatataggttgatataaaataggttaggaattggtagtgggaaaattgtttttaattagtgtttttgttagtgttaggttttttggttgagttggggatatagtcgttttagggtatatttttcggtcgttgagggtaatagaatgcggtttgatagatttagggtttgggatttttgttggaatcggcgcggtttgttagtttattttattttacgtttttttttcggatttgggtttttttttttttaatatttattgtttttcgtttcgcgttttttatattcgtttttagttatttcgaggggtaggaggtaaagggtagcggaagggacggtgtgagggttcgagtggattttgcgatggtgggtatgagaggacggtttgcgggcgcgcggtggaagggcgattcggggatgggggatggggtcggtcgggggattcggtttgtcgtagggtaggggttatagggttcgtcggtcgttggtgatcgggacgtagttatcggggttgggtcggggtagggatattttttatttgcgcggtgaggtttcgggtttagatgacggaggtggtttaggttgcggggttcgggtttcgcgcggtttttttattataatatttttcgtttaggagcgcgcgggtcggggtcgcgtttcgagcggcggaggcgcgcgtaaggggagggggaggggcgttattttggggcgggcgcgggagcgagttcggcggtgcgtatttgtcgtagttttttggaggtttatattgcgggcggttttcggatttcggtgagtttcgcggtttagtttttttagtagatatttttgtagtcgattttttgggatattcgtttagcgcggcgtcgttttttattattattttatagatttattttcgcgtttcgtagcgttttggtttcgtatttacgtcgggagacgcgcggacgggttggagttcgaatggcggcggttgtgcggcgcgcggtcgcgcggggaaggattttcgggaggtattttgcgtcgtttttgttgtatcgttttttgacgttttggtggggaggttttgaggatatagcgttgtttataataatagttcgtatttattgattatttatatcgtgtcgggttttttattaaatcgttaacgcgtattaatttttatattagttttgtaaaattattagaattattatttttattttttagaggttgaggttaagattaagagaggtaaagcgatttgttcgtagttatagttagtgatgaatttagattggaatttcgatgttttttgatattgaaatatttttgttgttgagtataaagttgatattaaggtttggaaaatgttaagaatatattgtttttcggtagaaatttataaggaaggggatattgtgaatgaaaagtgtaaagatgtaaggaagatggtggggtgtaatatttattatagattttttttggatagtgggatatattttaatggttagattagtgatttagaggttattaaggataatgagaggttatattattatttagaaagtttttatatgttaattttttttaggtgtttaaaattaaagatatttaaatttgagttcgtttttttttttaaggtagggttttattttgttatttaggggtaagattatggttttttgaagttttagtttttagggtttagatttttttcgttttagttttcggagtatttgggttatagatatgtgttatcgcgtttggttttttgtattttagtagagagggggttttattgtgttttttaggttggtttggaatttttgtgtttaagcgatttttttatttcggttttttaaagtgttgagattataggcgttagatatagtgtttagttttaatttattgttttatttttttttattagttttttaaggagttttattggggtgaaaaagaattttttttaatatatataatataatatatattttatattggatataattttattttatttattttaatgaatgatattaattattggttttttaagttagaagttttaaagttatttttgaatatatttttattttatttgtggtaaatataaatgttttaattttttattatggtaaatttttaatatatattaaagtagatagaataatataatgaatttttatatatttattatttagttttaataattatgaatttataattaatagtttataatgatttgataaatgtttatgatatatgaattatgtattaggttttaagttaggttttagggatttaaagacgaattagatttgattgtattttatttggaggaaatgatatttgatttgggtttttgaaagatgaagaagaattatttagaagaataaaagtgtttttatttatttatttatttatttttttttattaaataattattatgtatgaggtattgtttttggtgttagtaataggttaagaaataagatatagtttcgttttttatatagtttgaaatttaataggggaaagagatattaaatatgtaattaggaatgtgatgagtgttttgaaggagatgtatcgggagttatgtgagtgggtttaatttggtttgggaagtttaggaggtttttataggaagtgataatttagtgagggaaagggatgaaggagttagaggttagttaggagaagagaaaagtattttaagtagtaggagaaatataggaaggttagtatgggtgttgatatagtttggatatttgtttttgattaaattttatgttgaattgtaatttttaatgttggaggtggggtttggtgggaggtgtttaggtcgtaggggtggattttttatggtttggtgttgttttttttatgatgagtgagtttttgtgagattcggttatttaaaagtgtgtggtatggttaggcgtggtggtttaggtttgtaattttagtattttgggaggttaaggtgggtagattaatttgagattaggagttcgagaatagtttggtttatatggtgaaattttatttttatttaaaatataaaaaaattagttgggtatggtggcgggtatttgtagttttagttatttggaaggttgaggtaggagaattatttgaatttaggaggcggaggttgtagtgaatcgagattacgttattgtattttagtttgggtagtagagtgaaattttattttaaataaataaataaataaataaatagtttatgggatttttttttttatatttttttgtttttgattagttatgtgggatgtttgtttttattttgttttttgttatgagtaaaagttttttgaggattttttggaagttaagtagatgttggtgttatgttttttgtatagtttgtagaattgtgagtcgattaaattttttttttttttttttttttttttgttttgtgagatagagtttcgttttgttttttaggttggagtgtagtggcgtaatttcggtttattgtaattttcgcgtttcgggtttatattatttttttgttttagttttttaagtagttgggattataggtatttattgttatgtttagttaattttttgtgtttttagtagagatggggttttatcgtgttagttaggatggttttaattttttgatttcgtgattcgttcgttttggttttttaaagtgttgggataataggtataagttattatatttggttttaaattttttttttttataaattatttagttttaagtatttatttatagtaatataagaatagtttaatagttgtgatagtggagaatggtataagatgaaataggaaggtgggaaagtgttagattaaggagggttttatatgttgagttaagggtttgatttttattttaagggtaatggaaaattatggaagggtttgaagtaggagaggggtatgtttatattcgtattttagaagatcgtttttagtttttgaggaagaatagataggtggaaagtaaaattggaagaatatagattagttaggaagtaagagattaggttaaagatgatgatggtttggattttggtggtgggattagggatggagaaaattgtataggtttaataaatatttaagaggtagaatttttagaaattagtgattagttggttgattagttatggaattgtagatttaaaaaatgatatttagatttatttttgagaaaatgaaaaaaaaaatttagaagtattatttatttatagatagtttattaaaatatttgtttttttaattttattgagtaggaaggttgtagtatttagggaaatttttttaggtaagaaggatatagattgtatgatgaggttgaagggaggattttaattagttagggatgtttatgtgtagtttatatgggtatttttttttttatgtatttgattcgtaggcgatttttttgaatttttgattttttttgaggtttgtaaagttttttgattaatggggaattaatttgtgttttttatttattttttttttattgtaatttttttttttttttgatgttttttatggtgtgggagtaattaatgaatagtttatgagttattttaaatgttgtatttggttttgattaatgtgggtttttttgaggtagtagattttgaaaattattattttggatttattaggaaaaaattgaattataagtaaatttatttagagttatttattaagagtagtggttttatgttatttggtttggtagtttagttaattagaattattaggtagttggtatttaagttatttatatgaaagtatagagtttttatttttattaaaagtaaagatatttttggaatgaaggtagttttattttttattatatataagtattgttttggtattgtaaatttttttatgattgatttgatatattttttttttttttgatggcggtttttatttggaaaatttataaggaataaagtttttttatatgttatatgaagtggaatttttaagttaaatttaagatttagtaaaaatttttttaatttaatatttttttttaatagaattatttttttgtttgtttattatgaagagatgggggttttattatgttgttttagtaggttaggaatttttgtatttaagtaatttttttattttggttttataaagtgttgggattataggggtgagtaattaagtttggtttaataggattattttaataattatttagaagagtatagagtgagaagagaaaaggattgagaattgaattttggaatgttagtgtttaggagttagtatagaaaaagatagttaagaagaaagttgagaattagtagaagggtaagagaaggattaggagagagtaatgttatggaagaaatttaagagaggaaagatttttaagggggaagaagtggttaataatattaaatgtagaaaagatttttaataaggttaaggtaaaaaaaaaaaaaaaaaaaaacgtattttttgaatttggtaatatggaggttatggatttttatgatttgatttgtattagtagaaaatgaaggtagaagttataatgtaatgaattgagtaaatggaaaatgaagaagtagaataaataagtg

SEQ ID NO: 123 - DNA, 5276 bp, Artificial Sequence
  chemically treated genomic DNA (Homo sapiens)
agtgtatgtattttttattattgtggattggaaaatatatttttagatatagagaagggaatttttaaatatatttaagatatagagttatattgagtttttgttgttatattttttttttttgtatatttttttttagaagatttaggtattatgaagggattgtgaatagtatgaagatggttgtggttagtgggagtttgaatggtaaattttatttaaaaatttatatttaaaaaatgaataaatattaattttagtaatgaaatttatattttataaaattataaagatgggttgtttaaaaagaagtgtaagagtgaagggatgttaagaaagataaagattaagatatagatatggtgatattttagagagtagttttaggtgaattttgaatttaaaagtgagattttagtgaggtaatatggtcgaggtgttttattaaatttaaaagtagaagataaaaaaaaatttagtagagatttttttttataaatgaattttgaaattaggaatagagaaatgagattaagaaaagatttttgtgtattagtatgatttggaaagtgattgataaatttgtgaagttgttagaattgtgaaggggagttaggagtttatagtagtttgagtttggtatttagagtttgaaagagttattttggtagaaaggttagttataattttaggtggatattgatttttttttgttgttggttgaaatgttattaggtaggtaataaagatatgatagttattttgttaagaagagataatttataaattgtgtgggaaatatgtattgaattttaagttttttgtggagaattttgtttttttttttttgttttttgttagaattattgaattttaggaaataaattttttttttttttttttttttattattttttgaaatttggtttttgatatgtttattttatgaaaattatttttttaaaggttacgattgaagtttttattgttaaatttagtatgtatttaatttagatttttttgatgtatttaatattattggatattgttttttggatatttatattgatttggtttttatgatattatacgttattttttttgttaaatataattttttgttttttatttttttttttatttgttatttttattttgtttttaatattatgaatgtgaatgtttttttaagttagtggttggttttttgattttttttttttttttttttttattgaaagataaaatttatttttgttttattattatttatatgttgatttttttgaaatttgtatttttaattttaagtggtcgttatatattataaattttttaagattttttttatatataagttatattattattttaaatttagtatttgaggaattaagtttattatttattttttattttttttaagtgaatatttttttaattgttttatttgtattggtagtattatattttttttttatatgatttgtagtaagaaatatggttttatattttatatatatatttttaatttttatttttgtttttttttgtatttataataagattttgttattagtttaagttgtgtatttttggttttatttaattatatattagagtgataattagttatttttgatgtatgtttttattgtttttttttatttaaatgtttttaaatttttttataattgatagaatatatagtaaataattttttattgaatataaattttgttttatttagtttttttttatttagttttttttattggttattgtgatttaatgttttttataaatatttgaggttttagaaattatttttaggttattttttaattttttaggtgatttttagttatattttatatttttgtttttttgaagtttcgagttagattttttttttgttattgttgatgtttttttttattatgttttttgagggtaaattttgttgtatgttaattaatgtagttaagataattttgtttgtggtatataggtggatttgtttttttttagtatattgtattttttttttttttagttttaatttttttatagttatttagataggagtcgttattttgatttgaatttttattggtaggatggtatttaggaggatttagtaatagtgaggattggtttattgtgaggattgtatttagttttgaagatttaggatttatttttttatattttgatattagaattttttttttttgtaataaaaataatttttagttttttttttgataatttttgaagtgtaggttgtttttttttaaggtttgagaagtatattttggggaaggaaattagataatagaattagattttatttttttttttttttttaattatattgtagattttattttttaattagggttttttttttatagtgtataatataatatttttatatttaattgtaaatttttgtatttggttttaatagttatttaaagtcgttatttttaagtttttttattatgagtttaaggttgtgttatttatttttaagatttgttttttaggtttattttttattagagaagattttttttgatattaatttgtaaattattttttgttaagataatgattatttatttatttatgaagaaaattagaagtatttggtaagttttgtgttttttgagttttatggtatttattaattaatatttggaaatgttagggaattgtatagtttttgggtttttaagaaatgttatttttttgtttttatttttagtattattttattatattatttaattgtattttattttttgttgttaataaattgttttttgtaaaaaaaaaaaatttttatataaagttgagttttttgattttataatatgtaatagtttttttttatgtgtaagaaaaattgttagatgaaattaatgatttaaatataaataagttttaatatttagatttagtttagaagggatttaagataaatataataatatttataatatgagatagatagtggtaatagttataaaggttttaaaatgatggtaataataattatttagatattgttttatgtattttatgtatattatagtattttatttatttttagagaaatattgtgaggtagatagttttatttttgttttatagagaaggaaattaaggtttagaggggtttagtgatttgtagaatagttagttattagtaaatggtaatattggaattttattttaaagtttttgattttaattttatgggaagtacgaaagaggggaaataatgtatagttgggataatagaaaagtttttatgaagtagattgttttttattttttatatttttgtataaatttaaggtatataagtttagttttattatatagatagtaataatataatagtgaagtttgggtttttattataattattatttaaataagtttgagattaatgtggaagaatggttggaatttttagaaataggaaaagaaaataagagagaaatttaagatagtatgaaggtattgaatagaagtaatgaaattaagaaagttaggaaggtataaagaataataattagaggtgtttgattggagaataggattagattttgagataatagttaggttagagttagattgtaaatggtattggtttttaagtaaatggtttgtatttaatttaggagttaatagatgtataattttaattttattattaatttatattgtgtaataagttagataaggttttataatttgggattttatttagagaaaaaaagtagagaatggaaattttttagggatgagaataggaaggatattttgaataatgatagagaaagtgtatttttggtggtagtgattgtgttattgaaaaggttgattaggtttgtggtgagttaatagaagagagagtgaataagaggttaaatagtaggatgagaaataagatattatataatttagggatgagagagaaagaaataatgtggttagaaagaagaattttagtttgatattttagaggtagagaaggtttgagtggtggttaataaattgtatagagagagaatgaaggagatatagaaagaatgaaggtggagatttttggggttgtgagagagttagtgattattgaatttttagtatttagtgtagtaattgagagttagtgaataaatgtattagtggggttattattaaagatggattagatatatatttaatgattaaggatttaaagaagaggagagaaaaatttggggagatgttgatatttttgtaggtagtatgaagtaattagaaaataagtcgtaatgagaaatggaaagatttaggataaggaagtattatgatatgtaaacgaaaaaaaagtattgagtagaagtagtagaaaaatattaagttttatggggatagaaagtttattttttaagtttttttttttttttagttttgtttggatgtattatttgatgttgaattagttaaagttgaaggtattttttagggtttttagtagaaagtagaattttagaatattttataaatataagataatttgagaattataaaagaaagaaaaggttttgtttttatagtttataagagggttgagtttagcgatatattttgtgtggtttaggagtttttggtagagtatagagttattagagaaggggtttagagagtagagagaggttttgttgatatggttagtttagcgttttattttatttataattttgttgttttgtaatgattttttttttagtaataaaatttgggttataggagttggagttttagttattatttgtttttaataaataatttttattgattttttagtttagggtttattatttttttatcgtaagcgttaggaggtagatttggaaaattatttatatattattggtgtttttttttttttatttttatttaaggtgtatataaattttgaataatttgaagtttaagggtatgaatattagacgttagggggatagttattgtgttgtttgttatttttattttggttattgtttttgttataatagttttaggttaggaatatgaataagtcgttgttttggatttttgtttttattagttttttggaagtttttgtttatataggtaaggaggtgaaggaatggttaagaattataaagtgagaaaataggttgaagttgagatattttttttttgtatttatattgaaggttattatttttttttttttatttcgtaga

SEQ ID NO: 124 - DNA, 5276 bp, Artificial Sequence
  chemically treated genomic DNA (Homo sapiens)
tttgcgggataaagaaagaaagataatgatttttagtataaatgtagggaaaagatattttagttttaatttatttttttattttatgatttttgattatttttttatttttttatttgtgtgagtaaaggtttttaggaggttggtgaggatagagatttaaagtagcggtttgtttatatttttggtttagggttgttatagtagaagtagtgattaggatgagggtagtagataatatagtggttgtttttttagcgtttgatatttatgtttttagattttaggttatttagggtttatatgtattttgggtgaggatgggggaggaagagtattaataatatgtgagtgattttttaggtttgttttttggcgtttacggtgaaggagtggtgagttttgagttggaaaattaatgggagttatttattagagataagtgatggttagagttttaatttttgtgatttagattttattgttgggaagagagttattgtagggtagtagggttatggatgggatgaggcgttaggttggttatgttagtagagtttttttttgttttttgggttttttttttgatggttttgtgttttgttagaagtttttgagttatatagagtgtatcgttgagtttagtttttttgtgggttatgggaataaggtttttttttttttttatagtttttaagttgttttgtatttgtaggatattttaggattttgttttttgttgaagattttaaaaagtgtttttaattttgattaatttaatattaagtaatatatttaggtaaagttaaggggaaagagggatttggagaataaattttttgtttttatgaagtttagtatttttttgttatttttatttagtgtttttttttcgtttgtatattatggtgtttttttattttagatttttttattttttattacgatttgttttttggttattttatgttatttgtagagatgttagtatttttttaagtttttttttttttttttttgagtttttggttattgagtgtatatttaatttatttttggtgatgattttattaatatatttatttattagtttttagttattatattaggtgttggggatttagtggttattggtttttttatagttttagagatttttatttttattttttttatgttttttttattttttttttgtatagtttattaattattatttaaattttttttgtttttgagatattaaattgaagtttttttttttagttatattattttttttttttttatttttgaattatatggtgttttgttttttattttattgtttagttttttgtttatttttttttttgttagtttattatagatttaattagtttttttaatgatataattattgttattaagaatatattttttttattattgtttaaagtattttttttatttttatttttggggagtttttattttttattttttttttttaaatggaattttaggttgtgaagttttatttggtttgttgtatagtataggttagtgataaagttgggattatgtatttattgatttttgaattaaatatagattatttgtttggaagttaatgttatttgtaatttggttttaatttggttattattttagaatttaattttattttttagttaaatatttttaattgttgttttttatatttttttggtttttttgattttattatttttatttagtgtttttatattgttttgaattttttttttattttttttttttgtttttaggaattttagttatttttttatattaattttaagtttatttaggtgatggttatagtaaaagtttagattttattattatgttattgttgtttatgtaataaaattaaatttgtatgttttgaatttatataaaaatataaaaaataaaaaataatttgttttatgaagatttttttattattttaattatatattattttttttttttcgtattttttataaggttaagattaaagattttgggatagaattttaatgttgttatttattagtggttgattattttgtaagttattaaatttttttgaattttagtttttttttttgtgaaataaagataaaattatttattttatagtgtttttttaaggataaatgagatattatgatatatataaagtatatggaatagtatttggatggttattattattattattttagagtttttatggttgttattattatttgttttatattatagatattattgtatttattttgaattttttttagattgaatttgggtattaggatttatttatatttagattattggttttatttaataattttttttatatatgaaaagaaattgttatatattgtggaattaaaggatttaattttgtgtgaggattttttttttttataagaaatagtttattagtaataaaaagtagaatataattgaataatatgataaggtaatattggaagtaggagtaggaaggtaatattttttgagaatttagggattatgtaattttttaatatttttagatgttaattaataagtgttataaaatttagagaatatagggtttattagatgtttttagttttttttataaataaataaataattattattttaataaaaaatggtttgtaaattaatattaaagagagttttttttaatgggagataagtttagggaataggttttggggataagtgatatagttttagatttatggtgggagagtttggagataacggttttagatagttgttggggttaagtgtaagggtttgtagttgaatatgaaaatgttgtgttatatattgtgaaaaggaaattttggttggaaggtagggtttatagtataattggaaaagggagaaaaagtggagtttgattttgttgtttagtttttttttttagaatatgttttttaggttttggaagagaatagtttgtattttaagagttgttaaagaggaaattgagaattatttttattgtagaaaggaaaagttttgatgttaggatgtaggaaaatgaattttgggtttttagaattgggtgtaatttttatagtgagttaatttttattgttgttggatttttttgggtgttattttgttagtgaaagtttaggttaaggtggcggtttttgtttggatggttatggaagagttgaggttgggggaagaaaagatatagtatgttgaagagaaataggtttatttgtgtgttataaatagagttgttttggttatattaattggtatgtaataaagtttatttttagagagtatagtggaagaaggtattagtagtagtagaaagaggatttgattcggagttttaaaaaagtagaagtatgagatataattggagattatttgagggattaaagaataatttaaagatggtttttgagattttaggtgtttgtagaagatattaagttatagtaattaatgggaaagattggataggaagagattgagtagaataagatttgtgtttagtaaagaattatttgttgtgtgttttgttagttgtaagggaatttgagagtatttagatggaaagaggtaatggaggtatgtattaagagtaattgattattattttgatatgtggttggataaaattaaagatatataatttagattgatggtagggttttattgtaagtgtaaaaaaggataaagatgagaattaaaaatatatatatagaatatggaattatattttttattgtaaattatgtggaaaaaaaatatggtgttgttagtatagataggataattgagaggatgtttatttggaggaggtggagggtaggtggtaaatttggttttttaaatgttaaatttgaaatgatagtatgatttatgtgtaagaaaggttttggagaatttgtaatatgtgacggttatttggaattagaaatataggttttagagaaattaatatataaatgataatgaaataaaaatgaattttgttttttagtggaaaagagaagagaggaaaggttagggagttaattattgatttgaggaaatatttatatttatggtgttagaggtaagataagaatggtaggtggggagggaggtgggagataaaaaattatgtttggtagagaggatagcgtgtggtgttatggaaattaagttagtgtaagtgtttaggaagtagtatttagtggtattaaatgtattagagagatttaagttgaatgtatgttggatttagtaataaaaattttagtcgtaatttttgaaagagtaatttttataaagtgagtatgttagaagttaagttttagggaatgatggagggagaaagaggaagggagtttgttttttaaggtttagtaattttgataaagaataaaaggagagaaataagattttttataggagatttgggatttaatgtatattttttatatagtttatagattgtttttttttgatagagtggttattatgtttttgttgtttatttaataatattttagttaataatagagaaaaattagtgtttatttgagattatgattgatttttttattaaagtagtttttttagattttaaatgttaggtttaggttgttgtgaatttttaatttttttttataattttggtagttttataaatttgttagttattttttaggttatgttgatatataagagtttttttttgattttatttttttgtttttaattttagggtttatttataaaagaaaatttttgttaagtttttttttattttttatttttaggtttagtgagatatttcgattatattattttattgaaattttatttttaagtttagaatttatttgaaattgttttttggaatgttattatatttgtattttagtttttattttttttgatatttttttatttttatatttttttttgaataatttatttttatagttttataaaatatagattttattgttgagattaatgtttatttattttttaaatataaatttttaaataaaatttattatttagatttttattggttataattatttttatgttgtttataatttttttataatatttgagttttttgggaggagatgtgtaaagaagaaaaatgtaatagtagggatttagtgtaattttgtattttgagtatgtttaaaagtttttttttttgtgtttaggaatatattttttagtttatagtgatagagaatatatgtatt

SEQ ID NO: 125 - DNA, 1062 bp, Artificial Sequence
  chemically treated genomic DNA (Homo sapiens)
tatatttagagttaggtgagtttgggagaaggtaggatttattagtttacggtttttaataaggtgttattgagaagttggtaaagttgcggggatagatagtttttgcggtaggtttggcgattgataagttcgggtagtattttaagagttggtattcgtttttttgtttcgtattttagggttttgtttcgcgtttttcgttcggattttggtttttttttttttcgtttgcgtggaattttttttagggtagggtttggtattgtgtagtgaatgtcggtttcgtggtggattcgaaggaattttatagttagttttagagtcgcgggagatttacgttgcggtcggtttcgtttcgtttaatttttatttttacgtttacgtttacgtttacgtttacgtttacgtttataggttttcggttttatatttttcgtagggttttaattcggattcgttcgttttgttttttatttttaaagatttattggttttatttttttcgggtttcgtttttcgcgtgtttgggttatgttcgttcgatcgcgttgttttcgttttgtagtatttttttaattttttttttcgtaggtttttttatttttttcgaagtcgggttttcgggtttcgtttttatagggtcgttttttttttttcgagatttaacgtttcgtttttcggtaagaggtttaggatttagtttacggtttcgttttttatttggttagttcgtttttggcgagatttttgtttttatttatttaggatttttcgtttttaggtcgggtttttttatcgttaaggttcgttttttgttaacggtttttatttattagtcgaaggtttcgttttttatagattgtcgtagggtaggggcggagatagttcgggtcgttttaggtttcgttttcggaagttttattttcgggcgcgagtacgtttcgtttcgtttcggcggtagagaggagattatggaacgttaggtgagggttcggttcgcggttttcgtggtttttgtagttcgggtcgggtttgattttggtgtgttttttgcgtagg

SEQ ID NO: 126 - DNA, 1062 bp, Artificial Sequence
  chemically treated genomic DNA (Homo sapiens)
tttgcgtaggggatatattagggttaggttcggttcgggttgtagggattacggggatcgcgggtcgagtttttatttgacgttttatagttttttttttgtcgtcggggcgaggcggggcgtgttcgcgttcggaagtgaggttttcgggggcggagtttgggacggttcgggttgttttcgtttttgttttgcggtaatttgtgaggggcggggttttcggttaatgggtgaggatcgttggtagggggcgggttttgacggtgagaggattcggtttgggagcgagaagttttgggtgggtgagagtaggggtttcgttaggggcggattagttaagtggggggcggggtcgtgggttgagttttgggttttttatcgaggggcgaggcgttggatttcggaggagagggggcggttttgtggaagcggaattcgggagttcggtttcggggagggtagaagggtttacgagagaaggggttgagggggtgttgtaaggcggaagtagcgcggtcggacgggtatggtttaagtacgcgaagggcggggttcgaggggaatgggattaatgagtttttgaggatgaagggtaaggcgggcgggttcggattggagttttgcgaggaatgtggagtcgggagtttgtgagcgtgagcgtgagcgtgagcgtgagcgtgagcgtgagggtgagggttgggcggggcggagtcggtcgtagcgtggatttttcgcggttttggggttgattgtagggttttttcgggtttattacgaggtcgatatttattatatagtgttaggttttgttttggagggagttttacgtagacgaagaagagaagggttagggttcgggcggagggcgcgaagtaaagttttggggtgcggggtagaggggcgggtgttaatttttagggtgttgttcggatttattagtcgttaggtttgtcgtaagagttatttattttcgtagttttattagttttttagtggtattttgttggggatcgtgagttggtgggttttgtttttttttaggtttatttgattttgggtgta

SEQ ID NO: 127 - DNA, 6681 bp, Artificial Sequence
  chemically treated genomic DNA (Homo sapiens)
gagaagtttagggaatgggatatttttaagaggaagtgtgttttagtgttagatgtaaatatttttattggttttagtaaaaaagttattggtgttattaatatcgaaagtagttttaagtgatgttgatttaatgagtaaatgggagagggaaaatggagatattaattatatatatatgtttagtttgtttggttgtgaagagaaggggtgatatagggtagttgttagagtggaaagtgtggttgaaagaggattttttttttttttttttgagatagagttttattttgttatttaggttggagtgtagtggtgtagtttcggtttattgtaatttttatttttcgggtttaagcgatttttttgttttagttttttgagtagttgggattataggtgtatgttattatattcggttaattttttgtattttttttagtagagacggggttttatcgtgttagttaggatggttttagttttttgatttcgtgatttattcgttttagttttttgaagtgttgggattataggtatgagttattatattcggtcgaaagagaattttaaaaattttttttatttgaaagttgagatagatttaagtatggttatgtgaaaggaaaaaggttagtcgagagtgataggaatgagagttgaagtaatgaggggatgggattaagaataagatttttgaggtagtaggatagtgtaggattttataagggggtaagtttttaattgagatagtaagtaggttgtgagttaaaacggtttggatatgagaacgtgagaaggtttttgtttaatgatgttttttttttttgagaaatagaaggtaaagtaattgattgaaaatgagatggagtgtagtggagaaatttgaggaaggtgttgaaggtttagaagaggtgtatagggtatgggttagggagttgagtttattgttaagggatggtagaggagttttaagtgatgttggttttagtttgtagggttgtatttaggtgttggaaatgattaggatagaggttgaagtgatttagggttgatattttggtatatttgtgtatatttattgtatagttgttgtttaaatttttataaatatatgttttgttggagtgtagtggtgtgattttggtttattgtaatttttatttttcgggtttaagtgatttttttgttttagttttttgagtagttggaaatataggtgcgtgttattacgttcgatggtttttttttttggatttttagtagagatagggttttattatgttggttagtttggtttcgaatttttgattttaagttatttgttttttttggttttttaaagtgttgggattataggcgtgagttattacgtttgatttaaagtttttttaggataagatttgtgtaaggggtttgtaaatttaaatggaggtgatataaatgagaaaaatttttagtgtttttttttttttttttttttttttttttgagatagggttttgttttgttatttagtttggagtgtagttatgtagttttatattgtaagttttgttttatgggtttaagtgaattttttgttttagttttttaagtagttgggattataggtaggtgttattatgtttggttaatttttgagtttttttgtagagatggtgttttgttaagttatttagtttgaggttggttttaaatatttgggtttaagtaatttatttattttagttttttaaagtgttgggattataggagtgagttatggtatgaggttttgtggggtgttttttttaaatgaaagtatattttgtttacgtatttgatatgaaggaatattttttttttttataaagataaaaattattttattttttttaaaatatatgttttttttttttattttttatttttgttatttttgatggatatatgtgttatattgattttatttttttataattttgttgtaagaaaaataatagtgttagtttaatgataaatagtaatagtttgttattgttagattgttattgttagtggagattattagaatagttagttttagtgttagggaattaaagagaatatgttttttttttaaagggtatagttgttgtttagttttagttgattgttgttttgtaggattataggtttagtgttgttagattttttgatgttttaagagaagtttggaatttagaatgtgatgggaagttttttatatttaaatatgttggtaattaatggtaagatttaaaaatattgtggtttaagaaaaaaatggatttggaaattggattaaatttaaatgaggtatgtagattaatttatagtatggtataatgtgaattttttggtttttttaattgtattgtaattaggtaagatgttagttttggggaagttaagtgtagagtatgtagaaattattatttttgtaagttttttttaagtataaataaattttaaaataaaaataaaaatttagtaaagaattataatgtaattttatgtaagttaaatataatatgttttttagtttgaaatttttgggttttattttattttattttatttttgagatagagttttgttgtgttatttaggttggagtgtagtggtattatttcggtttattgtaatttttattttttaggtttatatgatttttttgttttagttttcggagtagttgggattataggcgcgtattattatatttagttaatttttgtatttttagtagagatgggggttttattattttggttaggttggttttgaatttttgattttaagtgatttatttgttttggttttttaaaatgttgggattataggcgtgagttattgtattaggtagaggtttttgttttttatttttttttggtttttatagtgtttagtaaagtatttgatatatggtaaacgattagtaattattagtattttattttggagaaaatgattttttaaaaagttattgtgttttatttatgagtcgtttgagttttaaaattgtttttttgtttgtttttgaataggtttataaaggaggaaaacgattttttttagattttttttttagttttttttataaattaaaatattttaaaatggagatttaaaatttttaaagggatttagtttaatttcgggaggtagttttgtgtatgggtaaataaattaagtattaattggtgttttattatttaaagaatgttaattttataaatatgatcgagttatataaggtatattataatgagtttgattttgaatttgatttgtggaaataaaggaaaagtgattttagttggggtatattgttaaagtattttttttagagttggttaggtagttttttattggtatatttttttattatgtagaatagaaatagtatttgtgtttgggaaagattttaaaatgagtgatagttatttggaataaagagttaataattaatttattgtaaattaaagaaatatgtagatgaaagttttgatatattaaaatatttttatagtgataaagaaaaattaagaataaagttttttgatatgtgtaataaatttagaggaagtaaaaagataaatgtgatgattggttaagaaattatttagttatttataaggttattgatattttaaacgtttaaaagtttgtttaaatgggttgttatcgttgagaatgatgaggatgagaatgatggttgaaggttatattttaggaaatgaagaaatttagaaaattaatataaagatagtgatgaatataaagaagatttttataataatgtgtaaaatttttggttagggaaaggaatattgaagttagatataattatttatttttgagggaaaataattgttggtaatgagatgtgatgttttttttgttttttggaaataaagtattgaagtttgtagttgaaaagtttaacgtttgtgagatttaggaaattatgtttgtaaatttttggtaaaaaaaaaaaaaaaaaaaaaaaaaagttatagtgatttgtttattggttattgttagtattatcgatttagaatttttttattaatggttagtaaattataattgagaaattttgaattttgataaggtttttgttgttgaaatggtaaatttattattttttttgttatgataaattttggtttaaggtatgttatttatgaaataatttttgattaaaattaaattgatgtaatttgattatttattttagtttatagatggtatttggtaatttttgattgttttaaaaaataaatttattattagagtagatttgatgttggttttagaaatatttagaaaaataaaagtttaaaaatgtttttaggaggtgataagttgaataattttataatgttagttttttgagggggataaaaaatttaaaatttttgaaaggttttattttatagttatatttaaattattttaagaaaatttttaataaagggaatgaaatatatattatgattttgtttttttaaaagtaatttgaatatagtaatgaagtttagttttgttattggtagtttgggtagagtttttttttgtagtatttgttgtttattataattatagaggatatttttatgttttagttaagtatattattagaataaaaaaatttaatattgagttgttttaatagtatgaaattgagtttaaaagattaaatgaataaatatattaatttttgattatttattttaaatagaatatttaattgtgtaagatttaatagtattattatatttaagtaattatatttttgatgatttatgggaaataattattatttaattaatattgaaattaggttttaagatgtgttagttagttttgttattagtaaatttttttatttggagagaaattttagattgttttgttttttttattagaaggattgtagaaagaaaaaaatgattaattggagaaaaattggggatatattatattttattgaatttaaaatgtttttagttgtaaattttattattattttacgtatttttaagaaataaaagtgtttttaattaaaatatgatgttattaattatgaaatattttttgataatagaagttttaaaatagttattttagaattagtgaaatatggtaatgtattattttttttttttgagttaggttttgtgttttttttttttggttattaaattttataatttttaaaaagtaaaataaatatattttgaatatttttgttgtgaaatatttgatagtagagttttttattatgaaaagaagttttatgagttatatattatatttttgggttgattgaatgttattgaaatattttagtagtttggagaagttgatttatttgtggagatgtttgttattaaatggtattttgatggtttaatatatattatttttttgtgaagggttttaatttttaatatagtttattttgtagtattatgtttatattgtatgtataaagattatataaaggtgtaattgtgtattttttttttaaaatgtattagtataggatttagaatttttatgttgaaattttaaatgtatagaaataaaaataataaaaaattttttattttggttttttagtttagtattaaaattgataaaagtaaagttatgtataaaattatttttttagagaaaggttagtttttttttttttttatttattttattatgaatatagtagaaaatagtatatttttattaaatttgatgaaaagcgttaatacgtttgaattgaaatacgatttgttatgtgaattgtatcgaatgtttacgtattttattttttttgttggggtttttgttttagaaaggagttttgttcgtgttggtttttattatattggtgtgaatgataaggttaaatgtttttgttgtggtttgatgttggataattggaaaagaggagatagttttattgaaaagtataaaaagttgtattttagttgtagattcgtttagagtttaaatttcgttaataatttggaagttattttttagtttatttttttttttttagtaataaattttatatatttattattttcgggtatagaaaatagtggatattttcgtggtttttatttaaattttttattaaattttgtaaattttagagtaaattaagatttttttgttttgatgagaagtttttattattgtgtaatgaataacgaaaatgttagattatttattttttagatatggttattgatttttttgtcgttaatagatttggtaaaagtaggtttttattatataggatttggagatagagtggtttgttttgtttgtggtggaaaattgagtaattgggaatcgaaggataatgttatgttagaatatttgagatatttttttaaatgtttatttatagaaaattagttttaagatattttaagatatatagtttttaatttgagtatgtagatatatgtagttcgttttaaaatattttttaattggttttttagtgttttagttaattttgagtagtttgtaagtgcgggtttttattatgtgggtaagaaattgaatttgttaattaaaaaaaatatattttattttatatattttagtgggtaaattatgtgtatttataagttttggtttaaaattaattttagg

SEQ ID NO: 128 - DNA, 6681 bp, Artificial Sequence
  chemically treated genomic DNA (Homo sapiens)
tttaaaattaattttagattaaaatttatgaatatatataatttgtttattaaaatgtataaaatgaaatatattttttttaattagtagatttagttttttatttatataataaaaattcgtatttgtaagttgtttaggattaattagaatattagagggttagttaaagaatgttttaaagcgggttgtatgtgtttgtatgtttagattagaaattgtgtattttgaagtgttttgaagttgattttttataaatgggtatttgggaaaatgttttaggtgttttgatatagtattatttttcggtttttaattgtttaattttttattataggtaaagtaagttattttgtttttaggttttatgtagtaaaagtttgtttttgttagatttgttggcgatagaaaagttaatggttatgtttgaaaagtaagtaatttggtattttcgttatttattgtatagtggtaggaattttttattaaggtagaaaaattttgatttgttttggagtttataggatttgatggagagtttgaataagagttacggaaatatttattgttttttgtattcggaagtaatgagtgtgtggaatttgttattgaagaaggaaaagtaggttgagaggtagtttttaagttgttaacggaatttagattttgaacgaatttgtagttaggatataattttttatgttttttagtaggattgtttttttttttttagttatttagtattaggttataatagaagtatttgattttgttatttatattagtgtaatagaaattagtacgagtaagatttttttttgagataggaattttagtaggaaaagtggaatacgtagatattcggtatagtttatatgataagtcgtattttagtttaaacgtgttggcgttttttattaaatttgataagaatatgttgttttttattatgtttataatgaaatgaatggggaagaaaagggattagtttttttttagggaggtagttttgtgtatggttttgtttttattagttttaatattaggttgaaaagttaaaatgaaaaattttttattatttttatttttatgtatttagagttttaatatggagattttaaattttatattgatatattttaaggaagaaatatataattgtatttttgtataatttttatatatataatgtaaatatgatgttatagagtaagttgtgttgaaaattaaaattttttatagaagagtgatgtgtattaagttattaggatgttatttaatggtaggtatttttataggtaggttaatttttttaggttattagaatgttttagtggtatttaattaatttaaagatgtaatgtgtgatttatgaagtttttttttatggtggaaagttttgttgttaagtgttttatagtaaaaatatttagaatatgtttattttgttttttggaaattgtgaaatttagtggttaggaaaaaaaagtataagatttaatttaaaggaggaaaataatatattattatattttattgattttaagatggttattttaaaatttttgttattaagaagtattttataattaatgatattatattttaattagaagtatttttattttttagaggtacgtaaaataatggtaagatttataattgaagatattttgaatttagtgaaatatgatatatttttaatttttttttaattagttatttttttttttttataatttttttaataaggagaataaaataatttaaaatttttttttaaataaagagatttattagtaataggattggttaatatattttaaaatttggttttaatattaattaaataatagttattttttatagattattaggaatatgattgtttaagtataatgatattattagattttatataattaaatattttatttaaaataaataattagagattaatgtgtttgtttatttggttttttggatttagttttatgttgttgaagtaatttaatgttaagtttttttattttaatagtatatttggttagaatatggaaatgttttttgtaattatggtagataataggtgttgtaaaaagagattttgtttaaattattaataataaaattgaattttattgttatatttaggttatttttggaaaaatagaattatgatatatattttattttttttgttaaaaatttttttaagataatttagatatggttgtaaaataagattttttaaagattttaaattttttgttttttttaaagaattaatattgtagagttatttaatttattattttttgaaaatatttttgaatttttgtttttttaaatgtttttgaagttaatattaaatttattttgatagtggatttattttttaaaatagttaaaagttattagatgttatttgtaggttaagatggataattaaattgtattaatttagttttggttagaaattattttatggatagtatattttgaattagaatttattatgataaaaaaaataataaatttattattttaatagtagagattttgttaaaatttagaattttttaattatgatttattagttattagtaaagaggttttgagtcgataatattagtaatgattaataagtaagttattgtggtttttttttttttttttttttttttttattaggggtttgtaagtatggttttttggattttatagacgttgggttttttaattgtaaattttaatgttttgtttttagggggtaggagaaatattatattttattattaataattatttttttttaaaggtaagtaattgtatttaattttaatatttttttttttggttaaaaattttatatattgttataaaaattttttttgtatttattattgtttttatattaattttttaagtttttttattttttaaaatgtaatttttaattattatttttatttttattatttttagcggtaatagtttatttaaataaatttttggacgtttaaaatattagtggttttgtaaataattggataattttttgattaattattatatttatttttttattttttttaaatttgttgtatatattaaaaagttttgtttttgatttttttttgttattgtagaagtattttaatgtgttaaaatttttatttgtatgtttttttaatttgtagtggattgattattagttttttgttttaaataattgttatttattttaaaattttttttaaatataggtattatttttattttatataatgggagaatgtgttagtaggagattgtttggttaattttgaaaaaaatgttttaataatatgttttagttagaattattttttttttatttttataaattaaatttaaaattaaatttattatggtatattttatataattcgattatgtttataaaattagtattttttggatagtaaaatattagttaatatttaatttgtttatttatgtataaaattatttttcgagattagattaagtttttttaaggattttaggtttttattttgagatgttttgatttatagaagaaattgaaaaaaaaatttagaagaagtcgttttttttttttgtaaatttgtttaaaaataaataaaaagatagttttaaaatttaaacgatttatggatggaatataatgattttttaaaaaattattttttttaaaatagagtattagtaattattgatcgtttattatgtattaggtgttttattaggtattgtagaggttaaaaagagataaaaaatagaggtttttgtttggtgtagtggtttacgtttgtaattttagtattttgggaggttaagataagtggattatttgaggttaggagtttaaaattagtttggttaaaatggtgaaatttttatttttattaaaaatataaaaattagttgggtgtggtggtacgcgtttgtaattttagttatttcggaggttgaggtaggagaattatgtgagtttgggaggtggaggttgtagtgggtcgaaatagtgttattatattttagtttgggtgatatagtaagattttgttttaaaaataaaataaaataaaataaaatttagaggttttaaattggaagatatattatgtttggtttatatagaattgtattatagttttttattaagtttttatttttattttgaaatttatttatatttagagaaagtttataaaaataatagtttttgtatattttgtatttagtttttttaaagttaatattttatttaattatagtgtaattaaagaaattagaaaatttatattgtattatgttgtagattaatttgtatgttttatttgaatttaatttagtttttaaatttattttttttttggattatagtatttttaaattttattattaattgttaatatgtttaaatgtaagagattttttattatattttagattttaagttttttttgaaatattaaaagatttagtaatattgggtttatagttttgtagggtagtaattagttaaagttgagtagtagttgtgttttttagagagggaatatgttttttttgattttttgatattgggattgattgttttggtagtttttattaatagtaatagtttagtaataatagattgttgttatttgttattgaattggtattattgttttttttatagtagaattatgagaaagtgaaattaatgtaatatatgtgtttattaaaagtaataaaaatgaaaagtagagaaaaaggatatatgttttgagaaaaataggataatttttgtttttgtggaaaggaaggatatttttttatattaaatacgtaaatagagtatgtttttatttaaaagagatattttataaggttttatgttatggtttatttttgtaattttagtattttgggaggttgaggtagatggattgtttgagtttaggtgtttgagattagttttaaattgggtgatttggtaaaatattatttttataaagaaatttaaaaattagttagatatggtggtatttgtttgtggttttagttatttgagaggttgaggtaggaggtttatttgagtttatgaggtagagtttgtagtgtgagattgtataattgtattttaaattgggtgatagagtaagattttgttttaaaaaaagagagagagagagaaagagagatattgagagttttttttatttatattatttttatttgagtttgtaaattttttatataaattttattttaaagaagttttaggttaggcgtggtggtttacgtttgtaattttagtattttgggaggttaaggaaagtagataatttgagattaggagttcgagattaggttggttaatatggtgaaattttgtttttattaaaaatttaaaaaaaaaaattatcgggcgtggtggtacgtatttgtatttttagttatttaggagattgaagtaggagaattatttgaattcgggaggtgaaggttgtagtaagttaagattatattattgtattttagtaaggtatatatttgtggaaatttaggtaataattatataataaatatatataaatatgttaagatgttaattttagattattttaatttttgttttaattatttttaatatttagatgtaattttgtagattgggattagtattatttaagatttttttgttattttttagtaataggtttagttttttagtttatgttttatgtattttttttaaatttttaatattttttttaaatttttttattgtattttattttatttttagttaattattttgttttttgttttttaaagaaaagagatattattgagtaggaatttttttacgtttttatatttaagtcgttttggtttataatttatttgttgttttagttaaagatttgtttttttatgggattttatattgttttattgttttagaaattttgtttttaattttatttttttattgttttaatttttatttttgttattttcgattggtttttttttttttatataattatgtttaaatttattttaatttttaaatgaaagaaatttttaaaattttttttcggtcgggtgtggtggtttatgtttgtaattttagtattttaggaggttgaggcgagtggattacgaggttaggagattgagattattttggttaatacggtgaaatttcgtttttattaaaaaaaatataaaaaattagtcgggtgtggtggtatgtatttgtagttttagttgtttaggaggttgaggtaggagaatcgtttgaattcgggaggtggaggttgtagtaagtcgagattgtattattgtattttagtttgggtgatagagtgagattttgttttaaaaaaaaaaaaaaaaaatttttttttaattatattttttattttagtaattattttgtattattttttttttttatagttaagtaaattggatatgtgtgtatggttaatgtttttatttttttttttttatttatttattaagttagtattatttaaaattgttttcggtgttaataatattaatggtttttttgttaaaattaatggaaatgtttgtatttgatattgggatatatttttttttagaaatgttttattttttgggtttttt

SEQ ID NO: 129 - DNA, 7049 bp, Artificial Sequence
  chemically treated genomic DNA (Homo sapiens)
ggatttaaagatattttagaaatttttgaggtagttttttttattataggttagaggtttaggaggaaagaattattttaggggttaggtatagggtattgtttttttgtttagttttaggattttattttttgtattttggttattttagttttatttatggtttatagggttataggtatagtttaagttgttattttggaaagtgtaaattattgtaagttttggtagtttttatatggtgttaaggttgtaggtgtataaaatgtaagagtaaaggaggtttggtaatttttatttagattttagaggatatatggaaaagtttagatgtttaggtagaagtttgtagtagggatagagtttttatagagaaatgttattagggtagtattgagaggaaatgtggggtttgagattttatagagtttttagtaggatattgtttagtggagttgtaggaagagggttacgaatttttagatttgagaatggtaaagttatagtagtttgtaagtttagtatgaaaaagttataggaatttaattttagtttattagagtagttataaattgtattttgtaaagttataagggtaaagttgtttaaggttttgggaatttatattttgtattagtatgtttaggatataggatatggaggtaagggaaattattttggaatttaaagtttaatgtttattttgttgggttttagatttgtatggggttaattgttttttttttttggttgattttttttttttggaatagagtgtttatttaatgtttttattattattgtattttgggtgtaaataatttgttttgattttataggtttgtaggtaaaaagaatttaatttgagatttagatgtgattttggatttttgattgaattgatgttggaatgaggtaaggttttgggggattgttagaaaggatgaatgtattttataatgtgagaaggatatgagatttgaggggttagaaggggaatgatatggtttgggtgtttgattttttttaattttatgttgaaatgtaatttttaattttggaggtggggttaagtgggagatattggattatgggggtagatttttgatgaatggtattatttttatgatgagtgggtttttattttgttagtttatttgagatttggttatttttaaaagggtatggtatttttttttttttttttttgtttttgttttttttatgtgatatgttggatttcgattgttttttaatatgattgtaatttttttgaggttttattagaagtagatgttagtattatgtttttttaaagtttgttaaattatgagataattaaatttttttttattgtaaattatttagtttcggggatttttttatagtaatgtaagaatagattaatgtatatgttaagtgaatttttatttagaatagattaaaaaaattagatattaaaattatttgattaagatttgttttttaaggtggttgaataagaagagtttcggtttgtagtttttagtatgatcgatgtagaagatgggtgatttttgtatttttaattgaggtatttggtttatttaattgggattggttggatagtgggtgtagtttacggagggcgagttaaagtagggtggggtattgttttattcgggaagtacgagagattgggggattttttttttttagttaagggaagttaggatagaatgtatttggaaaaataggatattttcgtttaaatattgtattttttttaaggttttagtaattggtagataaggagatttttttttgtgtttggtttagtgggttttatgtttatggagttttgtttattgttagtatagtagattgagattaaatagtgaggtggtagtttggttgggggaggggtatttgttattgttgaggtttgagtaggtaaataaattagttaagaagttcgaattgggtggagtttattgtagattagtaaggtttattgtttttatagattttatatttgtgggtagggtatagttgaataaaagatagtagatagtttttgtagatttaaatgtttttgtttgatagttttgaagagagtggtgatttttttagtatggtgtttgagttttgagaaagtatagattatttttttaagtgggtttttgtgtagtttaattgggaggtattttttagtaggggataatagatattttatataggtgggtgtttttttgggatgaagtttttagaggaaggattagggagtaatatttgttattttttaatatttgttgttttgtagttttcgttggtgatatttaggtaaatagggtgtggagtggatttttagtaaattttaatagatttgtagttgagggatttgattattagaaggaaaattaatatatagaaaggaatagtattaatattaataaaaaggatatttatattaaaattttatttgtagattattaatattaaagattaaaggtaaagggatggaggaagatttattatgtaaatggaaaataaaaaaagtaggggttgtaattttagtttttgaaataatagattttaaagtaataaagattaaaagagataaagaaggttattatataatggtaaagggatgaatttaataagaagagttaattattttaaatatatatgtatttaatataggagtatttagatttataaagtaaatttttagagatttataaagagatttagattttttatataataataatgggagattttaatattttattgttaatattagaaagttttatgagatagaaagttaataaggatatttaggaagtgaatttagttttgtattaggtagatttaatagatattaataggattttttattttagattaatagaatatatattttttttagtattatattatatttattgaaaattgattgcgtagttggaagtaaagtattttttagtaaatgtaaaagaatagaaattataaattgttttttagattatagtgtaattaaattagaatttaggattaagaaatttatttaaaattatttaaattatatggaaattgaataatttgtttttgaatgattattgggtatataataaaatgaaggtagaaataaagatgttttttgaaattaaagagaataaagatataatatattagaatttttgggatatatttaaagtagtgtgtagagggaaatttatagtattaaatgtttataagagaaagtaggaaagatttaaaattgatattttaatattatagttaaaagaattagagaaggaagagaaaatatatttaaaagttagtagaaggtaagaaataattaagattagagtagaattgaaggagatagagatataaaaaaatttttaaaaaaattaatgaatttaggagttggttttttgaaaatattaataaaattgatagattattagtaagattaataaagaagaaaagagagaagaattaaatagatgtaataaaaaatgataaaggggatattattatcgattttatagaaatataaattattattagagaatattataaatatttttatacgaataaattagaaaatttagaagaaatggataatatatttttttaagattaaattaggaagaattggaatttttgaatagattaatattaggttttgaaattgaggtaataattaatagtttattaattaaaaaaatttaggattagacggatttatagtcgaattttattagaggtataaagaggagttggtagtattttttttgaaattattttaattaatagaaaaagaggtaattttttttaatttattttatgaggttagtattattttaatattaaagttaggtagagatataataaaaaaagagaattgtagattaatatttttgatgattattgatttaaaaatttttaataaaatattggtaaattgaatttagtagtatattaaaaagtttatttattacgattaagatagttttatttttgggatgtaagattggtttaatatatgtaaattaataaatataatttattatataaatagaattaatgataaaaattacgattatttgaatagatgtagaaaaggttttcgataaaatttaatagttttttatgttaaatatttttaataaattaggtattgatggaacgtattttaaaataataagagttatttatgataaatttatagttaatattatattgaacgggtaaaaattggtagtattttttttgaaaattggtataagatagggatgtttttttttatcgtttttatttaatatagtgttgaaagttttggttagggtaattaggtaagagaaagaaataaagggtatttaattaggaaaagaggaagttaaattgtttttgtttgtagatgatatgattgtatattttgaaaattttatcgttttagttttaaatttttttaagttgataagtaattttagtaaagttttaggatataaaattaatgtgtaaaaattataagtatttttatatattagtaatagatagagagttaaattatgagtgaagttttatttataattgttttaaagtgaataaaatatttaggaatttaatttataaggtatgtgaaagatttttttaaggagaattataaattattgtttaatgaaataaaagaggatataaataaatggaagaatattttatgtttatggatagaaagaattaatattatgaaaatggttatgttttttaaggtaatttatagatttaatgttatttttattaagttattaatgattttttttatagaattggaaaaaattatttttaagtttatatggaattaaaaaagagttcgtattgttaagataattttaagttaaagaataaagaattttatggagtgtaattttgtgtatgaattatatttttaaaatattgaagagtttttagaaagaaggttagtagagttgattattgatattttatgttaagtagtatttttttggtagtataatattttgttaggcgtttttgataatattagaaaggataagttttattttgtgataaattgattaatgtttataatatgattgataattatagttgaatagtttttaaatgatgaataggttatttagtttttaaatgtagtgtaaaaagtgtgttgtggaaattttatggttaattaagtttatggagaaaatatttttagttgattaagaataatagtggtatataaagttaggaagaaagttaatatgatgttgtaggaaatggaaataaatataaatgatatttaataaagatagagtttatagtttttgaattttaagttaaatttatttgatattaagtattatagtaggtataggtttaataaagtttgtgggtattgattttttttaaaagttgttagttgaagtaatttagtttatttaagtaaatattatgatgataagttgtgtgaatttagtttttaaatagtgtgattatatgaaggttttaattatttttgtttattggaataaaatgagattttttgggttgttatgttaaagtgtttatagggaaagaagtttgtatataattttttattttgtggtataattagtaattggtttgttatttaggttttatagtttgtaattaaatataaataaaaggtataatttaggtattttatagttgtttagaattttgttaatataaatttttgtgaaaaattaaggagttttaatatttttagaagtgtatttattttttagggttttaagttagtattatttaagattatgaataaatagtatttaggttatttgaaagagttattataattttaaagagttgtgttttaagtagtattttggtaatttagagagatatttattttatttgaatataaattgagataaatttagtaaagaaagtgtagtaaattttatataagagtttattattgatttttttttgtggtaaaaattttagtttatgtgaagaaattttatgtgaatgttttagttattaaatagtattgttatttatttatgtataaaattgttttttaaagattttttttaggtttttcgtattaaaatattaagagtataatggaagatagtacgattttgttagattggataaatagtaataaataaaaaatgaagtatgattttttttgtgaattttatagaatgtttatatatttaatttttttcgtcggggtgtttgttttagaaaggagttttgttcgtgttggtttttattatattggtgtgaatgataaggttaaatgtttttgttgtggtttgatgttggataattggaaattaggagatagttttatttaaaagtataaatagttatattttagttgtagttttatttagaatttggttttagttagtttgggatttatttttaagaatacgtttttaatgagaaatagttttgtatatttattattttttattttggaatatagtagtttgtttagtggtttttattttagtttttttttaaatttttttaattttagagtagttgaagatatttttttatcgaggattaatttttatagttatgtaatgagtattgaagaagttagattttttatttattatatgtggttattaatttttttgttattattagaattggtaagagttggtttttattatataggatttggagatagggtagtttgttttgtttgtggtgggaagtttagtaattgggaattaaaggatgatgttatgttagaatatcggaggtatttttttaattgtttatttttggaaaattttttagaaattttgaggtttagtattttaaatttgagtatgtagatatatgtagttcgaatgagaatatttatgtattggttatttagtgttttagtttagtttgagtagtttgtaagtgttggtttttattatgtgggtaagaagtaaataattatatattttattattttattttaatttatatattagaatatacgtgtttttaatatttagtttttttttttttgaagg

SEQ ID NO: 130 - DNA, 7049 bp, Artificial Sequence
  chemically treated genomic DNA (Homo sapiens)
tttttaggaaaaaaaagattaaatattgaaaatacgtatgttttaatatgtaaattaaaataaaatgataaaatgtatagttatttgttttttatttatataataaaaattagtatttgtaagttgtttaggttgaattggaatattagatggttagtatataaatgtttttattcgagttgtatgtgtttgtatgtttagatttgaaatgttaaattttagagtttttagagaattttttaaaaatggatagttgggaaaatgttttcggtgttttgatatagtattattttttggtttttagttattgagttttttattataggtaaagtaggttattttatttttaggttttatataataaaaattagtttttgttaattttgatggtgataaaaaagttaatggttatatatggtaggtaagaaatttggtttttttagtatttattgtataattgtaggggttagttttcgatgaagagatgtttttaattgttttagaattaagagggtttggagaaaggttggagtaagaattattgaataagttattatgttttaaggtgggagataatgaatgtgtaaaattgttttttattggagacgtatttttagaggtggattttagattagttgaaattagattttgaataaagttatagttaggatatagttgtttatgtttttgaataggattgttttttagtttttagttatttagtattaggttataatagaagtatttgattttgttatttatattagtataataaaaattagtacgagtaagatttttttttgagataggtatttcggcggggaaagttgaatatgtagatattttgtagagtttataggaaaagttatattttattttttgtttgttgttgtttgtttaatttgataagatcgtgttattttttattatatttttaatgttttgatacgagggatttgggaaaagtttttgggaggtagttttgtgtatgagtaggtgatagtattgtttgatagttaaaatatttatatgaaatttttttatatgaattaagatttttattataaaaagaaattaatgatagatttttatgtagaatttattatattttttttattggatttattttagtttatatttaggtaggatgagtatttttttgaattattaagatattatttagaatataattttttggggttgtagtaatttttttaggtaatttaagtgttatttgtttataattttgagtaatattaatttaaagttttgaaaggtggatgtatttttgaaaatattaaaattttttgattttttatagagatttatattaataaaattttaagtaattatagaatatttaaattatgttttttatttatatttggttataagttatgaagtttgaataatagattaattattgattatgttataaggtaaaaaattatatgtaggtttttttttttataagtattttaatatgataatttaaaaaattttattttattttaataaataaaagtaattaaaatttttatatggttatattatttaaaagttaagtttatatagtttattattatagtatttatttaagtgggttaaattattttagttgataatttttgggggaagttaatatttataagttttgttgaatttgtgtttgttatagtgtttgatgttaaatgaatttggtttaaagtttaaaaattgtaaattttatttttgttaaatattatttgtatttgtttttattttttgtagtattatgttgattttttttttaattttgtatattattattatttttgattaattgaaggtattttttttataaatttagttagttataaaatttttatagtatattttttatattgtatttaaaaattaaataatttgtttattatttaaggattatttagttataattattagttatgttgtaaatattaattaatttattataagataaaatttgttttttttagtgttattagaaacgtttaataaaatattgtattattaaaaaagtattgtttagtataaagtattagtaattaattttattagttttttttttgaaaattttttaatgttttaaaaatataatttatatataaaattatattttatagaattttttgttttttggtttaggattgttttggtaatgcgggtttttttttggttttatatgaatttgaaagtagttttttttaattttgtgaagaaagttattggtagtttgatggggatggtattaaatttataaattattttggggagtatggttatttttatgatattgattttttttgtttatgagtatggaatgtttttttatttgtttgtatttttttttattttattgagtagtggtttgtagttttttttgaagaggttttttatatgttttgtaagttggatttttaggtattttatttattttgaagtaattgtgaatgggattttatttatgatttggttttttgtttgttattggtgtataggaatgtttgtgatttttgtatattgattttgtgttttgagattttgttgaagttgtttattagtttaaggagatttggggttgagacgatggggtttttaaaatatatagttatgttatttgtaaatagggataatttgattttttttttttttaattgaatattttttattttttttttttgtttgattgttttggttagaatttttaatattatgttgaataggagcggtgagagagggtatttttgttttgtgttagtttttaaagggaatgttgttagtttttgttcgtttagtatgatattggttgtgggtttgttataaatagtttttattattttgagatacgttttattaatatttagtttattgagagtgtttagtatgaagggttgttgaattttgtcgaaggttttttttgtatttatttagataatcgtggtttttgttattggttttgtttatatgatggattatgtttattgatttgtatgtgttgaattagttttgtattttagggatgaagttattttgatcgtggtggatgagttttttgatgtgttgttggatttagtttgttagtattttattgaggatttttggattaatgattattagggatattggtttataattttttttttttgttgtatttttgtttggttttggtattaggatgatgttggttttataaaatgagttagggaggattgtttttttttttattgattggaatggttttagaaggagtgttattagtttttttttgtatttttggtagaattcggttgtgaattcgtttggttttggatttttttggttggtaggttattaattattgttttaattttagagtttgatattggtttatttagggattttagttttttttggtttagttttgggagggtgtattatttattttttttagattttttagtttattcgtgtagaagtgtttatagtattttttgatggtagtttgtatttttgtgggatcggtggtgatattttttttattattttttattgtatttatttgatttttttttttttttttttttattagttttgttagtggtttattaattttgttgatatttttaaaaaattagtttttggatttattgatttttttgaaggtttttttgtgtttttattttttttagttttgttttgattttagttattttttgttttttgttagtttttgaatgtgtttttttttttttttttagtttttttaattgtgatgttagggtgttaattttagattttttttgtttttttttgtgggtatttagtgttataaatttttttttatatattgttttaaatgtgttttagagattttggtatgttgtgtttttgttttttttggttttaaagaatatttttatttttgtttttattttgttatgtatttagtagttatttaggagtaggttgtttagtttttatgtagtttgagtggttttgagtgagttttttaattttgagttttagtttgattgtattgtggtttgagagatagtttataatttttgtttttttatatttgttgaggagtgttttatttttaattgcgtagttagtttttaataagtgtgatgtggtgttgagaagaatgtatattttgttgatttggggtggagagttttgttgatgtttattaggtttgtttggtgtagagttgagtttattttttggatatttttgttaattttttgttttatggagttttttaatgttgatagtggggtgttaaagttttttattattattgtgtggggagtttaagtttttttgtaggtttttaaggatttgttttatggatttgggtgtttttgtattgggtgtatatatgtttaggatagttagttttttttgttgaatttatttttttattattatgtaatggttttttttgttttttttgatttttgttgttttaaagtttgttgttttagagattaggattgtaatttttgttttttttgttttttatttgtatggtagatttttttttatttttttatttttggtttttgatgttggtgatttatagatggggttttggtgtagatgttttttttgttgatgttggtgttatttttttttgtgtgttagttttttttttaatagttaggttttttagttgtaggtttgttggagtttgttggaggtttattttatattttgtttgtttgggtattattagcggaggttgtagaatagtaaatattggagaatagtaaatgttgttttttgattttttttttggaagttttattttagaggggtatttatttatatgaggtgtttattgttttttattgggaggtgttttttagttaggttatatagggatttatttgaggaggtagtttgtgtttttttagagtttaaatattatgttaggagaattattattttttttagaattgttagatagggatatttaagtttgtagaagttgtttgttgttttttgtttagttatgttttgtttatagatgtggagtttatagaggtagtagattttgttgatttatagtgggttttatttagttcgagttttttggttagtttgtttatttatttaagttttagtaatggtagatgttttttttttagttaggttgttattttattgtttgattttagtttgttgtgttagtagtgagtaaggttttatgggtatgagatttattgagttaggtataggagagaatttttttgtttgttagttgttaagattttgggaaaagtgtagtatttgggcgggagtgttttgtttttttaggtatattttgttttggttttttttggttagggaaaggaaattttttaatttttcgtgtttttcgggtgaggtaatgttttattttgttttggttcgtttttcgtgggttgtatttattgtttaattagttttaattagatgaattaggtattttagttggaaatgtagaaattatttattttttgtatcgattatgttgggagttgtagatcggagttttttttatttagttattttggaaaataagttttagttagatggttttaatgtttaatttttttaatttattttaaataagaatttatttaatatatgtattagtttatttttatattgttataaagaaattttcgaggttgggtgatttataatgaaaagagatttaattgttttatggtttggtaggttttaaggaagtatagtgttggtatttgtttttggtgaggttttagaaaggttataattatgttggaaggtaatcgggatttagtatgttatatggagagaataagagtaagaaagagagggaggaaatgttatgtttttttaaaaataattagattttaggtgaattaatagagtgagaatttatttattatgaaggtgatgttatttattaaagatttgtttttatgatttaatattttttatttggttttatttttaagattgaggattatattttaatatgagattaggaggagttaaatatttaaattatattattttttttttggttttttaaattttatgttttttttatattataaaatatatttattttttttaatagttttttaaagttttattttattttagtattaatttaattaaaagtttaaagttatatttgagttttaagttgagttttttttatttataaatttgtgaagttaaaataagttatttatatttaagatataatggtggtagaggtattgagtagatattttattttaaaagggagaaattagttaaaagaaagaggtaattggttttatgtaagtttgaaatttagtagggtaggtattaaattttaaattttaaaataattttttttgtttttatgttttgtattttgggtatattggtgtaagatgtgggtttttaaagttttgggtagttttgtttttatggttttatagaatgtaatttgtggttgttttaatgggttggagttaagtttttgtggtttttttatgttgagtttgtaagttgttgtggttttattatttttaggtttggaggttcgtggttttttttttatagttttattaggtagtgttttgttggggattttgtagggttttaaattttatatttttttttagtattgttttagtagtatttttttgtagggattttgtttttattgtaggtttttgtttgggtatttaggtttttttatatattttttggaatttaggtgggagttgttaagttttttttatttttgtattttgtatatttgtagttttaatattatgtggaagttgttaaggtttatagtggtttgtattttttaaagtggtagtttgagttgtatttatggttttgtgagttatgggtggagttggagtggttaggatgtagagagtggggttttaagattgagtagggaagtaatgttttgtgtttggtttttgaaataattttttttttttaggtttttgatttgtaatgagaggggttgttttaaagatttttgaaatgtttttaagttt

SEQ ID NO: 131 - DNA, 7990 bp, Artificial Sequence
  chemically treated genomic DNA (Homo sapiens)
gggaggttgagataggagaatggtttggatttgggaggcggaggttgtagtgagttgagattacgttattttattttagtttgggttataagagtaaaattttgttttaaaaaaaaaaaaaaaaaaagggagaaatagaaatttttgtgtcgtatatagatattagggttttgtatgtgtttttgtttttgtattttttatttttatatttttatattttcgttagattagttgttaattttttttttttggtattttttggtggttttttttacgtagttgattggattaaatgtatgtatatatatgtatattgtaaaattttatatattattattgtagaattttttaaattttttatttaaatatgtattattgtttgttggttttttttgttttattttttgtttttatagtgttatttttttaattattgttatttttaagatttttgattttttagtttttttatattaaaagttttttttgatattttttttttttcgtgtttttttgtttttttatttatttagtataaagtttgaagatgtttttatagagaagttttaaattattttagtatattttattgtatttatatttttttattttaaaaatttttttgttatttttgtttaatatttatattttatttttttttatatttttaatttatttgttttatatatatttgttttttgtggtattattttttttatttttattttatttagattttatatttttttattttattttattttttttgtttggtgtttttttttaaatttaaggtttttgttttttattagttatttttttattttttatttttaaattttggtaattttggttttttttttttttaaaaagtttatattttgttaatgtgtatatattgtttatttgagtgtttttaaataaatatttattttttaaaatagtgaaatttgaattattagtatggaaataatttttgggaagataagatttttatttaaaagttttaaattgagatttttttgtttatgttgaatgatggttttatttaatattttttgaaatagggtgattatttgaattatataaaattgtgaaatgagaatatttttgattttatatttttatttttttttttttttttgagatagagttttattttattatttaggttggagtgtagtggtagttttggtttattgtattttttattttttaggtttaggtgattttcgttttttggttttttaagtagttgggattataggtatgtgttattatattcggttaatttttgtagtttttggtagagatggggttttattatgttggttaggttggttttgaatttttgattttaagtgatttatttattttagttttttaaagtgttgggattataggcgtgagttattgtgtttggttatttatatttattttgattgatttgaaataaaatttaatattttagggaaggtaatttttatgtgttttgaattatattgagtattaattttttaggataattatagatttggaaaggtttaatttagttttttagtttatgttgaagtttttttaagtgataggaggaatttataatttataaggtaatttaatttatttggtgttattatcgattgttataaagtttatttttgggttaaaatttattatttatagttgtatttaatgattttaattttgtttttaagttatataaaatttggatttgttttttatatgataattttttagatattttaaggtagttagtttattttttttatttttttttttatagtttttttattttttgagataaatatttttcgttattttaattattttttatatggtattatttttattatttcgattgttttttaaggatgttaaattttgttaatgttttttttaaaatgtatttggaattggaaataatattttttggtagttgaattggatttggatgttgtatatttggatattaatgtagtttgaagttgttgtaagttttttagtcgatttgtaatgttggtttatgatgaatttgtaattaaataaaattttaaggttttaatttggaggattgtttttaagtgatttttttttaaattaagttttaatttttttttagttatgtaatagattttttttgtttgttttttgagacgttcgttttgtcgtttaggttggggtgtagtggtacgattttagtttattgtaatttttattttttgggtttaagtaatttttttgttttagttttttaagtagttgggattataggtattcgttattatgtttggttaatttttttttttttttttttatttttttttagtagagacggggtttttttattttggttaggttggtttcgaatttttgattttaggtgatttattttttttagttttttagagtgttgggattataggcgtgagttattacgttcggttttttttgagatggagtttcgttttgtcgtttaggatggagtgtagtggtatgattttggtttattgtaattttcgtttttcgggtttaaggtatttttttgttttagtttttcgagtagttgggattataggtatttgttattacgtttggttaatttttgtatttttagtagaggtgggggttttattatgttggttaggttggtttcgaatttttgattttaagttattcggttattttggttttttaaagtgttgagattataggtatgagttatcgtgttcggtttatgtattagatattttttaaaaattagatgtaagattttatatttatttttattaaattttattttattagtttattaggtagttttggttttttttttttttttttttttttttttttttttttttttgagatagagttttatttttgttgtttaggttggagtgtagtggcgcgattttagtttattgtaatttttgtttttcgggtttaagcgatttttttgttttagttttttaagtagttgggattataggtatgttttattacgtttagttaattttgtgtttttagtagagatagggtttttttttgttggttaggtcggttttaaattttcgattttaggtgatttgtttatttcggttttttaaagtgttgggattataggtgtgaattattatgttcggttgttttttttaagattagttaagtgtagagtgagaaggggggaaagagtagaataaggagtttgattagttttggtttttttgaattttgatttttgttatttagtttattgtgttgatttaataaagggttttgaagttaatgttggaatgtttttagatatataggaaatgataatttattaaaagttatggagattatattttaaaagttttatgtagatataatttagttgttgaggtatatgagttaatattattataaattgatatggttaggaaagattgaagtttattgttagtttgttttgtgttgaatattattttaaaagagattaaattttaaggtatattgtgttaatataaaggtaaaagagttggttaattttttttaagaaattaattaatggtagggcgcggtggtttacgtttgtaattttagtattttggaaggtcgaggcgggtagattatttgaggttaggagtttaagattagtttgattaatttggagaaatttcgtttttattaaaaaatataaaattagtcgggtatggtggcgtatgtttgtaattttagttatttgagaggttgaggtaggataattgtttgaatttgggaggcggaggtcgtatgaattagtattatattattgtattttagtttgggtagtaagagtaaaattttattttaaaaaaaaaaaaaattaattaatgtacgtataatatagagatagagttattgttattatttttttattttgtttttgataagtttatattgagtatgttattaggtaatgtgggagattttggagaattaggtttgttttataattagggttattatatattttagtttgtttggggtaattttgatttatgtttgttgttttagtgtgattattattagtgtaattttttattttgagaagtgtttaggtttggaggataaattatttttttaataattgatattttttttataatttaacgggttttttttagtattttatttgggttaaaattattagttgtaatttggtagttttaataagattgtagtaatatttattttttatttgaatagattgttatttgattaagggaagttaatagtaaaagtaattgtagggtatatgtatgttatgggtaaaaaaaaaaaagtaatagtaattaaggtttgtaggtatttagaattttttttgagttattttttagagggtagtgttatatatatatttgtaattatttagttataataaaaaaagggtttttatttatgtatgaaaattagaaatattttatatttttaaagaatatattggaattaatattatgattaaaatatattttgttaagtaaagagatattaaaaattaatttattaatattttgaatattttttaatttgtaaaaataattttgatgttttgaatatataatgatttattataataattatgtatagattttaataatttgtatattttatgtttttatgttttttttaattaatgatttgatatggttaataattataatatattttgtattatagtttatatatttatgtaaaataagtatttaaaaattattagttttattttgtttgtttaaatattattttttttaaaaagagaaaataaaaatgttagattttattttatgatttgaatgatgtggtaatgtcgaattttagtatttagaattagaatgttttttagcggtcgtgtagttatttttatgttataagtggataatttgttagtttttataataaaagtttgttgtttgtgttttatattttggattttttaatataatgttttttttttagaaaaggtggataagttttatttttaagagaagatgatttttaatagttttgaaggatttaaaatttgtgtatttgtagatattaataaggaagaagaatttgtagaagagtttaatagattaaaaatttttgttaattttttaagtggtagttttgttttagtattaatattggtacgagtagggtttttttatattggtgaaggagatatcgtgcggtgttttagttgttatgtagttgtagatagatggtaatatggagatttagtagttggaagatataggaaagtatttttaaattgtagatttattaacggtttttattttgaaaatagtgttacgtagtttataaattttggtatttagaatggttagtataaagttgaaaattatttgggaagtagagattattttgttttagataggttatttgagatatatgtagattattttttgagaattgggtaggttgtagatatattagatattatatattcgaggaattttgttatgtatagtgaagaagttagattaaagtttttttagaattggttagattatgtttatttaattttaagagagttagtaagtgttggattttattatataggtattggtgattaagtgtagtgtttttgttgtggtggaaaattgaaaaattgggaattttgtgatcgtgtttggttagaatataggcgatatttttttaattgtttttttgttttgggtcggaattttaatattcgaagtgaatttgatgttgtgagttttgataggaattttttaaatttaataaattttttaagaaatttatttatggtagattatgaagtacggatttttatttttgggatatggatatatttagttaataaggagtagtttgtaagagttggattttatgttttaggtaaattttattataaaattaataaatagttttttaagtatgttagggtttataaaaagtaaatagatgtttttagttttttgaattggtaaatatttaggtataatttggtatgattatatatatatttgtattatttcgtgaatttttatgttgaatttgtaatgtaattattgaatttatgtgaaaaagattattatattatgagttatgtttttttttatgtaattgtttttaggaagtagataatttgtaaaagatggtagatatttttaatagtaaaatgggtttaatagtaatattaattattatttattgagtatttattataagtgtttaatatatatattttatgtattttttttaagttttataatagttttgtttgtttgtttttgagatagagtttcgtttttgttatttaggttggagtgtaatggcgtgatttaggtttattataatttttatttttcgggtttaagcgatttttttgttttagttttttgagtagttgggattataggtatgtgttattacgttcggttaattttgtatttttagtagatatagggtttttttttgttggttaggttggttttaaatttttgattttaggtgatttattcgtttcggttttttaaagtgttgggattataggtgtatgtattatgtttggttaatttttgtatttttagtagagatagggttttattatggttaggttggtttcgaatttttgattttgtgattcgttcgttttggttttttaaagtgttgggattataggtatgagttattgcgtcggttatatgagtatttttaaatggattgtggtagatattttaggaagggttattggagtgattgtttttaaagatattttaaaaagttatattattatatatttgatttatttattttaagattgaataatgtttataaaatattggttatttcgaaagattttatttatgtattattatatagtaattttgaaggtttgtttagtgttatgtagttataaatttagagaaatttataattttattatgtagaattttaatgttattaatatttgaaatataatttgttttaaaattttatagtttgaaatagtaaggataatattggtggtttaaataatatattaaaaagaaagtatggtcgggcgcggtggttttcgtttataattttagtattttgggaggttgaggtgggtggattatttgaagttaggagtttaagattagtttggttaatatggtgaaatttcgtttttattaaaaatataaaaattagttgggcgtgatggtatgcgtttgtagttttagttatttgggagattgaggtaggagaattatttgaatttagaaggtagaggttgtagtgagtcgtgatcgcgttattgtattttagtttgggtaataagagtaaaattttattttagaaaaaaataataataattaataaataaataaataaataaataaataaataaatgaaaataaagtatgttaggtatagtggtttacgtttgtaattttaatattttggaaggtcgaggcgggtggattatttgaggttaggagtttaagattaggttggttaatatggtgaaattttatttttattaaagatataaaaaattagtcgggtgtggtggcgtatgtttgtaattttagttatttgagaggttgaggtaggagaatcgtttgaatttaggaggtaaaggttgtagtgaattaagattgcgttattgtatttcggtttggggaatagagttagatttagttttaaaaaaagaaagaaagtaataattttagtttttaatataaaatttgggtagttttatttttgttttttataaaaatattttatattgaattagtgaatttagtgtgtattttttttttaaaggataaaaattatatttgttatttagatgtgaatttgaatgttttgttttaagttgtgagatttttatgttttttagatgtgtttaatttttaggtgttaaatgaatatttttgtgtaagtttttaattgtataaatatatatatttttgtgtgttttcgtagg

SEQ ID NO: 132 - DNA, 7990 bp, Artificial Sequence
  chemically treated genomic DNA (Homo sapiens)
tttacgaaaatatataggaatatatgtatttgtgtaattagaagtttatataaaaatatttatttaatatttaaaaattaagtatatttaaaaaatatgaaaattttatagtttaaaataagatatttaaatttatatttaagtaatagatatgatttttattttttgaggaagaaatatatattaaatttattgatttaatgtgaggtatttttatagaagataaaaataaaattgtttaagttttatgttaaaaattaaaattgttattttttttttttttttgagattgagtttggttttgttttttagatcggagtgtaatggcgtagttttggtttattgtaatttttgttttttgagtttaagcgatttttttgttttagttttttaagtagttgggattataggtatgcgttattatattcggttaattttttatatttttggtagagatggggttttattatgttggttagtttgattttgaatttttgattttaagtgatttattcgtttcggttttttaaagtgttgggattataggcgtaagttattgtatttggtatattttatttttatttatttatttatttatttatttatttatttattaattattattatttttttttgagatggagttttatttttgttgtttaggttggagtgtaatggcgcgattacggtttattgtaatttttgttttttgggtttaagtgatttttttgttttagttttttaagtagttgggattataggcgtatgttattacgtttagttaatttttgtatttttagtagagacggggttttattatgttggttaggttggttttgaatttttgattttaggtgatttatttattttagttttttaaagtgttgggattataggcgggagttatcgcgttcggttatattttttttttagtatgttatttgggttattaatattgtttttattgttttaaattgtgaaattttaaaataagttatgttttaagtattagtaatattaaagttttatataatgaaattgtaagtttttttaagtttatagttatatgatattaaataaatttttaagattattatatgatggtatataaataaaatttttcgaaataattaatattttataggtattatttaattttaaaataaatgggttaaatatataatggtataattttttaaaatatttttagaagtaattattttaatggttttttttgaaatgtttattatagtttatttgaaagtatttatatggtcggcgtagtggtttatgtttgtaattttagtattttgggaggttaaggcgggcggattataaggttaggagttcgagattagtttggttatggtgaaattttgtttttattaaaagtataaaaattagttaggtatggtgtatgtatttgtaattttagtattttgggaggtcgaggcgggtggattatttgaggttaggagtttgagattagtttgattaatagggagagattttgtgtttattaaaaatataaaattagtcgggcgtggtggtatatgtttgtaattttagttatttaggaggttgaggtaggagaatcgtttgaattcgggaggtggaggttgtggtgagtttaaattacgttattgtattttagtttggataataagagcgaaattttgttttaaaaataaataaataaagttattgtgaagtttagagaaaatgtatgaagtatatgtattgagtatttatagtaagtgtttaataaatgatggttaatattattattagatttattttgttattggggatgtttattattttttgtaagttatttattttttaaaaataattatatgaagagaagtatgatttataatatggtagttttttttatataaatttagtagttatattataggtttaatataagagtttacggaataatatagatatatatataattatgttaagttatatttaaatatttattagtttagggggttaagggtatttatttattttttatgagttttggtatatttgggaagttatttattggttttataataaagtttatttaaagtataaaatttagtttttgtaagttgttttttgttaattgagtatatttatgttttaaaagtaaagattcgtgttttataatttgttatggatggattttttggaagatttgttgaatttgggaaatttttattagaatttatagtattagatttatttcgaatattaagatttcggtttaaaataaagaagtaattaggaaagtgtcgtttgtgttttgattaggtacgattataaggtttttaattttttagttttttattataataaaagtattgtatttggttattaatatttgtgtagtagagtttagtatttgttaatttttttggggttaggtgagtatagtttggttagttttgaaaggattttaatttagtttttttattatatatggtagggtttttcgggtatatggtgtttgatatatttataatttgtttagtttttaaaagatagtttgtatgtgttttagatggtttgtttaaggtaaaatgatttttgttttttagatagtttttaattttgtattgattattttggatattagaatttgtagattgcgtggtattatttttaagataaaagtcgttgataaatttgtaatttggggatatttttttgtgttttttaattgttgagtttttatattgttatttatttatagttgtatgataattaaagtatcgtacggtattttttttattagtataaagaaattttgttcgtgttagtgttgatgttgaaataggattattatttggaaaattagtaaaagtttttaatttattaaatttttttataaattttttttttttattgatgtttgtaggtatataagttttagattttttaaaattgttaaaagttatttttttttgaaaataggatttgtttattttttttaaaaagagaatattatattaggaaatttaaaatgtgaaatataagtaatagatttttgttataggagttaataaattatttatttatgatataaaaataattatacgatcgttaagaaatattttaattttaaatattagagttcgatattattatattatttaagttataaagtaaaatttagtatttttgttttttttttttgaggaaagtaatatttaagtaggtagaataaaattaataatttttaaatgtttattttatataaatatgtaaattgtgatgtagaatatattataattattaattatgttaaattattaattaggaaaaatatgaaagtataaaatatgtagattattaaaatttatgtataattgttataatgaattattatatatttaaggtattaaagttgtttttataagttaaaaaatgtttagaatgttaatgaattaatttttaatatttttttgtttagtaaaatatgttttaattataatattggttttaatgtgttttttaagagtatgaaatatttttgatttttatgtatgaatgagagttttttttttgttgtaattggataattatagatatatatgtaatattgttttttagagggtggtttaggaaaaattttaagtatttgtaaattttaattgttgttatttttttttttttgtttatgatatatatgtgttttgtagttatttttgttattaattttttttggttaagtaataatttgtttaaatggaagataagtattgttgtagttttattagagttgttaaattatagttggtaattttaatttagataaaatattaaaaggaattcgttaggttatgagaagggtattaattattagaaagataatttattttttaaatttggatattttttaaagtgaaaaattatattagtaataattatattgggataataggtataaattagggttgttttaggtaaattagagtatatggtaattttagttatgaggtaaatttggttttttagaattttttatattgtttgataatatgtttaatataaatttgttaaaggtaaaataagagaatggtaataatgattttgtttttatattatgcgtgtattaattgattttttttttttttgagatggagttttgtttttgttgtttaggttggagtgtaatggtgtgatattggtttatgcgattttcgttttttaggtttaagtaattattttgttttagttttttaagtagttgggattataggtatgcgttattatgttcggttaattttgtattttttagtagagacggggtttttttaggttggttaggttggttttgaatttttgattttaggtgatttgttcgtttcggttttttaaaatgttgggattataggcgtgagttatcgcgttttgttattaattgattttttgagaagaattagttagtttttttgtttttatgttgatataatatgttttaaaatttaattttttttggagtaatgtttaatataaagtaagttggtaatggattttagttttttttggttatgttaatttatagtggtattaatttatatattttaatagttgagttatatttgtataaaatttttggaatatagtttttatgatttttgatgaattattattttttatatgtttgaaaatattttaatattagttttaaggttttttgttgaattagtataataaattggatgataaaaattaagatttaaagaaattaaggttgattaaattttttgttttatttttttttttttttttattttgtatttgattagttttaaaaaaaatagtcgggtatggtggtttatatttgtaattttagtattttgggaggtcgaggtgggtaaattatttgaggtcgggagtttgagatcggtttgattaatagggagaaattttgtttttattaaaaatataaaattagttgggcgtggtggagtatgtttgtaattttagttatttgggagattgaggtaggagaatcgtttgaattcgggaggtagaggttgtagtgagttgagatcgcgttattgtattttagtttgggtaataagagtgaaattttgttttaaaaaaaaaaaaaaaaagaaaagaaaagaaaagaaaaaaattaaggttatttgataggttaatgagataaaatttaatagggataagtataaagttttatatttggtttttaaaaaatatttggtgtataggtcggatacggtgatttatgtttgtaattttagtattttgggaggttaaggtggtcggataatttgaggttaggagttcgagattagtttgattaatatggtgaaatttttatttttattaaaaatataaaaattagttaggcgtggtggtaggtatttgtaattttagttattcggaaggttgaaatagaagaatgttttgaattcggggagcggaggttgtagtgagttaagattatgttattgtattttattttgggcgatagagcgaggttttattttaaaaaaggtcgggcgtgatggtttacgtttgtaattttagtattttgggaggttgaggagggtgggttatttgaggttaggagttcgagattagtttgattaaaatggagaaatttcgtttttattaaaaaaaaataaaaaagaaagaaagaaaattagttaggtatgatggcggatgtttgtaattttagttatttgggaggttgaggtaggagaattgtttgaatttaggaagtggaggttgtagtgagttgagatcgtgttattgtattttagtttgggcgatagagcgagcgttttaaaaaataaataaaaaaaatttgttgtataattaaaagaagattgagatttagtttaagaagaaattatttaaaggtaattttttagattaaaattttgggattttatttaattataaatttattataagttaatattataagtcgattaaaaaatttatagtaattttagattgtattagtgtttagatgtgtaatatttagatttaatttagttattaagggatattatttttagttttaaatatattttggaagggatattaataaagtttaatatttttagggagtaatcgggatgataaaaatgatattatatgagaaatagttggaatagcgaaggatatttattttaaagggtggaaaaattgtgaggggaagggtagagaggatagattaattattttaagatatttaaaagattattatgtagaaaatagatttaaattttatatagtttgagggtagaattaaggttattaaatataattgtaaatagtagattttaatttaaggatgggttttataataatcgatggtagtattaaatggattgggttgttttgtagattatgagttttttttattatttaaaggaattttagtatggattgggagattgggttaaatttttttaagtttataattattttgaagaattaatgtttagtataatttaaaatatatgagaattgttttttttgaggtgttaaattttattttaagttaattaaaatagatgtaagtggttaggtatagtggtttacgtttgtaattttaatattttgggaggttgaggtgggtggattatttgaggttaggagtttaagattagtttggttaatatggtgaaattttatttttattaaaaattataaaaattagtcgggtgtggtggtatatgtttataattttagttatttgggaggttaagggacgagaattatttgaatttgggaggtggagggtgtaatgagttaagattgttattgtattttagtttgggtgatagagtgagattttgttttaaaaaaaaaaaaaaaaatagaagtataaaattaaagatatttttattttataattttgtgtagtttaagtagttattttattttagaaaatattagataaaattattatttaatatgagtaggagaattttaatttgaagtttttgagtggagattttatttttttagaggttgtttttatgttaatagtttagattttattgttttgaaaagtaaatatttatttagaagtatttaagtgaataatatatatatattagtagagtgtgagttttttgagaaggaggaaaattagaattattagagtttaagagtgaaaggtggaaggatgattgatgaaagatagaaattttgggtttggaggaaggtattaaataaaaagggtaagatagggtaaaaaaatataggatttaagtgaaatggaggtggggaaaatgatattatagaaaataagtatatatggagtagatgaattgagaatatagaagaaaatagggtatgaatattagataagggtgataaaaaggtttttgaagtgaaaaggtgtgggtgtaataaagtatgttgggataatttaaggtttttttgtgaaagtatttttaggttttgtattgggtaagtggaaaggtaggaaggtacggaaagagaaaaatgttaaagaaagtttttggtataaaggggttgggaagttaggaattttaagggtaatagtagttgggaaaatagtattatggaagtaaaaaatgggataaaaaggattagtaagtaatggtgtatgtttaaatgaagggtttgggagattttataatggtgatatgtaaggttttatagtatatatgtatgtatatatatttagtttagttaattgcgtaaagagagttattaggaggtgttaaggagaggaggttgatagttaatttagcgagaatgtgggaatgtggaggtgggggatatagagataaaggtatatataaaattttggtgtttgtatacgatataaaagtttttatttttttttttttttttttttttttttgaaatagagttttgtttttatggtttaggttggagtgaaatggcgtgattttaatttattgtaattttcgttttttaggtttaagttatttttttgttttagtttttt

SEQ ID NO: 133 - DNA, 5314 bp, Artificial Sequence
  chemically treated genomic DNA (Homo sapiens)
  unsure 17, 36, 247, 958, 1442, 1554, 1558, 1752, 2756, 2766, 2807: n is a or g or c or t
  unsure 2961, 3189, 3237, 3592, 3750, 4732, 4735, 4737, 5216: n is a or g or c or t
tagttttaggagggagntggcgtttatataggacgnaggggtttggtttgggtagaagagggtagagatttttttttggattgaatttaagggaggagtattttaggcgggagttgtaggaggttgtgttggtttttttaggggaagggaaggggagggaaagaaaattttattttaaaaaaaaaaaaagaaaaaagaagtttagaaattcgcggagatattattatattattttttttaggttggnagtgtagtggtttaattatggtttattgtagtttcgattttttaggattaagtgatttttttattttagtttttcgagtagttggaagtataggtgtacgttcgattgatttttttttttttttttagacggagttttatttttgttgttttggttggagtgtaatggtaggatttcggtttattgtaatttttgttttttagatttaagcgattttcgtgttttagtttttcgagtagttgggattataggtgtttattattatgttcggataattttttgtatttttaatagagatagggttttattatattggttaggttggttttaaatttttgattttaggtgatttatttgttttagttttttaaattgttgggattataggcgtgagttatcgggtatggttttttttggttaattttttaaatttttgatagagatggggttttagtgttgtttaggttgattttgaatttttagatttaagtgattttttttttttggttttttaaagtgtagaaacgataagtttaatttaaattttcgagagagaaaatatttttttaaacgagggtaatgtgaatttgaaatgttatttgaggaaagatttgttcgtttgatattttgtttgagtttgggtggataggatagtatttgttagtatcgggaagtattgtagatgggaagaggtttggttattttttaaangtggtaggagttggagggggtgagttgaaggtaaggagaaaggaggtggggatttaggagataggggttgcgtagcgggttcggggttgatatttttacggatatagtttattggggtttaaatataaaaggaatttaattattgtgggaggaaaagatttttttgtttttttgttttttttttttttttttttttttttttttttttttttttttttttttgagatagagttttgttttatcgtttaggttggagtgtagtggcgtgatttcggtttattgtaagttttgtttttcgggattacgttatttttttgttttaatttttcgagtagttgggattataggcgtttgttattatattcggttatttttttgtattttttagtagagatggggttttatcgtgttagttaggacggtttcgattttttgattttgtgattcgttcgtttcggttttttaaagtgttgggattataggncgtgagttatcgcgtttggtttttttttttttttttttttttttttcgagatagagttttatttttgttgtttaggttggagtgtagtggcgtaattttggtttattgtaantttnttatttttagggtttaagcgatttttttgttttagttttttgagtagttgggattgtaggcgcgtattattacgtttggttaatttttgtatttttagtagagatagggttttattatattggttaggttggtttcgaatttttgattttgtgatttgtttattttagttttttaaagttttgggattataggncgtgagttatcgtgtttagtttgatttttttgtttttttaaaaattatgttcgtttttttatagtttttttttgttatattaagtttatatcgtaggtttaatttgtttagtgaatgttatgtaaatattttatgtatttgttgatcgtaggaatgatatgtatttggtacgtattgatcgtatttcggggtgggagaagagagggtaaggaagtaaagaatagttttttttttttttggtgtatttttagatgtgtcgatggggtttaggttcgttgtagatggttttttttttagagataggggaggattttttatttattttttagtttttaggattattttgatttttgtttttaggtatttaagttatgcgtttagatatgcggatatatttaagttgggtatagtatagtagttttattttaggtagtttgaaattagagttggggtttaaagggattatatttcgagggattgtgtgggggtcggggtatataggttattgttttttttcgttttttttagttatttttgaagttagttttattttgttttttagggattttaaatgtgtagagattttggtatttttgtagaagttttttttggttttaatttatatttggatgttgtggggttgtagttgttgttcgggttcgggaggatgttgggggttcggtgtttatgagtttttgaagtttttggaattcggttttgagggtgtttaggtttaggtggatatttgggttgtttttgtttatgtatttgatgatattgtgtgtagaagtgaaaaggagttaggtcgggtatgttggtttatgtttgtaattttagtattttgggaggttgaggcgggtggattacgaggttaggagtttaatattagtttggttaagatggtgaaatttcgtttttattaaaaatataaaaaaattagtcgggtatggtggcgggcgtatgtaattttagttattgggggggttgaggtagagaattgttgngaatttaggnagatggaggttgtagtgagttaagattgtgttattgtattngtattttagtttggcgatagagtaagattttgttttaaaaaaaaaaaaaaaaagtgaaaaggagttgtttttttttttttttttgagggtaggtaattgttgcggttgttagtggaggtggtgcgtttttggtttgtgtttgggggttattttnagtagaggttatggtggtgttagggttcggttagcgagttaattagtaggatttaggggcgatttgttaaagttaattggatttgataattgtagcgaagttaagttttttgattttgatgattgtgttgtggttgtgtaagagaatgaagtatttcggggtagtatggtaatgtttttaatttataaacggtttaggtaaattatttatatatatatatatatatgntatgtgatatatatatatatagggatgtgtgtgtgtttatatatatgnaggggagagagattaggggagagaaagtaggttggggagagggagagagaaaggaaaataggagatagagagagagcggggagtagagagagggaaggggtaagagagggagaggaggagagaaagggaggaagaagtagagagtgaatgttaaaggaaataggtaaaatataaatagaaaatttgggtgaagggtatatgagtattttttgtattatttttgtaattattttttatttaaattgatatcgggtcgggcgtagtggtttatatttgtaattttagtattttgggaggtcgaggtaggtagattatttgaggttaggagtttgagattagtttggtaaatatggtngaaattttatttttattaaaaatataaaaattagtttggtgtggtggtgtatgtttttaattttagttattcgggaggttgaggtagaataatcgattgaattcgtggcggggaggaggttgtagtgagttgagattatgttattgtattttagattngggcgatagagcgagatttagttttaaataaataaataaatattaaaataaaaagttattgtataaaagaatgggggcggggtgggaggggtggggagaggttgtaaaaataaataaataaataaataaattttaaaatgaaaaagatagtggaggtattaggtttgcgtggggttggagggttaataaggttaggttttttatttttggttatagaattagagaagtgagtggatgtgatgtttagttttataagtgattttagaatattttgttttaaagtaaaggatatattgattttttttttaataggttgtaggatttattgttggtgggacgttttgttttgcgaagggaaaggaggagtttgttttgagtataggtttttattttttattgggttttttttagtttttttgtttttttattacggtagtggtttagtttttggtttttgattttagaaggtggtttttttggaaatttaggtcgtgtagttaacgatgtattcgtcgggatagcgatgtttgttgtattttattttttttttgtttatttgttttttatgttcgtttggagtagatgttttttgtagaggtggtattttgtaaagtttttttgtttgattttttttttttttttagattgagttttgtttttgttgtttaggttggagtgtaatggtataattttagtttattgtattttttgtttttcgggtttaagcgatttttttgttttagtttttcgagtagttgggattataggtatgtattattacgtttagttaatttttgtatttttagtagagataaggttttatcgtgatggttaggttggttttgaattttaggatttaagtgatgtttttgtttaggttttttaaagtgttgggattataggcgtgagttattgtattcggtttgtacgcgttttttgaaagtagtcgagggggcgttaggtgtgggtagggacgagttgngtngncggcgtcgttgggtgtatcgcgattacgggtagagttacgcggcgggaggattataattttcggtatatttcgcgtcgtttcgtttttatttttagaaggtcgcggggggtggatcgtttaagagggcgtgcgttttcgatatgtttcgcggcgcgttattaatcgttagatttgaatcgcgggattcgttggtagaggtggcggcggcggtatgggtgtttcgacgttgttttttgtttggtagtttttttttaaggattatcgtatttttatatttaagaattggttttttttggagggttgcgtttgtatttcggagcgggtgagattgttcggttttttggggttttttacgttcgttttgttttgtttttagcgaggttattgtgattgggtttcgggggtataagtcgttttttttttttcgttttgtttttagcgaggttattgtggttgggttttttgggtttaggtcggnttttttttttttgttttgtttttatcgaggtttttgtggttgggtttcggggtttcgggttgttacgtttatttacgagttgtgttgttttttgtaga

SEQ ID NO: 134 - DNA, 5314 bp, Artificial Sequence
  chemically treated genomic DNA (Homo sapiens)
  unsure 99, 578, 580, 583, 1565, 1723, 2078, 2126, 2354, 2508, 2549: n is a or g or c or t
  unsure 2559, 3563, 3757, 3761, 3873, 4357, 5068, 5279, 5298: n is a or g or c or t
tttgtaagggatagtatagttcgtgagtggacgtggtagttcggaatttcgaggtttagttataaaggtttcgatggggataaagtagggaggggaggntcggtttggatttaaggggtttagttatagtggtttcgttggggataggacggggaggggagggcggtttgtattttcgaggtttagttatagtggtttcgttagggatagggtaaggcgggcgtgggggattttaggaggtcgggtagttttattcgtttcggggtgtaggcgtagttttttaagaagggttagtttttgaatgtagagatgcggtggtttttgagaaagggttgttaggtagggggtaacgtcggggtatttatgtcgtcgtcgttatttttgttaacgggtttcgcgatttaaatttggcggttaatggcgcgtcgcggggtatgtcgggagcgtacgtttttttaggcggtttatttttcgcggttttttgggagtagaggcggggcggcgcggggtgtgtcgggagttgtagttttttcgtcgcgtggttttgttcgtggtcgcggtgtatttagcgacgtcgntngtntagttcgtttttgtttatatttagcgttttttcgattgtttttaaagaacgcgtgtaggtcgggtgtagtggtttacgtttgtaattttaatattttgagaggtttaggtaggagtattatttgagttttggagtttaagattagtttggttattacggtgaaattttgtttttattaaaaatataaaaattagttgggcgtggtggtgtatgtttgtaattttaattattcgggaggttgaggtaggagaatcgtttgaattcgggaggtagagggtgtagtgagttgagattgtgttattgtattttagtttaggtaataagagtaaaatttagtttaaaaaaaaaaaaaaagttagataggagagttttatagggtgttatttttgtaaaaagtatttattttagacgggtatgaaggataaatgaataggggagggatggagtgtagtagatatcgttgtttcggcgagtatatcgttgattgtacgatttgggtttttaggagggttattttttggagttaggggttagggattgggttattatcgtgataagaagataagggagttggggaaagtttagtggagggtgggggtttgtgtttagggtaaatttttttttttttttcgtaaagtagggcgttttattaatagtaagttttgtagtttattaaaaaaaaaattagtgtgttttttgttttggaatagggtgttttggagttatttgtggagttgggtattatatttatttatttttttggttttatggttagagataagaggtttggttttattagttttttagttttacgtaggtttggtgtttttattgttttttttattttggggtttatttatttatttatttatttttgtaatttttttttattttttttatttcgtttttatttttttatatagtaattttttattttgatgtttatttatttatttgaaattgagtttcgttttatcgtttnagtttggagtgtagtggtatgattttagtttattgtaatttttttttcgttacgggtttaatcgattgttttgttttagtttttcgagtagttgagattaaaggtatgtattattatattaggttaatttttgtatttttagtagagatggggttttnattatgtttgttaggttggttttaaatttttgattttaagtgatttgtttgtttcggttttttaaagtgttgggattatagatgtgagttattgcgttcggttcgatgttaatttaaataaaagataattgtaagaatagtataaagaatatttatatattttttatttagattttttgtttatgttttgtttgttttttttaatatttattttttgttttttttttttttttttttttttttttttttttttattttttttttttttttatttttcgttttttttttgttttttgtttttttttttttttttttttttttaatttatttttttttttttagttttttttttttntatatatgtgaatatatatatatttttgtatgtgtatatattatatgntatgtatatgtatgtatatgggtggtttatttgaatcgtttgtaagttgaaggtattattatattatttcgaaatattttatttttttatataattataatataattattaaaattaggaaatttaatttcgttgtagttattaaatttagttgattttggtaggtcgtttttgggttttgttgattggttcgttaatcgggttttggtattattatggtttttgttnggggtggtttttaggtatagattaaggacgtattatttttattggtaatcgtagtagttgtttgtttttaggagggaggaaaggaataatttttttttattttttttttttttttttgagatagagttttgttttgtcgttaggttggagtgtnagtgtagtggtataattttggtttattgtaatttttatttntttgggtttntagtaattttttgttttagtttttttagtagttgggattatatgcgttcgttattatgttcggttaatttttttgtatttttagtagagacggggttttattattttggttaggttggtattgaatttttgatttcgtgatttattcgttttagttttttaaagtgttgggattataggtataagttagtatgttcggtttaatttttttttatttttgtatataatgttattaaatgtatggataaggatagtttaggtgtttatttggatttgaatatttttaaaatcgagttttaggagttttaaaagtttatgggtatcgggtttttagtattttttcgagttcgagtagtagttgtagttttatagtatttaggtgtaagttaggattagaaggggtttttataaaagtgttagagtttttgtatatttgaaatttttgagaagtagagtgaggttgattttaggaatggttgagaaagacggggggaagtagtggtttgtgtgtttcgatttttatatagtttttcggggtgtggtttttttggattttagttttgattttaagttgtttggggtggggttgttgtgttgtgtttagtttgaatatattcgtatgtttagacgtataatttgagtgtttgaaggtaggagttaggatggttttggaggttggggagtgggtggaggatttttttttgtttttgggaagggggttatttgtagcgagtttgggttttatcggtatatttgaaggtgtattaggaaaggagggggttattttttgtttttttgttttttttttttttatttcgaggtacgattagtgcgtattaagtatatattatttttgcgattagtaggtgtatgaaatatttgtatagtatttattggataaattaggtttgcggtgtggatttaatatgataagagaaggttgtgagagaacgaatatagtttttgaaagggtagaggggttaggttgggtacggtggtttacgntttgtaattttaggattttgggaggttgaggtgggtagattataaggttaggagttcgagattagtttggttaatatggtgaaattttgtttttattaaaaatataaaaattagttaggcgtggtggtgcgcgtttgtagttttagttatttaggaggttgaggtaggagaatcgtttgaattttggaggtggnaggnttgtagtgagttaagattgcgttattgtattttagtttgggtaataagagtgaaattttgtttcggaaaaaaaaaaaagaaagaaaaaagagttaggcgcggtggtttacgntttgtaattttagtattttgggaggtcgaggcgggcggattataaggttaggagatcgagatcgttttggttaatacggtgaaattttatttttattaaaaaatataaaaaaatagtcgggtgtggtggtaggcgtttgtagttttagttgttcgggaggttgaggtaggagaatggcgtgatttcgggaggtagagtttgtagtgagtcgagattacgttattgtattttagtttgggcgatagagtaagattttgttttaaaaaaaaaaaaaaaaaaagaaagaaagaaaaagaaaaaaagaaaaggtagaaaggtagaagagttttttttttttataatagttgggttttttttatgtttgagttttagtgaattgtattcgtgggggtgttagtttcgagttcgttgcgtagtttttgttttttgggtttttattttttttttttttatttttagtttattttttttaatttttgttatntttggagagtgattaagtttttttttatttgtagtgtttttcgatgttggtaggtgttgttttgtttatttaggtttaaataggatgttaggcgaatagatttttttttaaatggtattttagatttatattgttttcgtttaaaaaagtattttttttttcgggggtttgggttgggtttgtcgtttttgtattttgggagattaaggagggaggattatttgaatttaggagtttaagattagtttgggtaatattgagattttatttttattaaaaatttaaaaaattagttaggaaaggttatgttcggtggtttacgtttgtaattttagtagtttgggaggttgaggtaggtggattatttgaggttaggagtttgagattagtttgattaatatggtgaaattttgtttttattaaaaatataaaaaattattcgggtatggtggtgggtatttgtaattttagttattcgggaggttgaggtacgagaatcgtttgaatttaagaggtagaggttgtagtgagtcgagattttgttattgtattttagttagagtaataagagtgagatttcgtttaaaaaaaaaaaaaaaaattagtcgggcgtgtatttatatttttagttattcgggaggttgaggtggaaggattatttgattttgggaggtcgaggttgtagtgagttatgattgggttattgtattnttagtttgggggggatagtgtgatagtgttttcgcgggtttttggattttttttttttttttttttttttgagatgaagttttttttttttttttttttttttttttagaaggattagtatagttttttatagttttcgtttggggtgttttttttttgaatttagtttaggaggaagtttttgtttttttttgtttaggttaagtttttncgttttgtgtggacgttantttttttttggagttg

SEQ ID NO: 135 - DNA, 3953 bp, Artificial Sequence
  chemically treated genomic DNA (Homo sapiens)
agtaggagggtaggagagaattttgtatagttggttacggtgttttatttaagggtttaatttggggttttattataaaagttgtagtaaaattgttaaaaataggaattattgggggtgggggttttgttttttttgtttagttattattttttttttttaatttttattttggtttatattacgtgtttttagaagaaacgttttgagtaggggttggtatgagattgtttttttttttaggatttatttttttttatgattaggttggtgattttttttttagggtgttagtgttatttattgagtagatgtttggtaggtgtttgttatgtgttagatttagtaggggatagagttttttcgatatagatggattagtatgtttggatataaattgtgaaaggagttgttaatttttttgtgtaaaatttatttttgcggttatcgttaatatttttatatatgttagggtatttagggttaggatttggtaattttgtttaggagtagtcgttttggagatttttaagacgagggaaagaaatgggtggaaataggggtttatattgtgggtttcgtagttattaaatagtttaattcgtggttattgagtgttttgaataatgtttggttggattttgagtttgagtgtgttattaatttagtttgttattgtcgttgttgttgttatgtatttttttattagttttgtttagaaagattttttttttttttaaaatattagtaaagggggtttagattagtttaagttaaatattttgtaataaaatggagtagttattttggtgaataagtatatttagaaaaggaaattgtttgtttggtaagatgttgtttaatagtattttttattttgatgtttcgtagtttttgagttaggaaattgagaagtttttgattagattgtaaaggttgtaggtttcgtaagggtgtaaggttatttttaaagaattagaagttaggtttttcgatttttatttttgttagcgttaaatagtaatcgttgaaggatgtagggtagttgtgagttgtagtttttttataggtaaaaattataagggtaaaatttggtttttagttttatagggatattttaagttgtgaaagtgttttggttataaagaattgcgtaaatgttaaatattaggtttagttataataattattttagtaataaattaaagagaagggtgaaatattggtaagtattttggagtttaattagtaagtttttgagatttttttatgtgttgattgggataaattttattttttaaaagaaaagacgtttttttggttcgagatatttgtgagttgttttagtaggggattagttatttttttattttttaaagttatagatagttgggatggttaagtaggtagtttaggttgatggtttattaaggttatttttttgtttatatagttttatagatatttggggttattttagttttagaaaagatgttttatattttagtaattgtaagttaaggataagtagagagatgtgggattgttgtttttatgtttgttgtagaagttgaggttttagatttgataaagtaagtgtagtgggaataagggaatatattattagaaattgggattttagaaaatagaatagttattgtttattaagtgttaggtatttttttaatagttttgtatatatgtttaaagtttatgtttaaaacgatataaatttattattttatagttatggaggatagaagtttaaaatgggttatattgggttaaaattatggtggtagtagagttgtgtttttggaggttgtagggaaaaatattttgttttttttagtttttagggaagggttgtttatgttttttagtttatggtttttttttagtagttacgagtttgatttttattgttatttttatatttttttttttgattttgaggttattgttttttttttgtataattaaggatttttgtgatgataatgggtttatttggagaatttaggttaattattttatttttaggtttttaattatattagtaaaatttttttttgttatggaaggtagtaaagttataggttttagggatgaggttgtggatatttttggggagcgttattttgtttgttatatagtaatttttgttataatttagggcgatggtatattttattattatttttaattagaaattgatgtgtggggaggtgatgtattataatttatttagggttaggtagttggatttgaatttgtttgatttttagatttgaggttttttggttttagaattttttttgaagtgaaaggtatgaggtcgattattttttgatttggtaaatagagatgttagtttggtttttagtgttagggagttttttggagtgatggtatagggtatatttttgttttgtattttaagtttagagattgggttttaggtttagttttttttttaattttttgagagatgatagtttttgggtaaagtttttttgtgttttttagtttttttatttgtgagatggtggtatggggagaggttggagtgatgttatagttttttttagtttgtattataggttttaggatttaggttttattagtaatttgttgggggaggtttgggttttttaggagaaatttgataagatggtgttgtaaatattaacggatatatagtattttatatttataggttgttttaggggtttttaataattttgattatttttgttttattttgtagatagaaaatcgaggtttagagagattatataatttgtttacgatttttttttagtaagatggaggttaagtgaaatgagaaagtaggttttttgttattttttttgtttagaggttttttttttatattagggttttttaagggttgagatttagttatatttgtgcgtgattaaatataagtgtgaataatgtaaagggagacgtttttaatttaaggggttttaattttgtaatgtaattttgagattatgtttttttttgttaaagttttttttttttgaagtgatggttattgtagatggtgagggttttttggaggcggataatatttttatatgataaaattaaaagttggtagtttcgaattgatttttggagtgttttgaaatgtaagaggttttcgaaattttagtttgggagttacggagggtttttttttttttttaggtttattagtttgggaggtttggagagaggtttggaggatttgttggggattaaagaagagtattggtgggaggatagggcgggggaagggggaggggagtgaagtagtttttttggaatgttggtggtgggggaggtagtttttttggtggaggagttttagcgttttttttttttttttttttgttaatataatggataatggtaattgtttatatatttttatggaggggaaggggatgagtgtagggaatttcgattttattcgggagatttgtaagtttgtagatatttttttttcgtttttattgaatttttgatttttgttttgtagttttcgtagtttgttgtttgtttattttatttgtttagttttagggatagagttgatttttgaatttttaagttttatattgttaggattagtgagtagtaatagggtcggggttgggtttattagttttttagtttagattttggttgtagatataaataggttttgtaagagttggttgtttagagattgcgagaaggaggtgcgttttgttgtttgtttcggttattttggttttttagtttaaggtttaggttttgttttaggtcgggtttttgggtatttgaggttttttttcgttttgtgtttttttttttatttggttgtaatgagtgggggagtacggggtttttgtatgttgaaggtattttatttagttaggtttttttttttttttagg

SEQ ID NO: 136 - DNA, 3953 bp, Artificial Sequence
  chemically treated genomic DNA (Homo sapiens)
tttggaggagaagaagggtttggttgagtggggtgtttttagtatgtagaagtttcgtgtttttttatttattgtagttaggtgaggagaagggtatagagcgggagaagattttaggtatttagaggttcggtttggggtaaggtttgaattttgagttggggagttagagtgatcggggtaggtagtaggacgtatttttttttcgtagtttttaagtagttagtttttgtagggtttatttatgtttgtagttagggtttgggttgggaggttgataagtttagtttcggttttgttgttgtttattggttttggtaatgtggaatttaagagtttaaggattagttttgtttttggggttgggtaaatagagtgggtaaatagtaagttgcgggggttgtagggtaggggttaagggtttagtgggggcgggaggggagtgtttgtaggtttgtaggtttttcgggtggggtcggggttttttgtatttattttttttttttttatgggagtgtgtgggtagttgttattgtttattgtgttggtagaggaggggaggggagggacgttgggatttttttattaaggagattgttttttttattattagtattttagggagattattttattttttttttttttttttcgttttgtttttttattagtgtttttttttagtttttagtaggttttttaggtttttttttaagttttttaaattggtaaatttggggagaggggagagtttttcgtggtttttagattgaggtttcggagattttttgtattttaaaatattttagagattaattcggagttgttaatttttaattttgttatgtaaagatattgttcgtttttaaaaaatttttattatttatagtgattattattttaaaaaggaaaggttttaataaaaaagggtataattttagaattatattatagaattgaagttttttagattgaagacgtttttttttgtattgtttatatttatatttgattacgtataggtgtgattggattttagtttttgggaagttttggtgtggggagaagatttttgggtaaaggaagtggtaggagatttgtttttttattttatttggtttttattttgttggaggaagatcgtgggtaagttatataatttttttgagtttcggttttttatttgtaaaatggggtaagaatggttagggttgttggaggtttttgagatagtttgtgaatgtaaagtgttgtgtgttcgttggtgtttgtagtattattttgttaggttttttttggaaggtttagattttttttagtaggttattgataggatttgagttttagagtttgtgatgtaggttgagaggaattgtgatattattttagtttttttttatgttattattttatagatgaagagattgaagagtatagagggattttgtttagaggttgttattttttagggagttagaagaaaggttggatttagaatttagtttttggatttgggatgtagggtagaaatgtattttgtattattattttaggaaattttttaatattagaaattaggttgatatttttgtttattagattagggagtggtcggttttatgttttttattttagagaagattttggagttagaaaattttaaatttaagggttaggtaggtttaaatttagttgtttgattttggatgagttatgatatattatttttttatatattagtttttgattgaagataatgatagaatatgttatcgttttgagttatggtaggggttattgtgtggtaagtagaataacgttttttaaagatgtttatagttttatttttggaatttgtggttttgttattttttatggtaaaaaaagattttgttagtgtgattaaggatttggagatggggtggttggtttggattttttaggtgggtttattgttattataggggtttttaattatataagagggaggtagtggttttagagttagagaaagagatgtgaggatggtagtggagattagattcgtgattgttggaagggggttatgagttgagggatatgagtaatttttttttagaagttggagaaggtaaagtatttttttttgtagtttttaggagtatagttttgttgttattatgattttagtttagtatgatttattttggatttttgttttttataattgtaagataataaatttgtatcgttttaagtatgaattttgaatatatatgtaaaattgttagaaaggtatttagtatttagtaaatagtaattattttgttttttagaattttagtttttggtaatgtatttttttatttttattatatttgttttattagatttgagattttagtttttgtagtaggtatgaaggtagtagttttatatttttttgtttgtttttgatttgtagttgttgagatatggaatattttttttaggattgaagtggttttagatgtttatgggattgtgtagatagggaggtggttttggtgagttattagtttgggttgtttatttgattattttagttgtttgtagttttagaaagtgggaaggtggttggttttttgttgggatagtttataggtgtttcgggttaagagagcgtttttttttttggggggtagagtttgttttagttagtatatgggggaattttagaagtttattggttggattttaagatatttgttagtgttttatttttttttttggtttgttattaaaatgattgttatggttaaatttagtatttaatatttgcgtagttttttgtggttaaagtatttttataatttagaatatttttataaggttggaggttagattttatttttgtgatttttgtttgtgggaaaattgtagtttatagttgttttgtattttttagcggttattatttagcgttggtaggggtgggaatcgggaggtttggtttttagttttttgagggtggttttgtatttttgcggagtttgtagtttttgtagtttgattagggattttttagttttttggtttagggattgcgaggtattaggatagggggtgttgttgaatagtattttattaagtaggtagtttttttttttaaatatatttatttattagggtggttattttattttattgtaaggtatttggtttaaattagtttaagttttttttattaatattttggaaaggaaggaggtttttttggatagagttgatggaaaaatatataataataataacgataataataaattgggttgatgatatatttagatttagggtttagttaggtattgtttaaggtatttagtggttacgggttggattgtttggtggttgcggggtttatagtgtaggtttttgtttttatttatttttttttttcgttttgggagtttttagagcgattgtttttgaatagggttattaagttttggttttggatgttttgatatgtgtaggagtgttggcggtgatcgtaagagtggattttgtatagaaagattagtaattttttttataatttatgtttaaatatattggtttatttgtatcgggaggattttgttttttgttaggtttggtatataatagatatttgttaaatatttgtttagtgaatggtattggtattttagagggagggttattagtttggttatagggaggagtgggttttgggaggggaggtagttttatattagtttttgtttagaacgttttttttgggagtacgtggtatgagttagaatgagagttagggaggggaggtggtgattgagtaggggagataggatttttatttttagtagtttttatttttggtaattttgttgtagtttttgtgatagagttttaagttagatttttgggtggggtatcgtagttagttatgtaagatttttttttgtttttttgtt

SEQ ID NO: 137 - DNA, 5523 bp, Artificial Sequence
  chemically treated genomic DNA (Homo sapiens)
attatttttttgttttttttttttttagagattttagtagtttggcgttattataggggttagatatatttaatatgtttttagttttttgttattgtatttttagtgtgtttttttttttagttatttaaattttgtttattattttagagttagtttaattttatttatttaggattttcgagatttttatcgtattattatagtttaattgtggtgtagattttatattgggtatattgcgtacgtttattattggttgtgacgtttgattatgttttttttttggtttggaagttttcggaggtgttttataatatatgaagagaagtagtgttggtgtgggaatagtgaggtgtgtttatttatttagttattcggtattagtattggttttagttttttgaggtaatacgttttgagttttagttttgagagaatataaagaaaattttttttaaaagtagtaaaaagtggttgataaaagttgattaaaagttttttaaaagaaatgttaagttatatttaagaaagtttatttaaggttaggtaaatatgaaatttaaagttagacgtggggaagaattttcggagagttgtaattttttgtgttttagtatttttaggagggtatgtttatatttgatttagaaatttgtgtaaaatgagtgaagggttttattttttgggtagtgtgggtataggtttttggagaggtcgatggttttttataaaattttttttgtttgatggttttggatttttagttatagtttttaatagttatgaggtttgagtttaaaataatttatgtgtttgtttttttagttttaaaatttttatagaattaaagtagttagagttgaatggggttaagagatcgtttatttttgtttttttattatatagatgagggattgttatttagagtcgtagaaattgttttatggttttagtttttagatttttttttttttttatagttttaagtttattgtgtattttaaatgaagatgtaaatataagtagtaatatttaagagtaaaaatgaagtgtgtatatgaaagaaatttatttatatggattatattatattataattatagtgtttattgtttgattattatttgtttggtttagtaagggtgttagtgaggaagagaggataaggggtattaatttgtgaattatatatggtttttgtttttttagttttttttttttattggtaaggtaataggtaaatatatgaaaaattaaataatgttataagagaaaaatgtatttaggataataataggtttgtatgaaggttttttattatcgttgttttatttagaaattgaatgatagggaattagagttataagttatgaagtttaattgggttgtttttagagaaagatttagtgtagtaggtggggttgtagttagttttgggtgggtggaaggatgatatttatataggtaagagggtgataatttatttacgtagttttttattgtatattgaattttgttgatttttggtttttttttcgggaggaattgcgatttaatattttgattttattttttgggtagtagaatgatggagaaggaaagtttttttttgtttttcgtaggggttaattatttatttggaatgtttatatttggttgataatggtttattttattattttttttttgaattatttatttaaatgtgttattttttttttgatagtttttatttgtgtgtgtgtgtgtgtgtgtgtgtgtgtgtacgtgtttatatatgtatgttgttattgggtaaataggttattttgggtatagttttatttataatgtttgaagtttattttttagtttttgggtattatttgtaattataatgttgttataggtagaaacgagataggttaattaatcgttgttaatattgatttttatttgttagatgagattttggagtagtatggttgggaataattggtatagattgtatttttttgttttatgttattggaaatatttatttaagtattacggtcgttatgtataaatattttggaaaatggggtatagttgaatggtgtagatttatttatttatatttagtaaattatgttttaagtatttattttagtatgtgaatagtattaaatttagaatattggtttgttggggttttttattagtttttatgattttttgaatttggttaagatttttttggtcggttgtagataggtataatggatagttttgtttttagataatgtaattgggatatttagtattatttatcgttttgaaatttttttagttaggtggttttttaatgggtatttagagttttatgattatttagattgatggtgtatttaataggattttgtatttatgagttgataagttatagttattagttgagattaatttgtgtgatattagaatgtgtttttatttaaaggaaaagggatgaagggtgatatttttggttataagtaatgtatttttatgtagtttttgataaaggatttaagtggattttgtaattgaagaaaaatttatgtattaatttttatagtattttcgtgagtgtacgtaagttagtttaataatttaatatttgttttgtggggttgtgttagattttgttaggggataattattgttggttggggtttagtttagggaagatttgttaaagattattaggaaaagagggaagttgagttttaggtttttttttttagagatggtgatagtttttttattatttttaagtattttataatgtttttttgtttttaagttattaaatttatttttgatttttattttataaaaattatatttttttagtattttgggaggttaaggcgggtagattatgaggttaggagtttaagattagtttgattaatatggtgaaatatcgtttttattaaaaatataaaaattagttgggtatagtggtatttatttgttattttagttatttgggaggttaaggtaggagaatcgtttaaattcgggaggtagaggttgtagtgagtcgagattgtattattatattttagtttgggtgatagagggagattttattttaaataaataaattaaaaaaaaaaatatatatatatatgtatatattttttatggatgttgattattggattttggttttatttgtacgtaatagagtaagtttggatttgtgtttgtaaattaaagttcgatatttttttttggtttttttatatttgaatatttttatttattttttttaatgtgaatatgtatggaagtaggattatttttttaaatattagtagtagcgaattttgtggaaagttagtttatatagaataatttaaataaagtgtttagagaaatggggttttagagtaattattttttttagattttttataaattagtggtgtaggtatgattagttttgagttgagatttttgtaatatttatttttaataatattaatatgttgtggatgagtaattgattattggagggagtttagttgtttataggagtttatggttaatgataatatttgaataaggataggtgtggagtttaggtgtaggaagtaggcgaaggtttttttgtgagttttttttgagggaattgggtttttatatatagttattgttttagaattgatttttttggaattattagtttttattagtagtttgttatatttggggttattttataatttaaataaagttgataagttgtaataatgagtatatattgatttttgtaataggcgttgtttattttttattcgtattttatcggtttgtttttggtcgttttttattcgtttttttgggtggttttttagtagttatatttatttggttgtcgttttttttattttattataattgtttattagcggttttttgcgtatatagtttgtttttttaattagagtggaggtgttttggggatatagttaggtttagatatttatttagtttattatagtgttattttattaataattttttttgagtgattttgggttagtaaatcgagtgtttttgaaattttattatcgttgattttttttagttgggtagaggtatcgagcgttggttgaagttttcggtgggaaatgggtagtgtttagaagagaaggaaacgatgtatgagaaggttttagatgtttatgaggaatatgacgtgttttgtttattattttgttttttttcgttcgtttttttattattggaggaaatttagaagttggtgtaggaaattttttttttaataatttaagaatattttgtataagaggggtgcgttttcggaggttgtttttttttagaggttttttttcgttggggttttttgaagatagatatttggatttttgttgggattaggtaggttatttatttttaggggtagtgattggttatttattagatttttttgtattttttttttttttttttttttagtacgggttgaatttcgtagttatagattttgattaggattagggtgtgggtgtaaatttaaggtttattaaaatggaaaagaagtaatcgatgggaatacgtttttattaagatagcgtttaggattggtttttttcgtggtttttaatttagtttaggagaagtagagattttgtttttatggtgggttatttgaagaaggtatttttggttagggtaggttttttagattttgaggcgtcggttatggttttattgagatataggaagggtcgcgttagagtattgaagacgtttggggaagggaatttatttgggatttagtttttggtggttgcggttgtattttaggtgggtttttttttcgaggatatttaaggtttaaagagaagttagtgtagaaaagtaaataggttaggttcgggaggcgttttttggattttttgtaattttggcgtttttgtagtttgggttttttataaatggggtgcgggcgtcggtcgcgtatttttatcgggatttgcggggttgagtgtttttttcggttgttgtcgttgaggagttcgtttagttagttagggtcgcgaggtcgaggttaggtcgtagtttaggagtcgttttatcgtagttggcgatggattcgtcgaggttcgcgttgttggcgttgttggcgttgtttgcgttgttgttgttgttgttggcgggcgttagggtcggtgagtgcgcggtcgttttgcgggcgtagagggagcgggagggagtcggcggtacgaggttggtcggggtagtttgggtttaggttagagggagggtagttatagggtttagggcgagtggggggattggattagttggcggtttttgtaggtttaggatggggggcgcgggatggaggggttgaggagggggttttcggagtttgttttttttttgaaaggtgaaatttgtgtcggtggtttttttgtcgggttttagtattcgttgggaagacgtgggaagtttatagattttttttttttgttttataga

SEQ ID NO: 138 - DNA, 5523 bp, Artificial Sequence
  chemically treated genomic DNA (Homo sapiens)
tttgtaagataggagaaagaaatttgtgagttttttacgtttttttagcgggtgttagggttcgatagggggattatcggtataggttttattttttaggagggaggtaggtttcggagattttttttttagtttttttatttcgcgttttttattttgagtttgtaggggtcgttagttggtttaatttttttattcgttttggattttgtggttgttttttttttggtttaggtttaggttgtttcggttaatttcgtgtcgtcggttttttttcgttttttttgcgttcgtagagcggtcgcgtatttatcggttttggcgttcgttagtagtagtagtagtagcgtaggtagcgttagtagcgttagtagcgcgggtttcggcgggtttatcgttagttgcggtggggcggtttttgggttgcggtttggtttcggtttcgcggttttggttggttgggcgggttttttagcggtagtaatcgagaagggtatttagtttcgtaggtttcggtgggaatgcgcggtcggcgttcgtattttatttataggaagtttaggttgtaagagcgttaggattgtaaaaggtttaaagggcgtttttcgggtttgatttgtttgtttttttatattggtttttttttgagttttgaatattttcggggagggggtttatttgggatgtagtcgtagttattaggggttgggttttaggtgggtttttttttttaagcgtttttagtgttttggcgcggttttttttgtgttttagtggggttatggtcggcgttttagggtttgagaagtttgttttgattaggggtgttttttttagatgatttattatggggataaaatttttgttttttttggattgaattgggagttacgaggagaattagttttgagcgttgttttggtggagacgtgtttttatcggttattttttttttattttggtggattttggatttgtatttatattttaattttgattagaatttgtggttgcggggtttagttcgtgttgggggaggagagagaagggggatgtagggaggtttggtgagtgattagttattgtttttgaggatgggtggtttgtttggttttagtaggagtttaagtatttgtttttaagaaattttagcgaggagaggtttttggggaagagtaattttcgagggcgtattttttttgtgtaaagtgtttttgggttgttgagaggaggattttttgtattagtttttaggttttttttagtggtggggaggcggacgaggaaaagtagagtagtggataggatacgttatgttttttatagatatttggaatttttttatgtatcgttttttttttttttaggtattgtttattttttatcggaagttttagttagcgttcgatgtttttgtttagttggagggaattagcggtagtggaattttagggatattcggtttattaatttaggattatttagaaggggttattgatgggatggtattatgatgagttgagtgaatgtttgagtttggttgtgtttttaaggtatttttattttggttagggagataagttgtgtacgtaggaaatcgttagtgagtaattgtggtaggatagagggggcgataattaggtaggtataattgttgggggattatttaggaaggcgagtgggaggcggttaggagtaagtcggtagagtgcggatgggaagtggatagcgtttgttgtagaagttagtgtgtgtttattgttataatttgttagttttgtttgaattatgagataattttagatgtaataagttattggtgaagattgatgattttagaaggattaattttgaaatagtaattatgtataaagatttagtttttttagaggagatttatagaaagattttcgtttgttttttgtatttgggttttatatttgtttttatttagatattgttattagttatgaatttttatgggtagttaaattttttttagtgattagttgtttatttatagtatattaatgttattaaagatggatattatagaggttttaatttaaggttggttatatttatattattgatttgtgaaaggtttggaaaaagtaattgttttgaaattttatttttttgaatattttatttgaattattttatgtggattgattttttatagggttcgttgttgttagtgtttgaggaaatggttttgtttttatgtatatttatattaaggagagtgagtaagaatatttaggtatagagaagttaaaaggaggtgtcgagttttaatttataagtataagtttaagtttattttgttacgtgtagatgaaattagggtttaatggttagtatttatagagaatatatatatatatatatatatttttttttttaatttatttatttgagatggagtttttttttgttatttaggttggagtgtagtggtataatttcggtttattgtaatttttgtttttcgggtttaagcgatttttttgttttagttttttaagtaattgagataataggtgagtgttattatgtttagttaatttttgtatttttagtagagacggtgttttattatgttgattaggttggttttgaatttttgattttatgatttgttcgttttggttttttaaagtgttgggagaatgtaatttttatgaagtaggaattaaaaatgaatttgatgatttggaggtagggaaatattgtgagatgtttggaggtggtgagaggattgttattatttttaaaggaagaaatttaagatttagtttttttttttttttgatggtttttggtaagttttttttgaattgggttttagttagtagtagttattttttgatagggtttagtataattttatagagtaaatgttgaattgttgagttgatttgcgtatatttacggaaatgttgtaaagattagtgtatagatttttttttaattataaaatttatttagattttttgttaaagattatatggaaatatattatttgtgattaaagatattattttttatttttttttttttagatagagatatattttggtgttatatagattaattttagttagtgattgtgatttattagtttataaatgtaaagttttgttgggtgtattattaatttgggtagttatagggttttgggtatttattagaaagttatttgattagaggaattttaaggcgatagataatgttgaatgttttagttatattatttagaagtaaaattatttattgtgtttatttgtagtcgattagaagggttttggttaagtttagggaattatggaagttaataaaggattttagtagattaatattttgagtttagtgttgtttatatattgaagtaggtgtttagaatataatttgttgaatatgaatgaatgaatttgtattatttagttatattttattttttaggatatttatgtatagcgatcgtgatgtttaaataaatatttttagtgatataaagtaaggaaatatagtttatattaattatttttagttatgttgttttaaaattttatttggtaaatagggattagtattgataacgattaattagtttatttcgtttttgtttatgatagtattataattgtaaatgatgtttagaagttggaaagtaaattttaaatattgtagatggaattgtgtttagggtggtttgtttatttagtgatagtatgtatgtgtgagtacgtgtatatatatatatatatatatatatatataaatgagaattattaggaaagaaatggtatatttaggtgaatggtttaggaggaagatgatagggtgagttattgttaattaaatgtaggtattttagatggatgattaatttttgcgagaagtaaaaagaaattttttttttttattattttgttatttaagagataaggttagaatgttgagtcgtagtttttttcgggagagaagttagaagttagtagggtttaatgtgtagtgaggagttgcgtaagtgaattattatttttttgtttatgtggatgttatttttttatttatttagggttggttgtagttttatttattgtattgaatttttttttgggaatagtttagttagattttatagtttgtgattttgattttttgttatttagtttttaggtaggataacgatgatgaaaggtttttatataaatttgttgttgttttgaatatattttttttttatagtattatttgattttttatgtgtttatttgttgttttgttaatgggagagagaagttgggagagtaagaattatgtgtagtttatagattggtattttttgtttttttttttttattgatatttttgttaggttaggtagatggtagttaagtagtaaatattgtgattataatgtaatatggtttatgtgaataggttttttttatatgtatattttatttttatttttgagtgttgttgtttatgtttatatttttatttagaatgtatagtgaatttggagttgtaggagagaggaagggtttgggaattggggttatgggatagtttttacggttttgggtggtagttttttatttgtgtgatgagaagataggaatggacggttttttagttttatttagttttgattattttgattttatggaaattttggggttgaaaaaataaatatataaattattttgggtttaaattttatggttattaggagttgtggttgaggatttagaattattaagtaggaaggattttatgggaggttatcgatttttttaaagatttgtgtttatattgtttaagaaatagaattttttatttattttatatagatttttaaattagatgtgggtatgtttttttgaggatgttggggtatagggaattgtaatttttcggaagtttttttttacgtttagttttaggttttatatttgtttgattttgggtaaatttttttagatataatttagtattttttttgaaaggtttttggttagtttttgttagttattttttattatttttaaaaaaagttttttttatgtttttttaagattaaggtttagaacgtgttattttagaaagttgagattagtgttggtgtcggatagttggatggataaatatattttattatttttatattagtattatttttttttatgtattatggagtattttcgagagtttttagattaggagaagggtataattagacgttatagttaataatgagcgtacgtaatgtgtttagtgtggggtttatattatagttagattatagtggtacgatgggggtttcgggggttttggatgggtgagattgaattggttttggaatggtgggtaggatttgggtaattgaagagggaggtatattgaaagtgtagtggtaggaagttgggaatatgttggatatgtttggtttttgtgatgacgttaggttattggagtttttggggagaagggagatagggggatggt

SEQ ID NO: 139 - DNA, 7432 bp, Artificial Sequence
  chemically treated genomic DNA (Homo sapiens)
atttgaagttagagttatttagaggagaaagagttggaattgagaatttaaggaatgtttggaagtgatcgggttcgagtttatttaggaagaaatagaggttggagatatgagattgtgttgttatttttttttattaatttttgggttttattgaggttttattataagtttggttttgtagtttagtgattaggagaaattagatataagataataataatagtaatgattttttttttttttttgagacggagttttgttttttcgtttaggttggattgtagtggcgcgatttcggtttaatgtaagttttattttttaggtttacgttatttttttgttttagtttttcgagtagttaggattataggcgtttgttattacgtttggttaattttttatatttttagtagagatggggttttatcgtgttagttaagatggttttaattttttgatttcgtgattcgtttgtttcggttttttaaagtgttggggttataggtatgagttatcgcgtttggttaatagtaatgatttttgagtatttatattgttagtttttacggtaagagttttttttattttttgttttgttttgttttaagatagagttttgttttgttatttaggttggagtgtagtggtgtgatcgcggtttattgtagtttttatttttcgggtttaagttatttttttgttttagttttttaagtagttgggattataggtacgtattattatttttggttaatttttgtatttttagtagggatagggttttttattatgttggttaggttggttttaaatttttggttttatatgatttgtttatttcggttttttaaagtgttgggattataggcgtgagttattgcgtttttttttgtatttgtttaagtaatatattgaaatatgtattgtgttttttattttatggaggaggaaattgaggttagtaaatgaggttgttatgggaggtggagataggatttgaatttgttttagtgtaggaggtttaagagtttttgtttttttttagggtattgtgtgggagggtgagaaggagggaggtttatagaggtatgatttttgattgttattgttatttgggttttgttttttgaagtttttgttaagcggggaggtggtcgggggagggttttgttttgtgtagttttttttttttcggttcgtagagttgagtatagagggatagaggtacggaatttttagaaatgtttttttttagaaataggttttaggttttgtttgttttgtgtttttgcgtgttggttttggtttgtattgggggtgagaagaagtgggtggagggatgtggggtttatatttggtgggtgtgagtgtggttgtgtgttttgtggttttgtagttacgtgagatatgagtacggagtgtgtgcgttttatggcgtgcgtatgtatgtgcgtgtcggggagtgtgtgtgtcggtggttgagagtgaagtgtgaatgttatattggtataaattgggattatttgtgtgtgtgtacgtgcgtgcgtggaagtgggagtatgtagtcgtggtaaaaaagtgtatgtttgtgtgtatatgtgtatttgtgtgtatttgtttttttgtggggtatgtgtgtgtaaaatatttgagtgtgtggatatgtgtgagggggtgagtgtgtgttggtgtgtacgtttgtgttttgtatatgtatttttttttttttttttgagacggagttttattttgttatttaggttggagtgtagtggtagtagtggtgcgattttggtttattgtattattcgtttattcgttttaagggatttttttgttttagtttttagagtatttgggattatagatatacgttattatgtttggttattttttttttttgagacggagtttcgttttgttatttaggttggagtgtagtggcgtgattttggtttattgtaacgttcgtttttcgggtttacgttatttttttgttttagtttttcgagtagttgggattataggagtttattattacgtttggttaattttttgtatttttattagagacggggtttcgtcgtgttagttaggatggtttttatattttgatttcgtgattcgtttgtttcggttttttaaagtgttaggattataggcgtgagttattgcgtttggttaatgtttggttaatttttttatatttttggtagagatagggttttgttatgttgtttaggttggttttgaaattttgattttaggtgattcgttcgttttggttttttaaagtgttgggattataggtatgagttattacgttcggttatgtattttatgttaaaatgggattatattttagattagtattatttagtagaaatttaaatttttaatatagggttaggtacggtggtttatgtttgtaattttagtattttcggaggtcgaggcgggtggatcgtaaggttaggagatttgagattattttggttaatagatgggtaaaaatttatttttattaaaaatataaaaaattagttatgtatggtggtatgcgtttgtagttttagttattcgggaggttgaggtcggagaattatttgaattcgggaggtagaggttgtagtgagtcgagatcgcgttattgtattttaatttgggtgatagagcgagatttcgtttgaaaaaaaaaaaaaatttaatacgtatgtagataatgtgtaaggtattattttatgtgtatcgtatgtagtaatttttaatttttacgataattttgaggtagatattattatttcgttttataaaaggagaaatagttttggggagataggataagttatcggttaaggtatatagttagttatatgtggttttcgcgtgacggttggtttttgtaggcgaggttttgtttagatgcgtgggtagaaggtttggttcggaaagaggaattgatagtaaggttaagttaatgtttgtttttgggggtagaaagttattttttgttttttttttattgtttatagaggtagtttagatagggtgggggttataggagaacgaagggagaagggggtagtttttgggtagtaaaattaggtggtgaagggaggtattagaggatggtaattagagaggttattagaggggaattataggtagatagggtgataggagggattattgatataaggtgaagagatggtttagtcggacggggtggtttatatttgtaattttagtattttgggagttcgaggtgggtggattatttgaggttaggagttcgaggttttaatatggtaaaattttattttttttaaaaatataaaaattagtcgggtatgatggtagatgtttgtaatttttgttattcgggaggttgaggtaggaaaattgtttgaatttaggaggtggaggttgtaatgagacgagattatgatattgtattttattttgggtaatagagtaagagattgattttgttttataaaaaaaaagaaaaaagaaaaaaaaaaagagatggttgatggttaaagaggggttagcggttaggggatatataagggtaaaggtaggaggtaagaggattggtagggggttgtttttgggttatcgggagcgatataggatgagtatggagggaaagggagaaggggattttagggttttagtttatttaagttgttttttggttttatttagtatgttagttagaggtttaggaaggaattttgagttttttattaaagttaaagatgagtcgttggagtttggtgaggggtaggatgaaggagttgttggagatagtggtgaataggattagagacgggtggtaatggttttggtgagggtgtgttgggttgggtggtgggaggggatttttgggtttgagggaggaggggttggggtttggatttttgagttttagggaggaggaaagggtgggagtggggttgtgatttttaggtttgggaggagtggagggttagagttgagagtaggaatttttaggttatagagaggagcggataaatggggtagagaatatttggggagagttggggtttttattgtgatgtttttttttttgtaggagttcgagtatttttcggggttttatgtagatttattatgacgattatttgagggatttgggttcgtttattaaggtttggtttttcgaatttaaagatagttttttgaagaagatttatagtttgtgttttaggtttgtttgtggggataaggattagggttaaaatgtttataaaagttaggtgtggttgtggcgggtgtttgtagttttagttatttaggaggttgaggtaggatgatggtttgagtttaggagttcgagattagtttgggtaatatagcgagattttttgggggtaaaataaaaagaaaaaaaaaagtttatatttttttaataaataaagttttatttgtgtttttgtttggatttttttttagtgtggttagaaaaaaatttattttattgttttttaggaattaatgagtagaagaggtgatatttgatggggaaggaagagtagggaggtcgggaagggtattaaggaataatattttattgtgggtttgcggagaatgggggattttaaggcgtgttagttttaggagggtgagggtaggagcgtgggtggagttagtaggtttttatgatggtttttattgagagtttcgtttttgttttttataagttttgattttatttttagtgggtatttagtatttttaatttttttatagtttttaatttagtttttgtcggaggcgaatttttagagtgagggttttttgttatttgagagaaggttttttgtgacgtgattttgggggacgttattgttttttttgtttttatttatttttttcgtagttttgttggttaggattttggtttagataaaggatgggggttgtggttgtggagcggaagtgggttttaattattataaattttttttgtgttcgttcggagttggtgaggatagtttgttagagtttggtaagaaagggatttagggtgcggggataggggggcgttagtagggagagggtaaagatcgataaagtaggaattttaagaggtataatattagaagttcgtgttggaattatgattgtgtgtgtgtgtgtgtgtgtgtgtgtgtgtgtgtgtgtgtgtgagagagagagagagggagatggagtttcgttatgtagtttaggttagatttaaatttttgggtttaagtaatttttttgttttagtttttttagtagttgggattataggtgtattattatattttataaattatagaatttagaattgtagattatttgagtttttgtttagagttagggtggttgaggtggggaggattttttgagtttaggagtttgaggatgtagtgagttgtgattttgttatcgtgttttagtttgggtgatagagaaattttatttttaaaaaagagaaagaaaaagggataggtataatggtttatgtttgtaattttagtattttgggaggtcgaggcgggtggattatttgaggttaggagttcgatattagttttattagtatggtgaaatcgtatttatattaaaaatataaaaattggtcgggtgtggtagtatatgtttgtaattttagttattttagaggttgagataggagaattgtttgaatttaggaagcggaggttgtagtgagtttagatcgtgttattgtattttagtttgggtgatagagtaagatttagttttggcggaaaaaaagaatgaaaaaatttaaaaaattaaaaaagaattgtaggttgggcgtggtggtttatatttgtaatttaaacgttttgggaggttaaggtaaacggattatttgatgttaggagttggagattagtttggttaatatggtgaaatttcgtttttattaaaaatataaaaattagataggtatggtggtgtatgtttgtatttttagttatttaggaggttgaggtaggagaatcgttcgaattcggaagatagaggttgcggtgagttaaaattgcgttatcgtattttagtttgggcgagagaataagattttgttttggaaaaaaaaaaagaattgtagattatttgtttgtgtttttttttcggggattagattttattttttttttgtcgtatttttttattttttacgtgtggatgatgatattgtgttttgtgtatgtttttcgttattaaaagtgttttttttatagagtaggtgagaatttagtgaggagatgtagggatatgaggtttgatttagggtagagttttaaggtaatatatttgatttattgtaggtttttaatggtgtttgtagagtatttttttgtattgatttagttttagtaaagggtagaggttttgttgtgttttttgttgggtttagaattgtttaggtgtttaagaaagttttttaggttgggtttagtggtttatatttgtatttttagtattttggggaggtcgagatgggaggatcgtttgagtttaggagttttagattagtttgggtaataaaataagttttttatttttataaaagaataaaaattagtagttgggtatggtggtttatgtttgtaattttagtattttgggaggttaaggtaggtaaattatttgaggttaggagtttaagattagtttggttaatatggtgaaattttatttttattaaaaatataaaaattaggtggggtatagtggtttaagtttgtaattttagtattttgggaggttaaggtgggcggattacgaggttagaagttcgagattagtttggttagtatggtgaaattttatttttattaaaaatataaaatattagtcgggtatggtggtaggtgtttgtgattttagttttttgggaggttgaggtagaagaattgttagaattttggaggtagaggttgtagtgagtcgagaatacgttattgtattttagtttgggtgatagagcgagattttattttaaaaaatacgaaaataaaaattagtcgggtggtggcgggtgtttgtaattttagttattggggaggttgaggtaggagaattgtttgaatttgggaggtgggggttgtagtgagttaagattgtattattgtattttagtttgggtaatagagtgagattttattttaaaaaagaaaaaaataataattaaaatgttaaaattaggagtagaattatagaatgttggaaagtgaggtttaagaagggggttgtgtttaagtttatgtatgggaaatttgattgggatatcgagtttatatagagtaggattttagttttttttattagagtggggcgtgattataggaatagtcgtttttagttagtttgttatatgatatttttttaatgttttagg

SEQ ID NO: 140 - DNA, 7432 bp, Artificial Sequence
  chemically treated genomic DNA (Homo sapiens)
tttggaatattgagggggtgttatgtggtaggttgattggaggcggttgtttttgtggttacgttttattttggtgggggggattgagattttgttttgtgtgagttcggtgttttagttaagttttttatgtatggatttggatatagttttttttttgggttttattttttaatattttgtgattttatttttgattttaatattttaattattattttttttttttttgagatggaattttattttgttgtttaggttggagtgtagtggtgtaattttggtttattgtaatttttattttttaggtttaagtaatttttttgttttagtttttttagtagttgggattataggtattcgttattattcggttgatttttgttttcgtattttttgagatggagtttcgttttgttatttaggttggagtgtagtggcgtgttttcggtttattgtaatttttgtttttagggttttagtaatttttttgttttagttttttaaggagttggaattataagtatttgttattatgttcggttaatattttgtatttttagtagagatggggttttattatgttggttaggttggtttcgaatttttgatttcgtgattcgtttattttggttttttaaagtgttaggattataggtttgagttattgtgttttatttgatttttgtatttttagtagagatggggttttattatgttggttaggttggttttgaatttttaattttaagtgatttgtttgttttggttttttaaagtgttggaattataggtatgagttattatgtttagttgttaatttttatttttttgtagagatgggagatttgttttgttgtttaggttggtttggaatttttgggtttaagcgatttttttatttcggtttttttagggtgttgggagtataggtgtgagttattgagtttagtttagaaggtttttttgagtatttaaatagttttgggtttagtagggaatatagtaaagtttttgttttttgttaaggttgagttagtgtagggaggtgttttgtagatattattaaggatttatagtagattaaatgtgttattttagggttttgttttaagttagattttatgtttttgtatttttttattgagtttttatttgttttatgagagaggtatttttggtgacgaagaatatgtatagggtataatattattatttatacgtaggagatgaggaagtacggtagaaagagggtgagatttgattttcggagaaagaatataagtaaatggtttataattttttttttttttttaagataaggttttgttttttcgtttaggttggagtgcgatggcgtaattttggtttatcgtaatttttgtttttcgggttcgagcgatttttttgttttagttttttgagtaattggaaatataagtatgtattattatgtttgtttaatttttgtatttttagtagagacggggttttattatgttggttaggttggtttttaatttttgatattaagtgattcgtttgttttggttttttaaagcgtttggattataagtgtaagttattacgtttagtttatagtttttttttagttttttaaatttttttatttttttttttcgttaagattgagttttgttttgttatttaggttagagtatagtggtacgatttgggtttattgtaattttcgttttttgggtttaagtaatttttttgttttagtttttggaatagttgggattataggtatatgttattatattcggttaatttttgtatttttagtatagatgcggttttattatgttggtaaggttggtgtcgaatttttgattttaagtgatttattcgtttcggttttttagagtgttgggattataggtatgagttattgtatttattttttttttttttttttttttagaaatggggtttttttgttatttaggttggaatacggtggtaagattatagtttattgtatttttaaatttttgggtttaagggattttttttattttagttattttaattttaagtagaagtttaaatagtttatagttttaaattttgtgatttgtggagtgtggtggtgtatttgtagttttagttattggggaggttgaggtaggaggattgtttgagtttaggagtttgagtttagtttgggttatatagcgagattttattttttttttttttttttttatatatatatatatatatatatatatatatatatatatatatagttatggttttaatacgggtttttaatattgtgttttttaaaatttttgttttatcgatttttgttttttttttgttgacgtttttttgttttcgtattttgagttttttttttattagattttggtaggttgtttttattagtttcggacgggtatagagaggatttatagtggttgagatttattttcgttttatagttataatttttattttttgtttaggttaaagttttggttaatagaattgcggagggggtgggtggggatagaaagggtaatgacgttttttaaggttacgttatagggaatttttttttaagtgatagggaatttttattttgagaattcgttttcgatagaggttgggttgggggttgtggaggggttggaggtgttgggtgtttattgggaatggagttagagtttgtaggagataagggcgaagtttttagtgagggttattatggggatttgttgattttatttacgtttttgtttttatttttttgaaattgatacgttttgaagttttttatttttcgtaagtttataatagggtgttattttttgatatttttttcgatttttttatttttttttttttattaggtgttattttttttatttattgatttttgggaggtagtggggtgggtttttttttggttatattggggaaggatttagatagggatataggtgagattttatttattggagaagtatgaatttttttttttttttttgttttatttttaagagatttcgttgtgttgtttaggttggtttcgaatttttgggtttaagttattattttattttagttttttgagtagttgggattataggtattcgttataattatatttggtttttatgaatattttaattttggtttttgtttttatagataagtttggggtataggttgtgggttttttttaagaggttgtttttggattcgaggaattaggttttggtgagcggatttaggttttttaggtggtcgttatagtaggtttgtatgaagtttcggaaggtgttcgggtttttataggagagaggatattatagtggaggttttagttttttttaggtgttttttgttttatttattcgtttttttttgtgatttaggagtttttgtttttagttttaattttttattttttttagatttaggggttatagttttatttttattttttttttttttttgagatttaggggtttaggttttagtttttttttttttagatttaggagtttttttttattatttagtttagtatatttttattagaattattgttattcgtttttggttttgtttattattgtttttagtagtttttttattttgttttttattaggttttagcgatttatttttagttttggtggggggtttagggtttttttttgggtttttggttggtatgttaggtggaattagagggtaatttgggtaggttgggattttagaatttttttttttttttttttttatgtttattttgtgtcgttttcggtggtttaggggtagttttttgttagtttttttgttttttgtttttatttttatgtgttttttgatcgttaatttttttttaattattagttattttttttttttttttttttttttttttttttatgagatagagttagttttttgttttgttgtttagggtggagtgtagtgttatgatttcgttttattgtaatttttattttttggatttaggtaatttttttgttttagtttttcgagtagtagggattataggtatttgttattatgttcggttaatttttgtatttttagaagagatggggttttgttatgttggggtttcgaatttttgattttaagtgatttatttatttcgggtttttaaaatgttgggattatagatgtgagttatttcgttcggttgggttatttttttattttgtgttagtagttttttttgttattttgtttgtttgtggtttttttttaatggtttttttaattgttattttttgatgtttttttttattatttgattttgttgtttaggaattattttttttttttttcgtttttttgtgatttttattttgtttgagttatttttgtggatagtggagggagagtaggaggtgattttttgtttttaggggtagatattggtttagttttgttgttagttttttttttcgggttagattttttatttacgtatttggataaagtttcgtttatagagattagtcgttacgcgggggttatatgtagttagttgtgtgttttggtcggtgatttattttgtttttttaggattgtttttttttttgtagaacggggtaataatatttattttagggttatcgtgagaattaagagttattatatacgatgtatatggaatggtgttttgtatattgtttatatacgtgttaaatttttttttttttttagacggagtttcgttttgttatttaggttggaatgtagtggcgcgatttcggtttattgtaatttttgtttttcgggtttaagtgatttttcggttttagtttttcgagtagttgggattataggcgtatgttattatgtatggttaattttttgtatttttagtagagatgggtttttatttatttgttagttaggatgattttaaattttttgattttgcgatttattcgtttcggttttcgaaagtgttgggattataggtatgagttatcgtgtttggttttgtattaaaaatttaaatttttattggataatgttgatttagaatatgattttattttaatataaagtatatggtcgggcgtggtggtttatgtttgtaattttagtattttgggaggttaaggcgggcggattatttgaggttaggattttaagattagtttgggtaatatggtaaaattttgtttttattaaaaatataaaaaaattagttaggtattggttaggcgtagtggtttacgtttataattttagtattttggaaggtcgaggtaggcggattacgaggttaggatatggagattattttggttaatacggcgaaatttcgtttttagtaaaaatataaaaaattagttaggcgtggtggtgggtttttgtagttttagttattcgggaggttgaggtaggagaatggcgtgaattcgggaggcggacgttgtagtgagttaagattacgttattgtattttagtttgggtaatagagcgagatttcgttttaaaaaaaaaaaatagttaggtatggtggcgtgtgtttgtagttttaaatattttgaagattgaggtaggagaattttttgaaacgggtaggcggatgatgtagtgagttaagatcgtattattgttattattgtattttagtttgggtgatagagtgagatttcgttttaaaaaaaaaaaaaaaaatgtatatgtaaaatatagacgtatatattagtatatatttatttttttatatatgtttatatatttaaatattttgtatatatatattttatagagagataggtgtatataaatatatatatgtatatagatatgtatttttttattacgattgtatatttttatttttacgtacgtacgtgtatatatatagatgattttagtttgtattaatgtgatatttatattttatttttagttatcgatatatatatttttcgatacgtatatgtatacgtacgttatgaaacgtatatatttcgtatttatgttttacgtggttatagagttataggatatatagttatatttatatttattaggtgtgggttttatatttttttatttatttttttttatttttaatgtaggttaggattagtacgtagaggtatagggtaggtagggtttggagtttgtttttgaggagggatatttttgggggtttcgtgtttttgtttttttgtgtttaattttgcgggtcgggggaggggaggttgtatagagtagggttttttttcggttattttttcgtttggtagagattttagagagtagggtttaggtgatagtggtaattagaggttatgtttttgtgggttttttttttttttatttttttatatagtgttttgagagaagatagaggtttttgagttttttgtattgaggtaggtttaaattttgtttttattttttatgatagttttatttgttggttttagtttttttttttataaagtgggaggtatagtatatattttagtatattatttgaataaatataaagaaaggcgtagtggtttacgtttgtaattttagtattttgggaggtcgaggtgggtagattatatgaggttaggagtttgagattaatttggttaatatggtgaaaaattttgtttttattaaaaatataaaaattagttagaagtagtgatgcgtgtttgtaattttagttatttgggaggttgaggtaggagaatggtttgaattcgggaagtgaaggttgtagtgagtcgcgattatattattgtattttagtttgggtgatagagtaagattttgttttgaaataaaataaaataaaaaatgaagaaagtttttatcgtggagattggtaatataggtgtttaaagattattgttgttggttaggcgcggtggtttatgtttgtaattttaatattttgggaggtcgaggtaggcggattacgaggttaggagattgagattattttggttaatacggtgaaattttatttttattaaaaatatgaaaaattagttaggcgtggtggtaggcgtttgtagttttagttattcgggaggttgaggtaggagaatggcgtgaatttgggaggtggagtttgtattgagtcgagatcgcgttattgtagtttagtttgggcgaaagagtaagatttcgttttagaaaaaaaaaaaagattattgttgttattattattttgtgtttaattttttttagttattgggttgtagggttaggtttgtggtagggttttaatagggtttaagggttgatgagaggaaatagtaatatagttttatgtttttagtttttgtttttttttaggtgggttcgagttcgattatttttaagtattttttgagtttttaattttaatttttttttttttgggtgattttggttttagat

SEQ ID NO: 141 - DNA, 5798 bp, Artificial Sequence
  chemically treated genomic DNA (Homo sapiens)
ggtttggagaggagggtattgttatgtttttagttgggaaatatatatgtgagtttggcgtttgggttcgagggtggaggggttgggtttttggattttttttgggtttgagggaggacgggttagggttttggatatttaggtttgagggaggaggtttgggtttttagatgtttaaatttttttggtaatgagatttcgtttttattttattttttgatagtgaataattggttggtaacggtaacgttgggttaggcgggtatgtacgtaatatattattataaagttagtgattaggtgagtgggtgtagggattagttggtgttgttaggggttgttgggtttggaagtttaggtggggttatttgttaatttttatgtgttgtttcggtttttttagttgtaggtgggtgtggagtttgaggttagtataaggatgtaggatattagcgtttttttcgggtattagttggatttgtttaaggttaattttttttttaaaggtaaaggtttcggtttttttacgcgggaaataggtaggaggtgatttaattttgagtggatgtgtgggttattataggtgttggaggatagtgtgttgttattttgtgggtttttatattattagggaatatttgttaaaaggtaggtggggtcgggtgcggtggtttacgtttgtaattttagtattttgggaggttaaggcgggtcgaggtaaggagattgagattattttggttaatacggtgaaatttcgtttttattaaaaatataaaaataaaattagtcgggtgtggttgcgggtgtttatagttttaattattgaggttgaggcgggaaaatggtatgaatttaggaggcggagtttgcggtgagtcgagatcgtgttatcgtattttagtttgggtgatagagtaagattttattttaaaaaaaaaaaagtaggtggataattttttattatgttttatgtttggaaaaaaaaagtaggtagagtagttaggcgtggtgatttacgtttgtaattttagtattttgggaggttaagttaggtagaatatttgaggttaggagttggagattagtttggttaacgtggtgaaattttttttttattaaaagtataaaaattagttaggtgtggtagcgtgttgtaattgtagttttcgttatttaggaggttgaggtataagaattatttgaatttgggaggcggaggttgtagggagttgagattgtattattgtattttagtttgggtgatagagtgagattttatttttaaaaaaaataaaatgaaataaataaataaatgttaaaaaaaatttggtggagtatttgatgggtgtttgggttaagttggagttttgtttatttttttttatttttttgtatttgatttttttatttttttgagattggtttttttttgtcgtttaggttagagtgtagtagtgtaattgcggtttattgtagtttttatttttcgggtttaagtagtttttttattttagttttttgagtagttaggattataggtgtatgttattaggtttagttaatttttttgatagttttgggagatatgggggttttattatgttgtttaggttggtttcgaatttttggatttaagttttggttttttaaagtgttgggattataggtgtgagttattatatttagttagggtagaaggtattttggaagtttcgagtttgttttatttattttacgttagtggaaattgaggtttttagaggttttaaggttataattaaatttagaattttattttaggtatattggtcgtagttttaatgtttagttttaagtttttttggatatttgtggtttatagattttgggtgtttgagttttttgttgagtattgttggggttatagcggtgattagttttgtttttacgggatttagtgagaggaatagatttattcgtagagtgggtaggattaggttgggggaatttaggggtttagagggttttttagagggtaggggttattgagcggagagtagaggaggagtgagttatttgttttagcgtgaagttgttggtgtgatggggttttagggtggtaggagtagtgtggttaaaggtttggaagttgtcggtatgtggttggtatttaaggtggttaggaattttgtatggatatggtgggaagttggtacgttttttattttagtttttttttgtaggttttgtggatagtaattggatcgtgggtgttacgttggagaagaagtttttatttttgtttttgatattggtttttggggtttttttgaattatcgtaagaataagttttagtgtggttttggttttattatcggttgagtttttttggttttcgttttttacgttttttcgattttatttttatttttatttttttttgttatagaggggagatttgagttttttttttttttttttttttttgggggtcgggggggatattggaaaggagggatttcgttattttagtagttgaggaggggattttggaattgaatggcgtttcgggattttgagtagtaggggtagtatgtttagtgggtttggggtttcgggagggatttcggaattgaggggtacgtaggattttgagtattaggggtagaggcggttagataattttagggaggagtgttttggcgtttttattttttaaagggtttgggttcgtttcgagggggtagcgagaggagtttttttattttcggttagtttattttgtttcgtttatttttttattttttcggtataaattatgtttataagttatggaagaatcgggatattttatagaaaaaaaataaaaaataataaaaaatatacgtgggaaaaaaaacgatgggaggttttcgtttttttaagtgtgtttggtttgttttgagtattttattcggagtttggtcgttttgatttttttttagtcgtttgtagggggcgttagagggtcggagtacggaaagtagcggatttttgatgttgttttaagttcggtttagaggggcgtagcgtggtttggggtcgttatttttttattcggaatatttgttttgttgggggatattacgggtttttttttgtttgagggtagggttttaaggttatttgtttttagtttgatttggtcggagtggttatagaggattttgtttttgtagattgtagtagtagagatgatattgtttttgagtgtagagatgggggtagggagttgggagagggtttaagttattggaatagttttagaataattagggtattaggaattgttgtgttagggagaaggggtttaaggattcgtaggtttgggaggaggggtttaggttagttatgggagttgggttatttgtgtttgaggatttggtgttgtttggattttgttaatttagggttggggttagttgatgtttattacgattttcgagtttttaggaattgaaattttgtttgtttttagggtttggggaaggaggttgttgagtagaattaattttaggttattaattttattttagttattttttgttagttaaagtaaataggttcggttcggtattgggggttttttttcgaattaggagtttagttttttttgattcgtagaattttttgattttattcgttttaggagttaggaatgagttttagttttttttagtttttattgtgtggttttgttattcgttttgttgttgaattacgggttttttttttgaaatatttgggatttataatagggtttaggaaagtgatagcgtttgagcgtttattgtggtttgtttattgttagttttaatataggatcgttgtgtgttagggttgttttttatgtttaatatacgttagtttgttattaaatatattcgtgtcgttgtttttttagtttgatgagtaaaggaatttgatgtttagagaggataagttatttgtttaaggttatatagttggtaattggtagagttaggatttacgttttggtaatttgattttagaattttaattttaatttagaagtacggttttaagtttttggaaattataatatttgtggtagttagggggaggtgttggaattttattttatatgtggggagggggtttttttgtgtttaaggttataattaaagaggaagttgtgattaaaatttaggttttatttgtaaagtttcgatttttagtaggtgtattatattgtttttattttttttattttatttttgtttagtcgtttagttttatttttttttttttttttttttgagatagttttttttttgttgaggttggagtgtagtggcgagatttcggtttattgtaattttcgtttttcgggtttaagcgatttttttgttttagttttttaagtagttaggattataggcgttcgttattacgtttggttaatttttgtatttttagtagagatggggttttattatgttggttaggttggttttaaatttttgattttaagtgattcgtttattgtggttttttaaagtgttgggattataggcgtgagttatcgtttttagttttttttattttatttttgtttagttttttagttttattttttttttgggatttaggagtttagatttttagttttttttttagattatatttatttaggtataggaaaggatagggttaggaaaggaggattttgggcggtagtttttatattttttttttacgtttggtttttagaatggaggagggtgtttgtattattgggcgaggtgttttttttttttggggattgtggggggtggttaaaagatttttatgttttattttttttttttttttgttttgttgtgtttggggtagggggagaatagtttatttcgtgattgggggttggtttagttcgttttatttttgggggagggggcgggatagggggagttttataattggataagtttgggatttttgagttttatttagttttagcggaggtgaaggacgtttttttttaggagtcggtgagaagcgtagtcgggggtacggggatgagtttaggggtttttagaaagagttgggattttgggaatttttggtttttaggtagttttaggagagttattcggggtcgggtttggggagaggaggagcgggggtgaggtaagtagtaggggattggatttgggaagggttgggtagtagagacgattcgattcgttagaaggtggggtggggagagtagttggattgggatgtaagttatagtaggattttacgagttgttattattatttatcgagtatttattgggtgtttttagtgtttttagatttttataattggggagttaggggtagcgatacggtagttagtcgtcgattggagaattttaaaatgaggattgaattagtttataaatggaatacggcgtttaattgtgaggttggagtttagaatgtgaagggagaatgaggaatgcgagattgggattgagatggaatcggcggtggggagggggtggggggatggaatttgaatttcgggagaggaagatggaattttttatggaggtcgatttggggatggggagataagagaagattaggagggagttaaatagggaatgggttgggggcggtttggtaaatgtgttgggattaggttgttgtagataatgtaataaggtttggaaggttaatttggggtgaggtcgggttggggtcgggttgggggtgggaggagtttttattggcggttgattgatagtttttttttttttaga

SEQ ID NO: 142 - DNA, 5798 bp, Artificial Sequence
  chemically treated genomic DNA (Homo sapiens)
tttggggaaggagaaattgttaattaatcgttagtgaggattttttttatttttagttcggttttaattcggttttattttaggttagttttttaagttttgttgtattatttgtaatagtttaattttagtatatttattaagtcgtttttaatttattttttatttaatttttttttggtttttttttatttttttatttttaggtcggtttttatagaaaattttatttttttttttcggggtttaaattttatttttttattttttttttatcgtcggttttattttagttttagtttcgtattttttattttttttttatattttaagttttaattttatagttaagcgtcgtgttttatttatgagttaatttagtttttattttaaagttttttaatcgacggttagttatcgtgtcgttgtttttggttttttagttatggagatttgaggatattggggatatttagtaggtgttcgataaatgatagtgataattcgtggagttttgttatggtttatattttagtttagttgttttttttattttattttttagcgggtcgggtcgtttttgttgtttagttttttttaggtttagttttttgttgtttgttttattttcgttttttttttttttaagttcgatttcgagtagtttttttgagattatttggaggttaggggtttttagggttttagttttttttagaggtttttgagtttattttcgtgttttcgattgcgttttttatcggtttttggggaaggacgttttttattttcgttggggttgagtaggatttaaggattttagatttgtttaattatagggttttttttgtttcgtttttttttttagggatagggcgggttgggttagtttttagttacgaggtgggttgttttttttttgttttaggtatagtagggtagagggaggaaggaggtggggtatagaggttttttgattattttttatagtttttaggaagggaggatatttcgtttagtaatatagatatttttttttattttgggggttaagcgtggaaggggaatgtggaggttgtcgtttagagttttttttttttgattttgtttttttttgtgtttggatgaatgtaatttggagagggggttggggatttggatttttggattttagaaagaaagtagggttagggggttggatagaagtgggatgggaggggttgggggcggtagtttacgtttgtaattttagtattttgggaggttatagtgggcgaattatttaaggttaggagtttgagattagtttggttaatatggtgaaattttatttttattaaaaatataaaagttagttaggcgtggtggcgggcgtttgtaattttagttatttgggaggttgaggtaggagaatcgtttgaattcgggaggcggaggttatagtgagtcgagatttcgttattgtattttagttttagtaagagggagattgttttaaaaaaagaaaaaaaagaaagtggggttaggcggttggatagaagtgggatgggaggggtgggaatagtatgatgtatttgttaaaagtcgaggttttgtaaatgggatttgggttttaattatagttttttttttggttgtgattttgagtataggggagttttttttttatatgtgaaatgagattttagtatttttttttggttgttataggtattgtggtttttaggggtttgaagtcgtgtttttgggttaaggttaggattttggagttaaattgttagggcgtgaattttggttttgttagttgttagttgtgtgattttgggtaaatgatttgttttttttgagtattaagtttttttgtttattagattgggaaagtagcggtacgggtatgtttggtgataagttaacgtgtattgagtatggaggatagttttggtatatagcggttttatgttagggttagtaatggataggttatagtgaacgtttagacgttgttatttttttaagttttgttataaattttagatgttttagaggagaaattcgtggtttagtagtaagacgaatggtaaaattatatagtgagaattgggagagattgggatttatttttggtttttggagcgggtgggattagaagattttgcgggttaggggaggttgaatttttggttcgagaaggaatttttagtgtcgggtcgggtttgtttgttttggttggtaaggggtggttgaggtggggttggtaatttggggttggttttatttagtagtttttttttttagattttgggggtagatagggttttagtttttggaggttcgggagtcgtggtgggtattagttgattttagttttaggttggtaaaatttagatagtattaagtttttagatataggtgatttaatttttatggttggtttaggtttttttttttaggtttgcgagtttttgagttttttttttttgatatagtagtttttagtattttagttgttttgaagttgttttagtagtttgaatttttttttagttttttgtttttatttttgtatttagagatagtgttatttttgttgttgtagtttgtagggataaagttttttatagttatttcggttaggttaagttgggggtaagtgattttgagattttatttttaggtaagggaaggttcgtagtgttttttagtagggtagatgtttcggatgggaagatagcgattttaggttacgttgcgtttttttgagtcggatttaaggtagtattaaggattcgttgtttttcgtgtttcggttttttggcgttttttgtaggcggttgggggaaggttagggcggttagatttcggatgaaatgtttaaaataggttagatatatttgagaaaacggaggttttttatcgtttttttttttacgtatattttttgttgttttttgttttttttttgtaaaatgtttcggtttttttataatttataaatatgatttatatcgaggagatgggaaagtggacggggtagggtggattgatcggggatggggaagtttttttcgttgttttttcggggcgggtttaggttttttggaggatggggacgttaggatatttttttttgaggttgtttggtcgtttttgtttttggtgtttagaattttgcgtgttttttaatttcggaatttttttcgggattttaggtttattgggtatgttgtttttgttatttagaatttcgaagcgttatttagttttagaattttttttttagttgttggggtggcggggttttttttttttaatgtttttttcgatttttaaggggggagggaagggaggggggtttaggttttttttttgtggtagggggaggtggaggtggaggtggaatcggaagggcgtggaaggcgggggttaggagggtttagtcgatggtgaggttaaagttatattgaaatttgtttttgcggtgatttaggaaggttttaagggttagtgttaggggtaggggtgggagttttttttttagcgtggtatttacgatttagttgttatttatagagtttgtagggaagagttgaggtgagaggcgtgttagttttttattatatttatgtagagtttttggttattttggatattagttatatgtcgatagtttttagatttttaattatattgtttttgttattttgaaattttattatattaataattttacgttggagtaaatggtttattttttttttgtttttcgtttagtgatttttgttttttgaaaagttttttagatttttgggtttttttaatttagttttgtttattttgcggatgaatttgttttttttattgagtttcgtgaagatagggttggttatcgttgtggttttagtagtgtttagtaggaggtttaaatatttaaaatttgtgagttatagatatttaagaagatttaagattggatattgggattacgattagtgtgtttgagatgaggttttggatttagttgtgattttgaaatttttggaagttttagtttttattaacgtaagatgaatggggtaggttcgaggtttttaaagtgttttttattttggttgggtgtggtggtttatatttataattttagtattttgggaggttaaggtttgagtttaggagttcgagattagtttgggtaatatggtgaaatttttatgttttttaaaattattaaaaaaattagttgggtttggtggtatatatttgtggttttagttatttaggaggttgaggtgggaaggttgtttgagttcgggaggtggaggttgtagtgagtcgtagttgtattgttgtattttagtttgggcgatagagggagattagttttagaaaaataagagagttaagtgtagaaaaataagaggggatggataaagttttagtttggtttaaatatttattagatgttttattagattttttttaatatttatttatttattttattttattttttttggagatggagttttattttgttatttaggttggagtgtagtggtgtagttttaattttttgtaattttcgttttttaggtttaagtgatttttgtgttttagttttttaagtagcggggattatagttgtagtacgttattatatttggttaatttttgtatttttagtagagaggggattttattacgttggttaggttggtttttaatttttggttttaagtattttatttggtttggttttttaaaatgttgggattataggcgtgagttattacgtttggttgttttatttattttttttttttaagtataaaatatagtagagggttgtttatttatttttttttttttgagatggagttttgttttgttatttaggttggagtgcggtggtacgatttcggtttatcgtaagtttcgttttttgggtttatattattttttcgttttagttttagtagttgggattataggtattcgtaattatattcggttaattttgtttttgtatttttagtagagacggagttttatcgtgttagttaggatggttttaatttttttatttcggttcgttttggttttttaaagtgttgggattataggcgtgagttatcgtattcggttttatttattttttaataagtgttttttggtaatgtggaggtttatagggtggtagtatattgttttttagtatttgtggtggtttatatatttatttagagttgagttattttttgtttgtttttcgcgtaggggaatcgagatttttatttttgaagaggaggttggttttgggtaggtttagttggtattcgaaggagacgttggtgttttgtatttttgtgttggttttaaattttatatttatttgtagttggaggggtcggagtaatatatgagaattagtaagtggttttatttggatttttaggtttagtagtttttggtagtattagttagtttttgtatttatttatttggttattggttttgtggtagtatgttgcgtgtatgttcgtttggtttaacgttatcgttgttaattagttgtttattgttagagagtggggtggaggcggggttttattattaaggggatttgggtatttgggaatttaggtttttttttttagatttgagtgtttagggttttagttcgtttttttttagatttaggaggagtttaggggtttagtttttttattttcggatttaggcgttaggtttatatgtgtattttttagttagagatatgatagtgtttttttttttaggtt

SEQ ID NO: 143 - DNA, 3973 bp, Artificial Sequence
  chemically treated genomic DNA (Homo sapiens)
atttatttatttagatagtgtttcgttttgttgtttaggttggagtgtagtgttgtaattttattggtttattgtaatttttgttttttgggtttaaatgattattttgttttagttttttaagtagttgggattataggtatttgttattatgtttggttaggttttgtagtttttgtaaagatagggttttattttgttggttaggttggttttgaatttttgattttaagcgatttttttttttttttgaagtgttgggattataggtattagttattacggtttggttaagaattgtatttaataattaatatttaggtattgtgtgtgtttattgttattggatgtattattgttattattttagtggatagaattaagaattatatgtatatttaggtatatatttatatatatgtatatattattatatttatattgatttttgtatttgtttatatatacgtataatttgtattgtttttatttttaatttaatattttaaggtttatgttaatttttttttttttcgtattgttattttttttgttagtgagaaatttgatttttattatttttaatatatttgtttgtttgtttaattttttatatgtagttaagtttgtgatattattacgttgttatttttatatagataagtatgattttttttttgaggttttttttgtgatttttagattgagttaggatgaaaagaaggaggaagggaggaagagaggaagggaggaaaggagaaagagaggaagggagggaggaaggaaggaaggaagggaagaaaggagggagggaggaagggagggaaaaagggaggggagaagggagggaaggaaggagaagggagggagggaaggaagaagggagggagggaagaaggaggaaaggagtgtatagttttttaattgaagtataattaagtaaatatatagattttaaatatttggtttgatggtttttgaaaattgtatgtagttaagtaataattatttaaaatagaatataaattatttcgatatttttattttaagttttttaatgtaagggagtttagttattaggaaatattattaaaaatttttttttttgtttttttttaatattaggtatttagtttgtagttgttgttgaaaatattttcgttttaattttaatttttttttaaattttttttaattgatgttcgatttttttggtttttttttttttttttttttttattttagattttattatatagaacgatttggttttttttgattttattagtttttttttttttttatttattaaggagattttttataataaagcggaatttgggaattatttagagaataagaatttttttttttttagaaggataaatagggaaggattattgttattttatattagtggtagtatattttttttattatggaatataatgtttattaggatcgtaatttaagaattatttgtttgatagatggagattttttaagttgatgtgttttagggaattttagatttttggatataaattaagattatttaaatgagagtaagcggaggttatttatttagagtttgttataggaagggaggtagttattaatagttgtgtttggtagagatttaaagttaaagttagatagaggagtgggaaagttttataatagaaaaaaggaaaggttttaggtgtgttttaacggattgttggtatggggaggatggaaggaaattaattagaagtgaggtgtttatgtgattggttagagaaatatgtttggatttttttggttggttttaagttgggttaattgttatagaggttgtaggtttggttttttagatttgttgttatagatgtgtgggttagagttttgtttttatatatggtttggttattgtttatttatatatttttttttttttttttagagtaaatgatgtagaagagaattagggaattaaagataatttttttttcgaatttttttaagtaataatattagtattggtttattattttattttatttaagtttttttttttttttcgagttttaagttgttaattttaaattaatttttaaatttttgaaatagatttagaaatttgtttagatagatttaagatatattaagaatggatgaggaggattttgtattgatttgacgtaagagaagatagagaatttaaggatagttttaaggttttaattggagttataggagtttgtaagagaggatgttgagtttagtttgtagggaattaaagttgtaagtgttttttggaagatattttttgtaattatatatttgaaaattggaatattattttagagaggtggagattgagaatagagagtaggtgtttgtttaaagtttatatgttaaggttgtgagtgaaataggagtttcgattttttggtgttttatttataatatatataaaataaaagatggagaatgagaagtttaggtaatttcggaaataataagtttttgttaaaagtaataatgaattgttttgtgttattaataaaaacgttatgaagatagaaattattttttaaagattttataatagagttatataagtggaaagtaaatgattaaagaatgtgggttttagagttttatttaaattatgatattttattttttatttataaagataaaagtatattagaaaatggttaatgtttaagcgtttttatatttggttttgtttttttagtagacgaaaattattttggtagtgttagtgtgatttatttataatgatttttttagtgtttattttgttttcgagttttttttgttatgttgttattgtaggacggagtaagtattttttgtttttgaaaaaataattaatatatttaattttttcgtatatgttagggattaataatgataagtaggtcgggcgtgtttgtttatatttgtaattttagtattttgggaggttaaggtaggtggattatttgaggttaggagttcgagattagtttggttaatatggtgaaatttcgtttttatgaaaaatataaaaattagttgggtattatggtcgaggtgggcgaattagttgaggttaggaattcgagtttagtttgggtaatatagtgaaattttgtttttattaaaaatataaaaattagtcgggcgtgatggtaggcgtttgtaattttagttattcgggaggttgaggtaggagaattgtttgaatttgggaggtagaggttgtagtgagtcgaggtttttttattgtattttagtttgggtaataagagtaaaatttagttaataataataataataagaagaagaataattaaattttttttttttttttttgagatagagtttcgttttgtcgttaggttgaagtgtagtggtgcgatttcggtttattgtaagtttcgttttttgggtttattttatttttttgttttagtttttcgagtagttgggattataggcgttcgttattatattcggttaattttttgtatttttagtagagacggggttttatcgtgttagttaggttggtttttattttttgatttcgtgatttattcgttttagttttttaaagtgttgggattataggtgtgagtaattgcgtttagttgataattaaattttttttagagtggatgttggagggattggattgatattgattttttaatattgttatgtgtaaagtttttttgtaagatacgtagttaatttaagttttagtatattgatttgtaaaatggggataattataatattttttttaaatggttgttgaggggattagatgagatagtgtatatgaggtatttggtatgtaatttggtatgtttataattggtaatagtatatatattttttatttgtgggtttagttgaattttaaaatgtaaatagagatttgttaattatttgttttgtgtttttttttagt

SEQ ID NO: 144 - DNA, 3973 bp, Artificial Sequence
  chemically treated genomic DNA (Homo sapiens)
gttgaaagagggtataaagtagatggttaataaatttttatttgtattttaaagtttagttaagtttataaatgaaaaatgtgtgtattgttattaattataagtatattaagttgtatgttaaatattttatatatattattttatttaatttttttaataattatttgaaggaggtattataattatttttattttataggttagtatgttgaggtttaaattggttacgtattttatagaggagttttatatatggtaatattaaagaattagtattaatttagtttttttagtatttattttaaagagaatttagttattagttgggcgtagttgtttatatttgtaattttagtattttgggaggttgaggcgggtggattacgaggttaggagatagagattaatttggttaatacggtgaaatttcgtttttattaaaaatataaaaaattagtcgggtgtggtggcgggcgtttgtggttttagttattcgggaagttgaagtaggagaatggagtgaatttaggaggcggagtttgtagtgagtcgagatcgtattattgtattttagtttggcgatagagcgagattttgttttaaaaaaaaaaaaaaagaatttaattatttttttttttattattattattgttgattgagttttgtttttgttgtttagattggagtgtaatggggggatttcggtttattgtaatttttgttttttaggtttaagtaatttttttgttttagtttttcgagtggttgggattataggcgtttgttattacgttcggttaatttttgtgtttttagtaaagatagggttttattatgttgtttaggttgggttcgaatttttgattttaattgattcgtttatttcggttatgatgtttagttaatttttgtattttttataaagacggggttttattatgttggttagattggtttcgaatttttgattttaggtgatttatttgttttggttttttaaagtgttgagattatagatgtgagtaagtacgttcggtttatttattattattgatttttgatatatacgaaggggttggatatattaattatttttttaaaagtaaaaagtatttatttcgttttgtaatagtaatatggtagagaaaattcgagaataagatgagtattggagaaattattgtggatgagttatattggtattattaaagtggttttcgtttgttaaaaagatagagttaaatatgaaagcgtttaaatattaattattttttggtgtatttttatttttgtaaatagaagataaagtattatgatttgaatggaattttgagatttatattttttaattatttattttttatttatgtggttttgttatgaaatttttgggagatggtttttgtttttataacgtttttgttaatggtataaaatagtttattattgtttttgatagaaatttgttgttttcggggttgtttggattttttattttttattttttgttttgtgtatgttgtagatggaatattaaaagatcgaagtttttgttttatttatagttttggtatataaattttggataaatatttattttttgtttttagtttttatttttttaaaatgatgttttagtttttagatgtataattataaagaatgttttttaggaggtatttataattttaattttttataaattgagtttaatatttttttttgtaagtttttatagttttagttaggattttagagttatttttgaattttttatttttttttacgttagattaatataaagttttttttatttatttttaatatgttttggatttgtttagataggtttttagatttgttttaggaatttgaaaattgatttgaaattaataatttgggattcgaagaagaaaaaaaaatttgagtaggataagataatgggttagtgttgatgttgttgtttgagagggttcggaaggggggttgtttttgattttttagtttttttttatattatttgttttaaaaaaaaaaaaaaggatatataaatggataatagttaggttatatgtgaaaatagaattttgatttatatatttgtagtaataggtttagaaagttaaatttataatttttatagtagttggtttaatttaaggttaattagagaaatttaaatatatttttttaattaattatatggatattttatttttagttagtttttttttattttttttatattaataattcgttggagtatatttgaagtttttttttttttttattataaagtttttttatttttttgtttgattttgattttgagtttttgttaaatataattgttaatggttgtttttttttttatagtaagttttgaataaataattttcgtttgtttttatttgggtgattttggtttatatttagaggtttaaaattttttgagatatattagtttgagaaatttttatttgttaggtagatgatttttaaattacgattttaatgaatattgtgttttatgataagaagagtgtgttgttattaatgtgaaataatagtggtttttttttatttgtttttttaaggggaaggagatttttgttttttggataatttttaggtttcgttttattgtggagaatttttttgatgaatgaagaagaaagaaaattaatgaagttaggaggagttaagtcgttttgtatagtaagatttgaagtagaaggggaaaaggagagagaaattaaagaggtcgggtattagttaaagaaaatttgagaaaaggttaaaattgagacgagaatatttttagtaatagttataaattgagtgtttgatattgagagaggataaggagaagggtttttaatgatgttttttggtggttgggtttttttgtattaggaaatttggggtaggggtgtcgaaatagtttatattttattttaggtggttgttatttggttatatgtaatttttaaaagttattaagttaaatatttaagatttgtgtgtttatttgattatattttaattggaaaattatgtattttttttttttttttttttttttttttttttttttttttttttttttttttttttttttttttttttttttttttttttttttttttttttttttttttttttttttttttttttttttttttttttttttttttttttttttttttttttttttttttttttttttttttttttttttttttttttttttttattttaatttagtttaaaagttataaggaaggttttaaggggaaagttatgtttatttgtgtaaggatggtagcgtgatggtgttataagtttagttatatataggagattgagtaaataagtaaatatattgaggataatgggggttaggttttttattaataagagaagtaataatgcggaaagaaggaaagttagtatgaattttgaggtgttggattgaaaatggagatagtataaattgtgcgtatatataaatagatatagaaattaatatagatataatggtatgtatatgtgtgtgaatgtatgtttgaatatatatataatttttagttttgtttattaggataatagtagtagtatatttagtagtaatgagtatatatagtgtttaaatattggttgttaaatgtaatttttggttaggtcgtggtggttaatgtttgtaattttagtattttaggaagaaagaaagatcgtttgaggttaggagtttaagattagtttagttaatagggtgaaattttgtttttataaaaattataaaatttagttaggtatgatggtaggtgtttgtaattttagttatttgggaggttgaggtaagataattatttgaatttagaaggtaggggttgtagtgagttaatgagattgtaatattgtattttagtttaggtaatagagcgagatattatttaaataaataaat

SEQ ID NO: 145 - DNA, 5315 bp, Artificial Sequence
  chemically treated genomic DNA (Homo sapiens)
gagtatagtggagatggtcgagtttagtttcgaggtttttgggtcgtcgtttatttgtttatacgggttgggcgtggttgtttatagtttttggatttgtcgcgtaggattcgggaagaaggtttttcggtagttgtagattttagtttgggtttttgttgtgcgggcgaaaaggtttagttgaagtttttttttagggttagattcggttgtagcgtgggagtcgttgggtgttcgtcgtgtcgtgggaaggaaggtggtggttttgaatagttagggagttatagcgtgggtcggcggatgtaataggagagtatcggttatcgggagtatttattagtagtgaggattatggagggtagatggttttgtttttgtttagggatagtttattttgtagggttatttaggattgggtagggtagggttattttcgttagttggggggcggggggcgggggtgtttggtaagttttataggaagatatttagggttttttttttaaagggatttgggtagttggcgttttcgtttttggatttagtggtggagtagggaggtttttgttttaggatttttgagtttcggggttttaggagtttagggttattagtcgtggaggagttttggttttttgttttttatatttaattttatttcgtgttgttgggtttttttttacgatttaggttgtagtggttttacgggcgtaggttatatttgttatggagatagtgggtatagggtaggggaggtgggcgtatatagtttggttgttattgttattttttgggtattgggggaattgtttttatcgttatatttgtgttttttgtagggggaaaagtgttaatttagatttggcgagttgagttattggggtttgaggggtttagatgttatcgtgagtagagttatgggggagatgtatagatacgcgtgtgaagtttgggggttttatttattttttgtttggtttttgttttcgtttattttaggttagttttaggagaggggtttagtggcgtttttggcgtatatgatagggagtgtggttatttggatttttgttttcggggatagttgagcgggttttgagaaatgtagattttttatttagatttatatatattttgcggttgtttttgttgtttttggagtttgggagtagtttttttatttaaatttatttttgttttggtggttaagggggtagggatatttatgcggtatttttgttgtcgtttagggttggagattgtttttagtattttgagtagtatttagaatttaaagtttgttttcggaaagtgtttttagggttatgcggcgtttgacgtggtatagaagtggtttggatggggatatagaattaaattgtatttattttagttaagaaggttttttttagcggtataagtttttttttttgttgttaggaaaagtgtttttttattaagtaaggttttcgttaagtaaggttgtattgtgaggtttatatatatttaggcgatggaggggtgcgggtttcgtttagtatcgtattgaattgagtttagtagcgtagtagggattggtttttttttgggaaaggttttttgagaggttgaagttgtaggagagggtgatgagttgagaagtttagggtgggtttttttgggaggatcgtttgttttttttaatattgttggttttcggaggtttttagttatttggtagttgtattttttatattcgggattttttcgttaagtttttatttttttaatggtagtttttagagttgagaggtcgagttaagagggtgttattttttaagtttttatgatttttggggagcgtttgtgtagttgtttatttggatcgaggtggtttttatattgaggttaattggttgggagttcggggttgatttgggtaggggatatattaaaattgttcgaggttaagcgcggtggtttacgtttataattttagtattttgggaggttaaggtaggtggattatttgaggttagaagtttgagattagtttggttaatttggggaatttttgtttttattaaaaatataaaaatggttgggcgtggtggtttatatttgtaattttagtattttgggaggttaaggtaggtggattacgaggttaggagtttaagattagtttggttaagatggtgaaatttcgtttttattaaaaatataaaaattagttaggcgtggtggcgcgtgtttgtaattttagtagttatttatttaggaggttgaggtaggagaattttttgaattcggaaggtagaggttgtagtgagttaagatcgcgttattgaattttagtttgggtgatagagtgagattgttttagaatagtaataataaaatgttcgttgttgttgggtttagaagagtttgaataattgtatgtttttttttttaatttttattttttagaattgggtattttcgggttgtgaaaagttagggaagtgtttgatatttttagaatttatttttaagaagtgtttttggttttattagtatttgcgtagatttaggttaggtttagaattttcggttggttttgtaagtgtttggaggaaggatggttttggtttcggtttttttttaattttgtttaagttagatagatagtatttgtagacgtagggggattgtataattttatttgtttaggatttgattttggcgtgtgtttggttttttttttcgtttacggcgttttagattttaggattttttttttcgtttacggcgttttagattttaggattttgtcgttttacgtttttgtgaattttaaatatttgagattagttttagtttattttgttaaggttaaggatgtatttgtgatagttttaggaggttttgataataggtgtttgaggtggttggggatatagtttgtttttatatattttagggagatataagattagtatgtgtatggcgtatattggtttagttagttttttattgaatatacgattgagtttggtttagtgaattcgtatttttatgtaaatagtaagggaacggggtaattatataagcgtttgttttaggggagttttagagggatgatttttagtttcgtttgttttttgtttataaggaatttttttggacgttaattatgagggaggcgtgtagttttttattattgtaattatgttatttagaaataaaacgggaggtaggtttgtttaatttttagtttgattttttttttggttgagtgattttggggttcggagatttattttttttttatatttttttagtagttgttaagaattaggtgtttagttttcgttgtttttcggtcggttttttttagaggttagcgttatattggttgttgaagggtaggattcggggttttttgttgtttttacgttagtttaatagttcgggttgaaggaagttatagggttaattttgtgttgaattttttttaggttttttttttagtatttttttattttacgtttttttaggtttttttcgggttatttgggagataggaataaggaaggggaaggcggaggttttttgggttggacgtggacggttgaagtgtagtttatatatttggatcggtggggtcggtttatgtggtagttttttcggggacgtgaggatgttagggttttttatttttattttttttaggggtttggagtttaggttttaggttttgttagttttgattatcgtatattgcgaggtagtcgtttttattacgttttttggtattagacgatgggttttttattcgttttggaatcggggatttagtagtcgtatgtagttttcggttttttttttcgaaggtttttgggggttgttttttattgagtgggtttttttttttgtagtaattgttaggttaaagttgaattgtaaaagttgcgaaatgatgggtcgggcgcggtggtttacgtttgtaatttcggtattttgggaggtcgaagcgggtagattacggggttaggagaacgagattattttggttaatatagtgaaattgcgtttttattaaaaatataaaaaattagtagggcgtggtggcgggtttttgtagttttagttattcgggaggttgaggcgggagaatggtcggaatttaggaggtggagtttgtagtgagtttagatggcgttattgtgttttattttgggcgatagagcgagagttttttttaaaaaaaagttgcgaaatgaagaaaagttttggaatagagtataaggtattttagttttggggatttttttgaaaggaaattgtgtttggggggagttatgttttatataattttttgggtattagttttcgggcggttagggggtttatagttttttattttaaggttaaggggttatttggtttttgtaggcggataaaagggtttttgttttcgcggatgcgcgttttggtttggttatatttttcggtttttttttttcgggttcgggcggggaagagtcgttttaacggtagggtttattcgcgagaggttagcgttttcggtcggtttagtttaggttcgtcgttttcgttttgggttgtttttttcgggttttgtatcgtttttttgttatttggatcgtttttttacgtttttttttatttcgcgcgttagtttttcgcgcgtagcgtggggatttcggttaataaaggagaaagggcgcggttcgtacgcgcgttaggtgcgtgggcgagattagtttacgttttttttttagtcgttaaggtttcggtttatagttgtttggttgtagttagaagcgtagttcgagataaggaagggcgttttgattcgtatttttgttcggttcgaacgttttgtttagtggtgcgtggaatgcgagcgcgttttaaaatcgatggcgtttaggagtttatgaaatacggtataggttttcggcgacggatgtttcgttttttatttacgtttcgtttttcggggatgttttatttttcgtggcggtttcgttcgttttcgcgtaggcgcgttcgggttgtcgtaggtttttcgtacgcggttatggtcgatttcgagttgtagttggttgagtagcggattcgtagttttttcgatttttttattttaggcgtggtatttaggtgtacgtataggtcgttttcgtggcgtttcgatttgcgggtttacggatgggagcgcgtggttcgcgattttcgggcgggcggggcgggaattttcgtttttcgttttcggggttttgttttttttcggtttcggcgttattaggtttgtttttgggtttagg

SEQ ID NO: 146 - DNA, 5315 bp, Artificial Sequence
  chemically treated genomic DNA (Homo sapiens)
tttggatttaaggataggtttggtgacgtcggggtcgaaggagggtagggtttcgggggcgaaagacgagggttttcgtttcgttcgttcggaggtcgcgggttacgcgtttttattcgtaggttcgtaggtcggggcgttacgagggcggtttgtgcgtgtatttgaatattacgtttggggtggggaagtcggggaagttgcggattcgttgtttaattagttgtagttcggagtcggttatggtcgcgtgcgaagagtttgcggtagttcgagcgcgtttgcgcggggacgggcgggatcgttacgaggggtggggtattttcggagggcggagcgtgggtgaggggcggggtattcgtcgtcggaagtttgtatcgtattttatggatttttaggcgttatcgattttaagacgcgttcgtattttacgtattattgagtagaacgttcgaatcggataaaagtgcgagttaaggcgtttttttttgtttcgggttacgtttttgattgtagttaggtagttgtgggtcggggttttggcggttggaggaggggcgtgagttggtttcgtttacgtatttggcgcgcgtacgggtcgcgtttttttttttttattggtcgagatttttacgttgcgcgcgggaggttggcgcgcggggtggaggagggcgtgaggaagcggtttaagtagtaggagggcggtgtagggttcggagggagtagtttagggcggaggcggcgggtttgggttggatcggtcgggggcgttggtttttcgcggatgggttttgtcgttgaggcggttttttttcgttcggattcgggggagggaggtcggaaggtgtggttaggttagggcgcgtattcgcgagggtagaagtttttttgttcgtttgtagaggttaggtgattttttagttttggggtggggagttgtgaattttttggtcgttcgaggattggtatttagggggttgtgtgaggtataattttttttaaatataatttttttttaagaaaatttttagagttaaaatgttttgtgttttattttaagatttttttttatttcgtaatttttttttgagaaggattttcgttttgtcgtttaggatggagtatagtggcgttatttgggtttattgtaagttttattttttgggtttcggttattttttcgttttagtttttcgagtagttgggattataggagttcgttattacgttttgttaattttttgtatttttagtagagacgtagttttattgtgttagttaggatggtttcgtttttttgatttcgtgatttgttcgtttcggttttttaaagtgtcgggattataggcgtgagttatcgcgttcggtttattatttcgtaatttttataatttagttttggtttggtagttattgtagaagggaaaatttatttagtggaaggtagtttttaggagttttcggagggggaggtcggaggttgtatgcggttgttgggttttcggttttagggcgggtgggggatttatcgtttgatgttaaggggcgtggtaggggcggttgtttcgtagtgtgcggtggttagggttggtaaggtttggggtttgggttttagatttttagggaaggtggaaatggaggattttgatatttttacgttttcggggaagttgttatatgagtcggttttatcggtttaagtgtgtgagttatattttagtcgtttacgtttagtttaggaggttttcgttttttttttttttgtttttgttttttagatggttcgaggggggtttgggaaggcgtggggtgggggggtattggaggaggggtttggggagggtttaatatagaattggttttgtggttttttttaattcgggttgttgggttggcgtgggaatagtaaggagtttcgagttttgttttttaataattaatgtggcgttggtttttggaggaggtcggtcgggaggtagcgggagttgggtatttgatttttggtagttgttgagaaggtgtgaaaggaaaataaattttcggattttaaaattatttagttaagagaaaaattaagttgggaattaggtaaatttgtttttcgttttatttttaaataatatagttataatgataagaagttatacgttttttttataattagcgtttagggaaattttttgtggataaaggatagacggaattggaagttatttttttggggtttttttgagataaacgtttatatgattgtttcgtttttttattgtttatataaaaatgcggatttattgggttagatttaatcgtgtatttagtggaaggttgattgaattaatgtacgttatatatatattgattttgtgtttttttaagatgtataaaggtaaattgtatttttagttattttaggtatttgttgttaggattttttgaggttgttataggtgtatttttaattttggtaaaataaattgagattggttttagatatttggggtttataaaggcgtgagacggtagggttttgaggtttgaggcgtcgtgggcgaggaggagggttttgaaatttgaggcgtcgtgggcgaggaggagggttaagtatacgttagggttaggttttgggtaggtggaattgtgtagtttttttgcgtttgtaggtgttgtttgtttggtttgggtagggttgggggaggatcgaggttagagttattttttttttaggtatttgtagggttaatcggagattttaggtttggtttgagtttgcgtaggtgttagtgggattagaggtattttttgggaatggattttggaggtgttagatatttttttaattttttatagttcggaggtgtttagttttgggaaatgaaaattgagaaaaagaatatgtagttatttaagtttttttggatttagtagtagcgggtattttgttgttgttgttttgagatagttttattttgttatttaggttggagtttagtggcgcgattttggtttattgtaatttttgtttttcgggtttaagagatttttttgttttagttttttgagtgagtagttgttgggattataggtacgcgttattacgtttggttaatttttgtatttttagtagagacggagttttattattttgattaggttggttttgaatttttgatttcgtgatttatttgttttggttttttaaggtgttgggattataggtgtgagttattacgtttaattatttttgtatttttggtagagataagggttttttaagttggttaggttggttttaaatttttgattttaggtgatttatttgttttggttttttaaagtgttgggattataggcgtgagttatcgcgtttggtttcgagtagttttgatgtgttttttgtttaggttaatttcggatttttaattaattggttttagtgtggggattatttcggtttaggtgggtagttatatagacgttttttaggaattatgggaatttgggagatggtatttttttgattcggttttttagttttgaaggttgttattggagaaatgagaatttggcggggaggtttcgggtatgggggatgtagttgttaagtggttgagggttttcgagggttagtagtgttagaaagggtaggcggtttttttaggagggtttattttgagttttttaatttattatttttttttgtagttttagttttttaagaagttttttttagggagaagttagtttttattgcgttgttgggtttagtttagtgcggtgttgagcggagttcgtatttttttatcgtttgggtgtgtgtggattttatagtgtagttttgtttagcggaagttttgtttgatgggagggtattttttttggtaatagaaagggagatttatgtcgttaagaggagtttttttggttgaaatgagtgtagtttggttttgtgtttttatttaggttatttttgtgttacgttagacgtcgtatggttttgagggtatttttcggggatagattttggattttgggtgttgtttagggtattaaggatagtttttagttttaggcggtagtagggatgtcgtatgagtgtttttgtttttttggttattagagtaggagtgggtttgggtgaggaagttgtttttaaattttaggggtagtagaggtagtcgtagggtgtgtgtgagtttggatgggggatttgtattttttaaagttcgtttagttgttttcgaaggtaggggtttaggtggttatattttttattatgtgcgttagagacgttattgagttttttttttggggttggtttggagtaggcggggatagaggttaggtaaggggtaagtagggtttttaggttttatacgcgtgtttgtgtattttttttatggttttgtttacggtggtatttgggttttttagattttagtggtttagttcgttaggtttgagttggtatttttttttttgtagagagtataggtgtggcggtgggggtagtttttttagtgtttaggagatggtagtggtagttaggttgtgtgcgtttattttttttgttttgtgtttattgtttttatggtaggtgtggtttgcgttcgtggagttattgtagtttgggtcgtagagaaggatttagtagtacggagtgggattgggtgtggaaggtagaaggttagggtttttttacggttggtggttttgggtttttggggtttcgagatttaggggttttgagatagggatttttttgttttattattgagtttagaggcggggacgttagttgtttaggtttttttgaaggaagggttttgaatatttttttatgaaatttgttaggtattttcgtttttcgttttttaattaacggaggtggttttgttttgtttagttttaaataattttgtagggtggattgtttttgggtagggataaggttatttgttttttatggtttttattgttggtaggtgttttcgatggtcggtgtttttttgttatattcgtcggtttacgttgtggttttttggttgtttagagttattatttttttttttacggtacggcgggtatttagcggtttttacgttgtagtcgggtttggttttggaaagaggttttagttgggttttttcgttcgtatagtaggagtttaggttgaagtttgtagttgtcgaggggtttttttttcgaattttgcgcggtagatttaggggttgtgggtagttacgtttagttcgtgtaaataggtgagcgacggtttaggggtttcgaggttgggttcggttatttttattgtgttt

SEQ ID NO: 147 - DNA, 8395 bp, Artificial Sequence
  chemically treated genomic DNA (Homo sapiens)
ttacggtttaattcggtttagtttttagatattttttttttatcgtttgttttttatcgttttcgtttgtttttttaagttagtagtaaataatattttaattcgtgtttttattatttaaagattttaagtatttttttttatttcgtttttattttgattattttagggaatgaattagggatttatttttataattaaaaaagtttttttaaagttaggttattggagttttaattttgtttttttatttttattagttgtgaaattttaggaaagttatttaatttttttttgttttattttttttatttttaaaaaataggatgataatatttagtttttaagatggttgtgaggatttaagtgagttgatatatttaagaatgtttagaatagcgcgtggtagaatgggtattgtatatgggtttaattttgtaattgttatgttttattaattttaaggtgtatttcgttttttattataagagttttttcgttcgtgtggtagttgggagtggtcgttattgtttgcgtatatttaaatttggttaggtgagtttcgtgtttttagtttaattgttgtttaaaatgtttttaaaaaggttatattgtggtttagtatttaaatttagttattgtgtatgtagaaaggcgggtaaatagaagagtgtagtaagaattttatattagtgaagtagttattattgaagaatgattatagttttatatttttttgtaaaatagtagttaagtgttttgtgagatttaagaaaggaagagttttataagtaaatggaattgttgtgttgttttattatcgagaaaagggtagaatgattgttagttatacgtgaagtaagaaaatttcggtaataaagtttgtagaatgagtggttgaggtttgaaaataaatggtggaaataatagtggataattttttaaagaatggtatattgttaatgtttttgatggtatagaaggtgatattatgtagaaaattaaggttttgagttaaagagggttttagaaaaattggattttgaatgtgaagaaatttggggattattttagttaatttgttttgtttataatttttttttatgtatgtaaaagagtaattttgattttaaagattgatatttaaataaatttaaaatattttttttgtgtgtgtgtttgtgatatagtgtttcgtttttttatttaggttggagtgtagtagtgtaattttagtttattgtaatttttgttttttagttttaagtaatttttttatattagtcggattataggtgtatattattatgtttagttaattttttgtgagtattttttgtaaagatagggttttattatgttgttagattggttttaaatttttgggtttaagtgattcgtttattttggttttttaaagtgttgggattataggtatgagttattaagtttagtttataaaatacgtataatataaaatttattattttaattttttttttttttttgagacggattttcgtttttgttgtttaggttggagtgtagtggtatgattttagtttattgtaatttttattttttgggtttaagtgatttttttgttttagttttcgagtagttgggattataggtatgtgttattatatttagttaattttgtatttttagtagagatggtgtttttttatgttggttaggttggttttaaattttcgattttaggtgatttatttatttcggttttttaaagtgttgggattataggcgtgagttattacgtttggtttttattttaattatttttaagtgtatagtttagtggtattaagtatatttatattgttgtgaatttattagtaatttttgttatgttttaattaatagtgtatgatagatgtatagattttttaagaaatagtgtagtggttattgtagaaaaaatgtagttatttttgtaggtgagtagagttgttagttagaagtatagttaagtttcgttagttttgatgagaatattttttttttttttggtatgaagggaaagttaaatgtaaatataggtatgagtcgtgttatcgttggtttttttttttttttttagattaggggttagattagaatgtgagttttgattattattgtaagttgtgcggtaggttatattttttttggaatttatgtttttattatggaaattgaaatttataggtaagatgatttttaagattttattagtttttaaatgtatgattgtgtaattgaataattatataagatatatattataaatatatgtaaattcgggttgggtttttgtgggttttaaggagaagttgttatatttattttggtgtattgggaagtaagagatttttattcgattgggttaggagtggttttttttagaattaagggttagtaggttattttgttaagatcgtgaatattttgattaaaggagagattagaaagggtgtgtggtttattcgagagtatatagtaattaaatggttgggtgtggatttagaagttattgttatagttttagtttatatgaggtttaaggagaaggttttttaggaatttttgagatttagttttgaatttggttagttggggtggatagtatattcgaaggttaggagaagtgatatatgaaattataaaagaaaggagtaggttaggtacggtggtttacgtttgtaattttagtattttgggaggtcgaggtaggtggattataaggttaggagtttgagattagtttggttaatatggtgaaattttatgtttattaaaaaaaaatataaaaagtagtcgggtatggtggtatgtgtttgtaattttagttatttaggaagttgaggcgatagaattgtttgaatttgggaggtggaagttgtagtgagttgagttattgtattttagtagtggggaaggtatgttttttgggtgggggtagaggtatattttagttagatttttttgagtttttgtttttttttatgtgtagagtttggaggtgggttttagatgttttttatatgataggggttggggttttttttttcgtcgattttttttcggaggatttagaatgtttgaagttgggagggatggttgagggaagagtgttagggtattaggtgtttatgtgttaggttaggagttaggtattggaaatatataggagaataaattttataggaatttttgtttttttggaatattatttttgtatgggtaatttttatttttttttttttttttttttttttcgttttttttttttttttttttataatagtaggagttacgagtttttatatatatatgtatatgatatatttttagttgtaaaatattttttcgtttattattttattgtatttttaaaataattttatggggtaggtatttatatttttattgtttagataaggaaattgaggcgtagaatgtggttcggtagtgtggggtgtggtagaaagttttagattaggttttagttttagtttagttattaatttgttggagtattttagataagttatttttttttttgggtttatatttattttttttgtttattttatatttttatgatataatataaagcgttttattttagtttttaattttttttagatttttgtttttgcgattgtgatttgtttagggatttgttggataggagttagggtagggtgtagaagttcgtttttttgtttttattttgagtttgattttgttgtgaatttttaggagagggagcgaggttggagggattagggaagggttagtgagtggggttggggaaatttttagatttgaacgtttttaggattttagtggttatagtagtattgatagtaggaggtagtattgtttagatgttgagttgagtgggtattaaggttagagagttgtttattaggtattatagtcgtttcgagtttgtatagtttattgttttatagaaatgttttttttttgtggttagagcggttttgagttttttagggtttttaggatttgttatagtttttgggattttaataaatgagtgtgtaaagatttgttttttttaaagtgtaaataatattgtaagtaagggttgatatttattgattatttattgtggacgaggcgttgttttgagtatttgatatatattgttttatttaatttaaattttaatttattaggttagttttattttttttattttatagagaaagataagaaaggttaagttatatagatggaataggttgatgttagaatggatatttttagtttttttagtcgttttaggttgattttattattaagggttagggttttagtgtttttaggttttaggagttgttgtttggttggggtttttaggagaaggtgaagtttaatgatttatgggtgattagttgtaagaatgtaagtatagaagatataaatttttatgttttggaaatttgttataagttaattagttgttttttatttttgtgaagtaggaataattggaggtttgatagaagaattttttagttattagaaggagtagtatttatgtttttttttagttttgtgtgaggtgttgtttttgttttggttaatagtttgagttagagagatgggggtcgggtataatttttattagacgtttttatttataagattttgtgggggttgggagacgttttggggtagtagttttggggtaattaagggaataaatacggaaaattagggacgttagtttttatttggagtttattaaatggggaatattagttagttgtgaaggttaagatagggtgataggtttgtgggtgggttgggatggggtatgggggtagaggtcgttatggaggagaagaggtattggttttaacgattttattttttcgttacgtgtttagattcgggatggaaggattttataaatgtttataatttagtttttttagaggttttgagaaagagagcgatagagtgcgagagcgagtgttcggagtattttggttttgagatagttgggttagtttcgtagggttttgtagtatgtgggagtttcgttttatagttttttttagggttgtgttcgtagagtttttggttatattttttttcgttttttttggtttcggttttgtttttaattggttataggttttgttttttgtgttatagattgttatggcgtttggtttgggtattggtattttggtataggttttgggttatataagcggggtttatattaattttgtcgtgattgtggtttgtttggtgggttgttacgttttcgtttttcgagtcgttttttacgtggttgtttagttgttgggggttgtggtcggagtcgttttgttttatgagattacgttagtagatattcgcggggatttggttgttaatgttgtgagtagttataattttgttatttataaggggtaggttttggggaattttttgtaaaggatgagatgggagggatgggttttgggtgatgtagggagagagatggagatagaggtagagagagaggttggagttaggaatatagttattataggagggttaggatgaaaggagtaatgatattagagtaaagtaggatgtagatagattgttggttttttttattttgatcgtcgtgtaggaagagttttatttaggtttttgttggatttaacgtttatattatagtgaagatagggttatattttagtaggggttggtgtttcgagtagatatgttttttaagttgcggggagttttggagtgattattatagggtttttaagagagaagaggggtttagtattttttttgttttgagggtttgtaggtttcgtggtaggtgttttttataggttaggtacggatatattatagttttgtaagtagtaatgggtatatttatttttttaaattttgaggaggttttcggagtttataagttggttgttgattatatgatataggcgttaattgggtttcgtgggttttttgggagttgagggtggtgttatagtttttttttttatgttttatttatttttttttttaagtttgtgtgggttttgtgaatttaaggtttatgaatgtggaggaatgatttgtgtttttaatagattaatatttattttgtatttttattttaagttaggatagtgagtgttttttttgtgtttgttttcggtagttttcggttttttttatttttgagttattggataagagttttgatgtttttgatgagtttcgtataatttttgtgggcgtttttttttttgtataagtggtttttttttatttgtgggatagaggtattttaattagggaatttttttgttttgttttgttttgtttttgagatggagttttattttattgtttaggttggagtgtaatggtataattttaatttattgtaatttttattttaggttatttttttgttttagttttttatgggattatacgtttgtaattttagttaatttttgtatttttagtagagataggattcgttacgttggtaaggttggttttaaatttttaattttaagtgatttattcgttttagttttttaaagtgttggaattataggtatgagttattatatttagtttttgttttttaaagaggaaaatatgataaggttgggggttaggggttaaggaaaggttaggtgggtaagtagaggagtgggtttattttttttgagaataaaattagtttagtttgtagtaagaagaggtttagttagattgaaaaaggaattttttgagagtatgattaggaagtttttttttaatagtagggtattgggagtgaaaggttatgggaaatatgtagttttttttttttattattttataattgattggggtttttagaagagaaaggtttgggagggtttttttatgttattttttagtatttattattttgaggatttggggagaattttgtttggatggaatggggtagtggtgggattaatttgttttgaggttaaggagagttagatgatttttaagataattttaagtgttttttgaggatattgagagttagtttggttattaggaagttaattattgatatgtatttgttttgtgttaggttagttattattttattattggtataacgttataagggaaattttgtggttttttttatggtgagtggtaaattgaggtttaatagtaattgattaaagttatagaattaatatgttatttttagtttttttatagttttttagaatttatttttttattttattttatagaaggagaaattgaggttaaattaagtagttttatggtaagttagaggtttttaaagtgtttgtttttaaagttttttttattgttttttagagattttgtattggataataataggagggattgaggttagattttagagagatttaagggttttgatttgatgtttcggatttaggggtgggggtttagggtttggagaaagagcgtgggagttgagagttgttattgttttatttagtgtagtgtttagttttagaaggtagggtgtagggtatagggtgataaaatttaaggagaaatttagtgttgggtgcggtttagttatgaaattatttttttatttagtttcgagttttttttttatttaaggtagggtttgttgagattatgggtagtttatatgggtgtggaggtattgtttaatatagttttagggtttttattttaatttttataggatgtgtagggagtaaattaatagggtaaatttgaggtttgaaaggtagtggggaatagataagggttagggaaagaggtagatttcggatttatagcggaaaggggtatattaggattgttttttagatttaagtttttagattttgtttttgggagttatttaattttaggaagaaagattataggttttttattgtattaaggtttgatggtttatagatagaggaaggtttttttgttaatcggtttaaagttttttgaggtagttgaaattttttttttttttgttttttgggaaatagaaatttcggattttagtatttttttttttttatattgtaggtttttagttttaggttttaatttaatgggttatagagttagttttgttatttttggcggggggattatgggtattttgggggattaggggttgtttttgggttagggtttaggaagaagggattagtcgttgtagttaaggcgtttggtaagtttaggtgtttcggtttttagtttagaggttttttggtgtttcgattgtaggtggataggaagatggagttagagaggaaagtgggtttagtgtttttttattcgttttttttttgtttttagt

SEQ ID NO: 148 - DNA, 8395 bp, Artificial Sequence
  chemically treated genomic DNA (Homo sapiens)
gttggggatagagaagaggcgggtaggggaatattgagtttatttttttttttggttttatttttttgtttatttgtagtcgaggtattagggggtttttgggttgggagtcggaatatttgggtttgttagacgttttagttgtaacgattgattttttttttttgggttttggtttaaaggtagtttttgattttttaggatgtttatggttttttcgttagaggtagtaaaattgattttgtagtttattagattggggtttgaggttgggagtttgtagtatgagaggaaaagaatgttgagattcggaatttttgttttttaaagaataagaagggaagaggttttaattgttttaggaagttttgggtcggttagtaggaagatttttttttgtttgtagattattagattttggtgtaatgagaggtttgtggtttttttttttgaggttaaatggtttttagagatagggtttagggatttgggtttgggggatagttttagtgtgttttttttcgttatgagttcggaatttatttttttttttaatttttgtttattttttattgttttttaggttttaggtttgttttgttagtttgttttttgtatattttatggaggttggggtaagggttttggagttgtgttggataatgtttttatatttatgtaggttgtttatggttttagtagattttgttttgggtaaggagagaattcggggttgagtaaagaggtgattttataattgggtcgtatttagtattggatttttttttgggttttgttattttgtattttatattttgttttttggggttgggtattgtattgggtggaatagtgatagtttttagtttttacgttttttttttaggttttgaatttttatttttgggttcgagatattaggttagaatttttgggtttttttagggtttaattttaattttttttattgttgtttaatgtagagtttttagaggatagtgaaaagagttttggaagtagatattttggaggtttttgatttgttatgggattatttaatttggttttagtttttttttttgtgaaatgggataagaaaatggattttggaggattgtgggaggattagaaatgatatattggttttgtgattttgattaattgttgttgagttttaatttgttatttattatagggggaattatagaattttttttatagcgttgtattaatgatgagatgatagttggtttggtatagggtaggtgtatgttaatgattaattttttggtggttaggttggtttttagtgtttttaaaggatatttgggattgttttgagggttatttggttttttttagttttagagtaagttggttttattattgttttattttatttaggtagggttttttttaggtttttaaggtggtaaatgttgagaagtggtatggaggagtttttttagattttttttttttgagggttttagttagttgtgaaatgatggaggaggaggattgtatgttttttatggttttttatttttagtgttttgttattagagaaggattttttggttatgtttttaggaagttttttttttagtttaattggatttttttttgttgtaaattgaattaattttgtttttagaggaaatgagtttatttttttgtttgtttatttagtttttttttggtttttggtttttagttttgttatatttttttttttaaagaatagaggttgggtgtggtggtttatgtttgtaattttagtattttgggaggttgaggcgggtggattatttgaggttaggagtttgaaattagttttattaacgtggcgagttttgtttttattaaaaatataaaaattagttgggattataggcgtgtaattttatgggaggttgaggtaagagaatggtttgaggtggaggttgtagtgagttgagattgtattattgtattttagtttgggtaatagagtgagattttattttaaaaataaaataaaataaagtagagaagttttttaattgggatatttttgttttatagatgaggaagggttatttgtgtagagaagggggcgtttatagagattgtgcgggatttattaaagatattaggatttttgtttagtggtttaaggatggaaaaggtcgggaattatcggaaataagtataaaagaggtatttattgttttggtttaggatgggggtatagagtgagtgttgatttgttgggggtataggttatttttttatatttatgggttttggatttatagggtttatatagatttgagaggggaagtgggtgggatatgggggaagggattgtggtattatttttagtttttaaagggtttacggggtttagttagcgtttgtattatgtaattagtagttagtttatgggtttcggggatttttttaaggtttggagaagtgagtatgtttattgttgtttgtagggttgtggtgtgttcgtgtttggtttgtaaggagtatttgttacgggatttgtaaatttttaaagtagaagaaatgttgggtttttttttttttttgagaattttgtgatgattattttaaggtttttcgtagtttggaaagtatgtttgttcgggatattaatttttgttgaggtatagttttgtttttattgtaatgtaggcgttgagtttaatagaaatttggatgaggttttttttgtacgacggttagggtggaagaagttagtagtttgtttgtattttgttttgttttggtattattgttttttttattttgatttttttatggtggttgtgtttttggttttagtttttttttttgtttttgtttttatttttttttttatattatttagagtttattttttttattttattttttataagggattttttaggatttgttttttgtggatggtaaagttgtggttatttatagtattgatagttaggttttcgcggatgtttgttggcgtgattttatggagtagagcggtttcggttatagtttttagtagttgggtagttacgtagaaggcggttcggagaacggagacgtggtagtttattaggtaggttatagttacggtagggttgatgtgggtttcgtttatgtggtttagagtttgtattagggtgttaatatttaagttaaacgttatggtaatttgtagtatagagggtagggtttgtggttagttgagggtagagtcgaggttaaagaagacgaagaggagtgtggttaggaattttgcgaatatagttttggagaaggttatggagcggagtttttatatgttgtagagttttgcggggttggtttagttgttttagggttaggatgtttcgggtattcgttttcgtattttatcgtttttttttttaaggtttttggggaggttgggttgtgggtatttatagggtttttttatttcggatttgggtacgtggcggggaggtggagtcgttgaggttaatatttttttttttttatggcggtttttgtttttatgttttattttagtttatttataggtttattattttattttggtttttatagttgattaatgttttttatttaatgagttttagataaggattgacgtttttggtttttcgtgtttgtttttttggttattttagggttgttgttttagggcgttttttagtttttatagggttttgtgaatgggaacgtttggtggggattgtgttcggtttttatttttttgatttaaattgttgattaaggtaggggtaatattttatataaaattaagagagaatatgagtgttgttttttttggtaattgggaagtttttttgttagatttttaattatttttgttttatagggatggaaaataattggttggtttgtgataaatttttaaggtataaaggtttgtgttttttgtgtttgtatttttgtagttaattatttataaattattaagttttatttttttttgggagttttagttaaatagtagtttttagagtttgggggtattgggattttggtttttggtgatggagttaatttggggcggttgaggaagttgagggtgtttattttggtattagtttgttttatttatgtgatttaattttttttgtttttttttgtaaaatggggagaataaaattgatttagtggattggggtttggattgaatgaaataatgtatgttaagtgtttagagtagcgtttcgtttatagtaggtggttaatgaatattagtttttatttatagtattatttgtattttgaggagaataggtttttgtatatttatttgttggggttttagaagttgtgataggttttagaaattttgaggagtttagggtcgttttggttataggagaaagatatttttgtggggtagtgagttgtgtaggttcggggcggttgtgatgtttgataagtagttttttggttttggtgtttatttagtttagtatttgggtagtgttgttttttgttattagtgttgttgtggttattggggttttggaggcgtttaagtttagaagtttttttagttttatttattggtttttttttaatttttttagtttcgtttttttttttggggatttatagtagggttaggtttagagtggggatagaaggacgggtttttgtattttgttttagtttttgtttagtaggtttttgggtaagttatagtcgtaggaatagaaatttgggagagattggagattggagtggagcgttttgtgttgtattatggggatgtggggtgggtaggaggggtgagtataggtttagggaggggagtgatttatttagggtgttttagtaggttagtggttgagttgggattggagtttggtttggagttttttgttatattttatattatcgagttatattttgcgttttagtttttttgtttggataatgggagtgtggatgtttattttataaagttgttttgagaatgtagtaagataatgaacgggaaggtattttgtaattgagaatgtattatatatatatatatatggggattcgtgatttttgttattatgaaggaggaggaagagaaagcggaagaggaaggggaggaagaaagaataaaaattatttatatagaagtgatgttttaaaagagtagggatttttgtggggtttgtttttttgtgtatttttagtgtttaatttttggtttgatatatagatatttggtgttttggtattttttttttagttattttttttaattttaggtattttgggtttttcgggagaagatcgacggagagggggattttaatttttgttatataaagggtatttggggtttatttttagattttgtatataggaagagataaggatttagaggggtttggttggggtgtgtttttgtttttatttagggaatatgttttttttattgttggagtgtagtggtttagtttattgtaatttttattttttaggtttaagtaattttgtcgttttagttttttgagtagttgggattataggtatatgttattatgttcgattattttttgtatttttttttagtagatatgggattttattatattggttaggttggttttaaatttttgattttgtgatttatttgtttcgattttttaaagtgttgggattataggcgtgagttatcgtgtttggtttattttttttttttgtggttttatgtattattttttttgattttcggatatattgtttattttaattggttaagtttaggattgagttttaggggtttttggaaaattttttttttgggttttatgtgaattgaagttgtgatagtggtttttaaatttatatttaattatttagttgttgtgtgttttcggatgggttatatattttttttggttttttttttggttaaggtatttacgattttgatagagtggtttattgatttttgattttgggaagaattatttttaatttagtcgggtaaaaattttttgttttttaatatattaggataggtgtgatagtttttttttggagtttataaagatttaattcgaatttgtatatgtttgtggtgtgtgttttgtgtggttgtttagttatataattatatatttagaagttaatgggattttagagattattttgtttgtggattttagtttttatgatgagaatatgaattttagagagagtgtgatttgtcgtatagtttataatagtagttaggatttatattttgatttggtttttagtttgggaggaggggaaggggttaacgatgatacggtttatgtttgtgtttgtatttgattttttttttatgttagggaggaagaaggtgtttttattaaagttggcggggtttggttgtgtttttggttggtagttttgtttatttgtagggatggttgtattttttttataatggttattatattgttttttaggaagtttatgtatttattatgtattattaattagaatatgataaaaattgttgatgaatttatagtaatgtgaatgtgtttaatgttattgaattgtgtatttaaaaatggttaagatgagggttaggcgtggtggtttacgtttgtaattttagtattttgggaggtcgaggtgggtggattatttgaggtcggaagtttgagattagtttgattaatatggagaaatattatttttattaaaaatataaaattagttgggtgtggtggtatatgtttgtaattttagttattcggaggttgaggtaggagaattatttgaatttaggaggtggaggttgtagtgagttgagattatgttattgtattttagtttgggtaataagagcgaaaattcgttttaaaaaaaaaaaaaaagttaagatggtaaattttatgttatgcgtattttataggttgggtttggtggtttatgtttgtaattttagtattttgagaggttaaggtgggcggattatttgagtttaggagtttgagattagtttggtaatatggtgaaattttatttttataaaaaatatttataaaaaattagttaggtatggtggtgtgtatttgtagttcggttgatgtgggaggattgtttgagattgggaggtagaagttgtagtgagttgagattgtattattgtattttagtttgggtgaaagggcgagatattgtattatagatatatatataaaaaagatattttagatttatttagatattagtttttaaagttagaattgtttttttgtatgtataaaaggaaattataggtaaaataaattggttaaaatagtttttagatttttttatatttagagtttaatttttttgaaattttttttgatttagagttttgattttttgtatggtgttattttttgtgttattaggagtattggtaatgtgttattttttaaaagattgtttattattgtttttattatttatttttaagttttagttatttattttgtaagttttattgtcggggtttttttgttttacgtgtgattagtaattattttgtttttttttcggtaataaaataatataatagttttatttatttatggggtttttttttttttaggttttataaaatatttggttgttgttttgtaagaaaatatgaaattgtggttattttttaatgataattgttttattaatataaaatttttgttatatttttttgtttgttcgtttttttgtatatatagtaattgggtttaaatgttaaattatagtgtaatttttttgaagatattttaaatagtaattaagttgaaggtacggaatttatttgattaagtttaggtatgcgtaggtaatgacggttatttttagttgttatacgagcggaagagtttttatgatgagaaacgagatatattttagaattggtgaaatatggtagttataagattaaatttatatgtaatgtttattttgttacgcgttgttttagatatttttggatatattagtttatttaaatttttataattattttaggagttaaatattattattttgttttttaaagatgaggaaaatgagatagagagaggttaagtaatttttttgagattttatagttagtaaaagtgggaaggtagaattagaattttagtagtttggttttgagagaatttttttgattgtaaaggtgaatttttaatttattttttgaaataattaagatgggaacgaggtgggaaagagtgtttaaggtttttgaataataaagatacggattagggtgttgtttgttgttggtttgaaagagtaggcggggacggtggaaaataggcggtggaaggagggtgtttgggagttaggtcgggttgagtcgtgg

SEQ ID NO: 149 - DNA, 6378 bp, Artificial Sequence
  chemically treated genomic DNA (Homo sapiens)
aaattaggttgtggtttcggcgaaattttttagttttattatagagtggtttcggttagaaatttgtagttgtttttatgtttagacgttgtttatcgaaggttttgagttggaaaggaaaagagagagagaaaaagaaatataaaatttaaattttgggtttattttttggttggtttgttaaaatatgttattggttgagggtagttgtttaggtttttggtttttagaataaagaattgaataaagtatataagtaaggtaagttaaagtatagatttattttaaatgaaagtatattttataaggaagaagcgattttaaataagaagtttaggagtattggttatagaattttttggagtttatatattttttaaaggttttttattggtttacgttagtgatttgcgattaatttgattggttgaagtataagtttgtgattagtttgattggttgtgggagcggattaattagaggtatttttattttttagttgttaggtagtaattgttgtatagtaaaaggagggttttaaagggagtagtttttgatatttagttagtttgagttggttttaggttttttgtttttagaatttatttttttgttttaatagtatattatatttatttagtttttattgtatataattatttattgtttttagttttatttgttagtttttgttttgtaaaagttatattgttgaggtcgtgaaagtatagttgagttttgaatattatgggtttgaaatacgaaggtttatttaaatagagattttttttagtaaatgtattggaaaagttttttgagatttgtaataatttgaaaaaatttgtagatgaattgtatggtttaaaaatattttttgtttttttttttattttttttgtttttgttatttttgagatagtaagattagttttttttttttttttttttttttagtttatttaatatgaagataatgaggataaagatttttataattattatttttgtttaataaatagtaaatatattttttttatgatttttttaagaatttttatttttagtttattgtaagaagagagtatataatatatataatatataaaataatgttaaataattttatattattaataagtgttttgggtattagtagggaattagaggttaagttttgggggagttaaaagttatatatggattttttttatgttaggtaggtatttttttatattatagtgttaaaaagttaattgtaatttgattttattggtatattaaggtatttaaaatgtttagttaaggtttttttttgaaggaattaaaaattatatatatatatgtattttgatatagagttttattttttgttatttagtttggagtgcggtggtatgattttggtttattgcgattttcgtttttcgtatttaagtgatttttttgttttagtttttatttttgagtagttgggattataggtgtttgttattgtattcggttaagttttgttattttagtagagatagggttttattatgttggttaggttggttttaaatttttgatttgagatgatttatttgttttggttttttaaagtgttgggattataggcgtgagttatcgtgtttagtttgatggatgtattttttagtatggataaattataaaataaaatgaatattatatatatatttaaatggagttagtgtatttattaataatatagggaatgttgtttatatattggaggattttttaattttggtttggaggtttgcgtgttgatttataaaagtaattgtgatgtaatatttatttattttaggattatttataaaaatttaatattaattatatgaatatgattgtatttttggttttatagtatattttttagtagagttaaagtgaaattattttattatttatatgaaatattaggatttatggagtaggtattaaattgagtggttaggagtatttgtttttagggttgtttttaatttatatatagattaagggattattaatttattatgataaaaaagggttgttatttaaattttttgaaattgtttttttttgtttttgtttagtatgtagaatgttgaatgtaaagaattttatatttatatagggttggtttttaatttatgtatatattttagaatgttatgatatattaataggtgttgtaatgtgatgtggttgtgacgacgttttatgttgtttaatgatgtattataaaatatttaaaatggttagttttaatgtgaagtaaatattaagtttatggattgaaaatattgaagattattttatttgttttgtagttttatttataagagttttttagtttttaaatatgatttatatagtgtaattattataatattaagggtatttatgatagttgttatttattgagtatttattttatgttaggatttggtattgtttatgtattttatttatttgatttgtttaaaagtatgtagttatttttattttttatttttagatgaggaatttgaattttttaaatattaagtaatttagtatgtgttggaatttgtatatgaaaatttatattggtttgaatttaaagtttatttaaagtattaagttatgttgtttttatgatttaggttatgtgtttagattatgtaaatgtttattttataaatttttaattggaaaaagattaagtaatttttaatataaatagtttatttttttaaaagtgaaatatttttgatgattgatttgtataatgtgtttttattttaataagaagagtaagaaaatggaaagtattgtatatgttaaatagtttgatttaattttattgtatatatatattaaaatattatgttatatattataaatatgaagttatttgttaattaaaaaaaaaaagaagaaaagagaagaataggtttagaatagaaatgaagtttatgggagtataaaggtgtaatagtgtagattaattgcgtgagttttaaataaagtttttaaaagaattttttgaaatttttgggtaagttttttaatttttttgaattataattgttttatttattagaatagataatagtgtaggtttttattttattttggaatgggtatgatatttttttagttttattttttatatttggttatatttttatattaggtttttattttatgtaaaagatttgttgggaaggtttttgaggggtttttttatttttttatagagttttttattaaatagaggtaaaattaaattatgttttttttttttatggtattttgaattttttttattatgtgatttattagaattatttatttatgtatttggtttatattattgagtttttggtgaatttatattgtttttttttataaaatataaagtaggtggtttatataaagtatatttttaataaatgtggaatagaaggtatgatttatgattattttattttattaaatgtatgatattatttggattacgtattgtgatatattattaaaaataagtgatttttaaaaaaaaatttttagaattaggatagatgtattgtgatttacgttattattattattattattattattattattattattattattattattttgagtcggagttttgttttattatttatgatggagtatagtggtatgattttggtttattgtaacgtttgtttttcgggtttaagggagttttttgttttagtttattcgagtagttgggattataggcgcgcgttattacgtttagttaattttttttgtatttttagtaaagatggggttttgttattttggttaggttgttttcgaatttttgattttaggtgatttattcgtttcggttttttaaagtgttgggattataggtatgagttattgcgtttggtttgatttatatttttaaaagggttgtgttattgaaataattaggaaagaattatatttttaggtgaaggaaaatgaataatgtttttttttttttttaagttaagaaaaatttagttttttagttgatagtatatttaagttagttaaattaagtagttttttgttttcgttttattttatttatttgttatgattaaatattttattaggttgtaagtgggtttttaacgttgatttttttattttgggatttgagaggtatagtttagagtattattttttatttaaatgttagtatgttattagtagaaattattttttaggttaaatattgttttttttagaaattttttttttaaggattagtttaaatttaaatttattagagaggaaaatagtagattttagagttagatgaagaatttatatttatttggttttgaatattatcggttgtgagatggtgtaggtaaaattttaagtgtataatttggtaataataaattattaataaatattaatgttgatgaggtttttgggttatataaagaaatagggagtgaggggatttgaaattttggttattttatagaaatgggtgggaaggggtttttgattgagatagaagtttattttatatgaagtaattttttattaagagttttttcgttttttatttttgttggaaatattaggtaaagttatttttggttttaaagtatttttatatttaaatacggaatttttttatttaatttttgtttgttgtagatgttaagtatataaagaggttgttagagtttgaaatatttggatttttgttaggtattagtttcggaattttagttttgttcgtttttaaaaacggtttgtagttagaggtttaagttttatttttttttagcgaatttttacgtacgagggaggcggggcgtgtgtttttcgcgcgtggttttcgggtagtattttttggggcgtcgtttgtttttatttacggtcgggttttgacgttatgggttgcggttttttttcggttgagtttataaagcggtaggtgcgcgtcgttttatagacgttcgtatatttgggtgttagcgttttagaggtttcgggatagttcgaggcgtcgcgttcgtcgtttcgagttttttaagttttcgagagcggcgtatattttcggtttttattcgtttttttaatattcgttcgttttggcggtagttcgtgttttagagatcgagttgttttagagatcgagacgtcgtcgttgcgaaggattaatgagagtttcgttgttatcgtcggcgttagtggtgttgtcgtttttgatattcggtttaggtgaggatttatcggcgttgaattgttgggttttttttttatggtaggttttgttttttgagtttggtttttgtttttttaaaaatcgttttttagttttttcgattttgcgtcgtaggaggtgattattgtagttttttttttaggaggaaaagagaagggtagatgttttaaacgtttaggataaggtgttttagagaatcgttgtattttttttttagtttagttgagaagacgggagagattatttgaatttaatttttcgttttatagattaaaagattaaaaagattaagatttagagaggtgaagtgattttcgtagatattggatttagtagtgtttgttgttttttgtttaattttttatttttgtttagtgattttttttttatttttttagagggatttagagtatttcggcgagaggttaaaagtattattttgatgttgttttattgagatttaagaaaaagtaagataaagtagtggtttaattttgggttttaaattttatttagtatttagtttattgtttatgtagtaataataataatgataatgaaaaatgataataataatcgatataattaattattgtttatattattttaaaagattattttttaaaaatattttttaaaaatatgaatatattttttaaaaatattttttaaaaatatgaatatatttgaagaaaatttgatatttgtatttaaaatttatcgaaataggttaggatggtattttagtaaaaaaagaaatgtatttggaatgtgaagtgatgggaatttttagatattatttattaagtaattgtattagattaatttgttaatttggcgggatttttttgatgtggaaattaatgtggattatttgtggaaaagaaaaattttagaaaagtatttttgtaattgggatagttgaatttgtttgttggtaaaaatgtaaagttttttttatagaaatgatttaattataaataatagtatatgtgtaataattgttttgatgttaaaagataaatttttttatttaatatagttgattcgaaaggtattttattttatttttttttttttttttttatttttttttttgtagg

SEQ ID NO: 150 - DNA, 6378 bp, Artificial Sequence
  chemically treated genomic DNA (Homo sapiens)
tttgtaggggagggaataagggaagaaaagaaaaggtaaagtagggtgtttttcgagttagttgtgttaggtagaaaagtttattttttgatattaaagtagttattgtatatgtgttattgtttgtgattgagttatttttatgaaagaaattttatatttttgttagtaagtaaatttagttgttttaattatagaagtgtttttttgaagttttttttttttatagataatttatattaatttttatattaaaaaaatttcgttaaattggtaaattaatttaatataattatttgatgggtaatgtttaaaaatttttattattttatattttaaatgtatttttttttttgttagaatgttattttggtttatttcggtaggttttagatataaatattagattttttttagatgtgtttatatttttaaaagatatttttaaaagatgtgtttatatttttaaaagatatttttaaaagataattttttaaaataatataaatagtggttaattatatcgattattattgttattttttattattattattattattattatatagataataaattgagtattaagtaagatttggggtttagagttaagttattgttttattttgtttttttttaggttttaataaaatagtattagagtggtgtttttaatttttcgtcgggatattttaagtttttttaggaaggtaaagaagaaattattagatagagatggagaattaggtaggaggtagtaaatattgttgggtttaatatttgcggaaattattttatttttttagattttggtttttttaattttttaatttgtgaaacgaagggttaggtttaaatgatttttttcgtttttttagttgaattaaagaaaaagtatagcgattttttgggatattttgttttggacgtttgagatatttgttttttttttttttttttagggagggagttatagtgattattttttgcggcgtagggtcgggggaattaaagggcgatttttagagaagtaagagttaaatttaagaggtaaaatttgttatgggaggagagtttagtagtttagcgtcggtgaatttttatttgagtcgagtattaagagcgatagtattattggcgtcggcggtagtagcggggtttttattggtttttcgtagcggcggcgtttcggtttttggggtaattcggtttttgggatacgagttgtcgttaaaacgagcgggtgttggaagagcgagtggagatcgggagtgtgcgtcgttttcgaaggtttggggagttcggggcggcgggcgcggcgtttcgggttgtttcgggatttttggggcgttggtatttaggtgtgcgaacgtttgtagggcggcgcgtatttgtcgttttataggtttagtcgggagggggtcgtagtttatgacgttaaggttcggtcgtgggtggaggtaggcggcgttttagaaggtgttattcgaaaattacgcgcggaggatatacgtttcgtttttttcgtgcgtaaggattcgttgagaggaagtggaatttaaatttttagttgtaagtcgtttttgagggcgagtaggattggagtttcggagttagtatttgatagaagtttagatgttttaaattttgataatttttttgtatatttaatatttataatagatagggattaaatagaagagtttcgtatttagatgtaaaagtattttaagattaagagtgattttgtttgatgtttttaataaggataaaggacgagagaatttttaatgaggaattgttttatgtaggatgggtttttattttaattaagagtttttttttatttatttttgtgaagtggttagaattttaaatttttttattttttatttttttatgtggtttaggggttttattaatattaatatttattgatgatttattattgttaaattatgtatttaaaattttatttatattattttatagtcgataatgtttaaagttaggtggatatgaattttttatttgattttgaaatttgttgtttttttttttgatgaatttaggtttaaattgatttttgaaaagagggtttttgggaagaataatatttagtttaaaggataatttttattggtggtatattggtatttaggtgaagagtagtgttttagattgtgttttttaaattttaagataaaaaggttagcgttgagggtttatttataatttagtaggatatttaattatgataagtagataaaatgaagcggagataggaagttatttaatttgattaatttggatgtattgttaattaaagaattggattttttttgatttgaggaagagaaaaagtattgtttatttttttttatttggagatatgatttttttttgattgttttagtaatatagtttttttaagaatgtaggttaggttaggcgtagtggtttatgtttgtaattttagtattttgggaagtcgaggcgggtggattatttgaggttaggagttcgagagtagtttggttaagatggtaaaattttatttttattaaaaatataaaggaaattagttgggcgtgatggcgcgcgtttgtagttttagttattcgggtgggttgaggtaggagatttttttgaattcgggaggtagacgttgtagtgagttaaggttatgttattgtattttattatgggtgatagagtaagatttcgatttaaaataataataataataataataataataatgatgataatgataataataacgtgagttatagtgtatttgttttaattttggaaatttttttttaaaaattatttatttttaatggtatattatagtgcgtagtttaaataatattatgtatttagtagaatgaaataattatgaattatgttttttattttatatttgttgagagtgtattttgtgtgagttatttgttttatattttatgaaggggagtagtataggtttattaggagtttagtggtgtgggttagatatatagataagtaattttaatagattatatgatgagaagggtttagagtgttatggaaaaaaaggatatggtttaattttgtttttgtttaatggaaagttttgtggaaagatgaagaggttttttaaaggtttttttagtaaattttttatatggaataaagatttgatgtgagggtatgattaagtatgggaaataaggttagaaaagtgttatgtttattttaaagtgaagtaggggtttgtattgttatttgttttggtggatgaggtaattgtgatttagagagattgagagatttgtttaaagattttaaaagatttttttggagattttgtttggagtttacgtagttggtttatattgttgtatttttatgtttttataggttttatttttgttttaggtttgtttttttttttttttttttttttttttgattgataagtaattttatatttgtagtatatgatatgatgttttgatatatgtatataatgaggttaaattaagttatttaatatatgtaatattttttatttttttattttttttattgagatgaaaatatattgtgtagattagttattagaaatgttttatttttgggaaagtggattgtttatattggaaattgtttagtttttttttagttggaaatttatagggtgaatatttatatgatttaggtatataatttagattatggggatagtatagtttagtgttttggatgagttttagatttaaattaatgtgggtttttatatataaattttagtatatattaagttatttaatatttgaaagatttagattttttatttgaaaataaaaaataaagataattatatgtttttaagtagattaaatggataagatatatgaataatattagattttagtatagagtgagtgtttaataaatggtaattattatgaatatttttgatattatgatagttatattatgtaaattatatttaagaattgaaggatttttataaatggagttatagagtaagtgaagtaatttttaatatttttaatttatgaatttagtatttattttatattaagattaattattttgggtattttatggtgtattattgggtagtatggagcgtcgttataattatattatattgtagtatttattgatgtgttatggtattttggaatatatgtatgagttggaaattaattttgtgtaaatgtaggattttttatatttaatattttgtatgttaggtagagataaaggggaataattttaaaaagtttgagtagtagtttttttttattatgataaattgatggttttttaatttatgtataggttaagggtagttttaagagtaaatgtttttaattatttagtttgatgtttattttatgagttttgatattttatatgaatagtgaaatgattttattttggttttgttgaaagatgtattataaaattaaaagtataattatgtttatataattgatattgaatttttatagatagttttagagtgagtaagtattgtattatagttatttttatgagttaatacgtaaatttttaaattagaattaagaaattttttaatgtataagtaatattttttatattattaataaatgtattagttttatttagatatatatataatgtttattttattttataatttatttatattgaagaatatatttattaggttgggtacggtggtttacgtttgtaattttagtattttgggaggttaaggtaggtggattattttaggttaggagtttgagattagtttggttaatatgatgaaattttgtttttattaaaatgataaaatttagtcgggtgtagtggtaggtatttgtagttttagttatttaggagtggggattgaggtaggggaattatttgaatgcgggagacggagatcgtagtgagttaagattatgttatcgtattttagattgggtgatagagagtgagattttgtattaaaatatatatatatatataatttttagtttttttaaaaagaagttttaattgagtattttgagtattttgatatattaataaagttaaattatagttgattttttaatattgtggtgtgaaagggtgtttatttgatatgagaaaaatttatgtataatttttgatttttttagaatttaatttttaattttttattggtgtttagaatatttattgataatataaagttgtttaatattattttgtgtgttatatgtattgtatattttttttttataataggttagagataaaaatttttaagaaaattataagagaaatatatttattatttattaagtaaaagtggtaattataaaggtttttatttttattatttttatgttgaataggttgaggaggagaaggaagaggaagggttggttttgttgttttaggagtggtagaagtagaagaggtggaaggggaggtaggaaatatttttaggttatatagtttatttgtagatttttttaaattgttgtaaattttagaaaatttttttaatatatttattgaaaaaagtttttgtttaagtggattttcgtattttaaatttataatgtttaaggtttaattatatttttacggttttaatagtgtggtttttgtagagtaagaattggtagatggggttgagggtagtggatgattatatataatagaaattaagtaaatgtaatatgttattgaggtaggagaataggttttggaggtagggaatttaaggttaatttaggttgattggatattagaggttattttttttgaaattttttttttgttgtgtagtagttgttgtttggtagttggaaaatgaaagtatttttgattggttcgtttttataattaattagattggttataggtttatgttttaattaattagattgatcgtaggttattagcgtgaattaataggaaatttttagagggtatataaattttagaaaattttgtaattagtgtttttgagttttttgtttgaggtcgttttttttttgtgaagtgtatttttatttaaaataaatttgtgttttggtttgttttgtttgtgtgttttgtttagttttttgttttaaaggttaagaatttggataattatttttaattagtaatatgttttggtaagttagttaggaggtaagtttaaagtttaggttttatatttttttttttttttttttttttttttttaatttaggattttcggtggatagcgtttaagtatggaggtaattgtaggtttttggtcggggttattttgtggtgaaattgaaaggtttcgtcggggttatagtttggttt

SEQ ID NO: 151 - DNA, 5536 bp, Artificial Sequence
  chemically treated genomic DNA (Homo sapiens)
tgtagtgtttttgagagggtaaataggtataattttaagagaaaataaaggaaaagatttttttttaagaaaatagattttttttaaataattagtttaatttattaaattgtatgaatgttttttttttaattttttattttaaaaaaaaatgttttttattttgttgatgttttataagattgagtgattatttttttttgattattttaaaaagagataattgtgaaattgttattttttagtatagagtagtttataagtttatacgtttgtttttaattttgtattgaaatgtttatatttgaaattatttaatatttgttattttattaaatttttaaagagaatgtttatgatttatatttatattttgtgatataatatttatgaaggtattttgtacgtttttttgttttgatgttagttatttttttgttttattgatgatgtttataagaaatttgtgttttttttttattatgtatttgtttttttaaatatttttgttggagtttgaagagaggtaggtgattgtgaataaattattgggattatgttttataatattttattgtgggttaagatttttataaatatattgaatatgaaaaggggggtgtttttagtgtgtttttaaagaataattttggaaagtgtagggtacgtgattttttaagtagtgttattgtgtagtttaaaggaggtagatgttattatttttatataaggatgaaattgcggaaaagaatttagttagtgttcgtttaaggatagatagtttattggtttagtttggattaaaatttaagtttttgatttgtagttatttaaattttagaaataattgtttattagttttgtgttatttttagatgggaagtagatgggtatttttttttaattggttttttttttaggtttggaattagttttttttgtgttaaagggtatgtagtttttatgggaggggagattttttttggtaagtaaagggttagttataaagaaaataatttttgaatttaaattttttagggtatttgaatgtgttttattaattaaattatagagaaatatttattattggttttttgtttttttggttttaaggataaatgagaaaaaggagagagtaataggaagataagtaagaattataaaaggaagtacgttaggtaatatacgatttttttaggtaaggcgttatattttttaaatgaacgtgttttttaggggaaaattttttattgtagtttaaaattttagttttttttaggaatttaggtatatttggattttatatttttattgaagatgagtagttttattaaggttttatagttagtgagtgatagtgtagacgaagaattggagttatttatttatttatttatttatttatttatgtaattatgttgttattttgttttaagttttgttatgattgattttatattattttgagaatgaaatttaaattttatagttaattatttagtttttgtttgtttttttttgtttttcgatttatatttttttttttttagtaggttttagttattttggttttttttttattttttaaatttattaagttttttttttttagtttgtaatttttttattgtttgtgagtatttttttgttggattatgggtttgatttttattttattatgttttaataatgtcgtgttatgttttttatgaagaaaaatatggggtgattttatttttttatttattgtttattttttgtttggaatgtatgttttttgagagtagtaaatagatttgttttgtttattgttttatttgtagtttttagaatagtgtttggtttatagtagatgttgagtaagtaattgttaaattaaatgttagatgaattttaaaatatattaagtatttattttatattgaatattagagattttaaaaaggaaaaggaagaatgtttattttagagggatttaaattttggtgattttaggtagttggtttttttattttgttatatatttattaaattttgtttagtaattggtagatttttggaaatttaggttatttgatttttaaaaatagttatttattatgattttagatgattttatggtgaagtgattatgtattttgttttgtttgggatagattttgtttatttttgttgtttagttataattattggtagtgttttttttgtttttaaattttagtttagatgataaattatgtggttattttatttattgattagttaatttataaatatttttaattatttttgttaaagtgatttaattatataaattatattaattttgaaatatgggaggttaaattatatttttggaaaggggtaattttattaagttaaaaataagataaaagataggatggatatagttttaattagtgagtttattaatgaagttagaattttttaagatatatttaatagttttgaaaagtgtaaataagattttatatgtaaattataatataggttaaggattttttattgtgttagaaattattttgtaaacgttatttgtatttttttataattattattatgatttttattttatagatgatgaaattgaggtttagagaggttaaataatttatttaaagttatatagaaaatgtgaagttggggatttaaatatatttttttgtgattttttgttttaattattatgtttattgttttttaaataagtaaataaacgtgaataatttgattaatgttttttgtgttaagtagttttgggaaatgttaggttaaattatgttaaatagtttgtttttttttgggatttttaaatgtttgtaatattagtgtgtttggcgaatttttagtgagtgatgtgggtatagtgtcgtttttattaattgggttatggtattttttgtgttaggagggaattaaagtttagaagaataaatattggtaaaggttgttttaggaattttagtagggttagtaattcgtttttttgtgggttaattttttttttgtgtaaatatagatttatcgatggagtttgagttaatgatttttgagggggttttaatttttttagttttaaataggatattatttttggattttttaggttttaggggttttattagtttattatttatattagtgtttttgataattttttattgtgtttttttattttttatgttaaattttttgatttgtttgtttttattttatttttttatttataagtttaggagtttttataggggattatataagttggttttggttagtgtgttattatattgtaataattgaaattttttgagtatttagggtgtaggagttgaagatgagaaaaagaaagattttttatagaaaaagaataaatgtgcgggttattttggttttttttaagatttttgtttgcggggaagagttggagggttagggagatggatgtggaggaggatagaagagagggtggagggttgtatttgtattttttagttaaagatgtttgtgttttttgagtttagtttagggtgttttgatttcgggaagatggaggttatagataaagaattaatagtattaaaatttgtttttttattagtttttttattgtaaatgtggggaggtgtaattaagttgataagtgtttgggtttttagcgtagtagggttgagtttttaatggtttttgttatttagttatgggtattttttattttttttttttttttttttttattttttgtatttatttttcgaagggatggggagttgcgtattgtgtttttgtaggcgtttgtttgttttttgtttagttttacggttgttttaggtcgtcgttggaagattgagttattttgacggaaggtttgttgagagttttttcgatgcgttgtttgcgaattggattttggttagtcgggtgtaagtggataattgtgcggtcgtcgagtgtagtagggtgagtcgttaatggttttgtgatttagttaggggtagttgttattattttatttgtttttttttagcgtcgtatttatttttcgaaatttttttgtttttatttgtacgattgaaattgataggttttagaagttagtttattatcgtgatttaggtaagtttgtttttgtatttggaataaagaggttgatttattggtttatggtttatgtatttgatataaattattaaaaaaaaaaatagaattatttaattattttttatttaagatttgttttttatgttttattattgttttttaatttgggtgggaaatgtttttgtttttataaatgtttatgaggtttttatagataagtttttattaaattatatttaaagggattgtagtttaaattagtatgtatagatattagttttttattttgttttgtggatttgttagtaaagtatttttgggatttttatgttgtttaagagttttggtttaaaatagatttcgaatggtattttagagggcgtattgtttatattttcggtatgtaatttaatagcgttcgtttttaggttttataaaaggggaggaggtagattagttttttttttttattgagaaagaagaggattggaaggtcgggcgtataaagtcgcgtagagagcgtgaaataaagtagtcggttcggaattggatttgggaggcgcggtgaggagttaggtttaaaatttgttggaggggagtaattagtttgtttttttcgttttttttttcgtttgcgtcgcgttttagaggttgtttattagttttgtgatttatttttatatttgttttttataaagagagaaatatatatatatatatatatttttttttttttttttaagagaaaatttttgttttaagagaaaataaggtaatattaatgaaggagagaagagttagttagaaattatttagtaaatttattatggattttaattagaacgtgaaatgtaagatagttgtggtgggagatagttagtgtggaaaaattgcgttgttttatgttttcgttaaggattgttttttcgaggtgagtgtggtcggtcgcggtttttacgagggggtcggttagtgggattttagtttcgaggtgggttttttcgtttttattcgtttttttttaaaaaaaaaaaaaaagaaaaaaaaaagtttttttcggtttttattatttttttttgattagattgcggggaaagggaaagtgcgttggaagttttagggttgggacgcgtttgtatatgggttggttagtttttgaaatttgttcgtttttgtgtgtataatttggggttgggagattcgggttagtagatttgtgagagtcgggtggggtgagtggggagtaggataggggtttcggaaagggtttatgtgtttagtgtgtggtttgatgtgtgaaggtttttttttttaattggggagcggggaggggaagggtgtttaatgggtgtcgtgcgtttaaacgtaatttttttgttttttttttttttttttttgtttattttgtttatttaga

SEQ ID NO: 152 - DNA, 5536 bp, Artificial Sequence
  chemically treated genomic DNA (Homo sapiens)
tttggatagataaaatgggtaaaagaggaaggaaagagggtaaagaggttacgtttaaacgtacgatatttattgaatatttttttttttttcgttttttagttaagaaagaaaatttttatatattagattatatattaagtatatggatttttttcgaaatttttgttttattttttatttattttattcggtttttatagatttgttgattcgaattttttaattttaggttatgtatataggaacgaataagttttaggagttaattagtttatgtgtaggcgcgttttaattttaaaatttttagcgtatttttttttttttcgtagtttaattaggggaaagtagtaaggatcgagaaagatttttttttttttttttttttttttttaagggaaaacggatgaaagcggggaggtttatttcgggattgggattttattggtcgattttttcgtggaagtcgcggtcggttatatttatttcggggaagtagtttttggcgaagatatggagtagcgtagtttttttatattgattgttttttattataattattttgtattttacgttttgattaggatttatgatagatttgttggataatttttggttggttttttttttttttattgatgttgttttatttttttttggaataggaatttttttttaagaagaaaaaaaaaaatatatatatatatatatatttttttttttataaaaagtagatataaaaataaattataaggttgatgggtaatttttgaaacgcggcgtagacgaggaggagagcgagaggagtaggttggttatttttttttaataagttttaagtttgattttttatcgcgttttttaagtttaatttcgagtcgattgttttgttttacgttttttgcgcggttttatacgttcggttttttaattttttttttttttaatgagaggaggaaattgatttgttttttttttttttatggagtttgggagcgagcgttgttgggttgtatgtcgaaaatgtaagtagtgcgttttttagggtgttattcgggatttattttagattaaggtttttagataatatgaagattttaaagatgttttgttgataagtttatagggtaaggtgggaaattggtatttgtgtatattgatttgaattataatttttttaaatatagtttaataggggtttatttgtagaagttttatgagtatttatgaaaataaaaatattttttatttaagttaaaggatagtgataaaatataggaagtaaattttgggtggagaatagttgagtggttttatttttttttttaatggtttgtattaggtatataggttatggattaatagattagtttttttattttagatgtaagaataggtttgtttgggttacggtagtagattggtttttgaaatttgttagttttagtcgtataagtggaggtagaaaggtttcgaggggtgggtacggcgttgggagaggataagtggagtggtggtagttgtttttggttgggttataaagttattggcgatttattttattgtattcgacgatcgtataattgtttatttgtattcggttggttaagatttagttcgtaaataacgtatcgagagagtttttagtaagtttttcgttaagatagtttagttttttagcggcgatttgaagtaatcgtgaggttagataaaggataagtaggcgtttatagagatataatgcgtaattttttattttttcgaggggtgggtataggaggtgggaggggagaagaaagagaagtggaagatgtttatgattgagtgataaaggttattggaaatttaattttattgcgttagggatttaaatatttgttagtttagttgtatttttttatatttgtagtgaggggattggtgggggggtagattttgatattattaattttttatttatagtttttattttttcggaattaaagtattttagattggatttagaaggtataaatatttttagttgaaaaatgtagatataattttttatttttttttttgtttttttttatatttatttttttagttttttaattttttttcgtaagtaaaaattttagaaaggattagaatagttcgtatatttgttttttttttatgagaagttttttttttttttatttttagtttttgtattttaaatgtttaggaggttttaattgttataatgtagtagtatattggttaaaattagtttatatggttttttgtggagatttttaggtttgtaaatgagaagataaggtgaaaataaataaattagaaagtttaatatgggaagtgaaaaggtataatgaagagttgttaaaagtattgatgtaagtagtggattggtagggtttttgaagtttaggggatttaggaatgatgttttatttggggttgagaaaattggagtttttttaaagattattgatttagattttatcggtgggtttgtgtttatataaggggagggttgatttatagagaagcgggttgttggttttgttagggtttttagagtagtttttgttaatgtttgtttttttgagttttagtttttttttgatataaagggtgttatggtttaattagtgagggcgatattgtatttatattatttattgaagattcgttaagtatattaatgttataaatatttaaaaattttagagaaaagtagattatttaatatagtttaatttagtattttttaaaattatttaatataggaaatattaattaaattatttacgtttgtttatttgtttaaagagtaatgggtatagtagttggggtaggagattataaagaggtgtatttgggtttttaattttatattttttgtatgattttggatggattatttagtttttttgagttttaattttattatttgtaaaataggagttataatggtaattatgaggaaatgtaagtgacgtttgtagaatggtttttggtataataaagagtttttgatttgtgttatagtttgtatgtaaaattttatttgtattttttagaattgttgaatgtgttttgagaaattttggttttattggtggatttattaattggagttgtgtttattttattttttgttttatttttaatttaatgaaattatttttttttagagatatgatttgattttttatattttagaattgatgtagtttatatggttaaattattttaatagaaataattaagaatgtttatgaattggttgattaatgaatagggtaattatataatttattatttaagttgggatttgagagtaaaaggggtattattaatgattgtggttggataatagaggtaaatagggtttattttaggtaaaataagatgtataattattttattatagaattatttggaattatagtggatgattatttttggaaattaggtgatttgaatttttaggaatttgttagttgttgagtaaaatttaatggatgtataatagagtagaaaaattaattgtttgaagttattaggatttgaatttttttagggtaaatattttttttttttttttttaaaatttttagtgtttagtgtgaagtggatatttaatatattttaaaatttatttaatatttagtttaataattatttatttagtatttgttgtaaattaggtattgttttaggaattgtagatagagtagtaaataagatagatttgtttgttatttttaaaaagtatatattttaggtaggagatagatagtaaataaagaagtaagattattttatgtttttttttatagaaaatatggtacggtattattaaagtatagtaaggtagggattagatttatggtttagtagaaggatgtttatagatagtggaaaggttataggttggagggaaagggtttggtaggtttgaggaatagaagaaaggttagaatgattagggtttgttgaaggagggagagtgtaggtcggggagtaaaaggaagtaggtaggggttgaataattggttgtagaatttggattttatttttagggtaatgtgaagttagttatggtaggatttggaatagggtagtagtatgattatatgaatgaatgaatgaatgaatgaatgaatgattttagtttttcgtttgtattgttatttattagttgtgaaattttgatgaaattgtttatttttaatgagaatatgggatttaagtatatttaaatttttggaaaagattaaaattttagattgtaataaaaggtttttttttaagaaatacgtttatttagaaaatgtgacgttttatttgggaggatcgtatattatttagcgtgtttttttttgtgatttttgtttgtttttttattattttttttttttttttatttatttttaagattaagagaatagaaaattaatagtaaatatttttttatgatttagttaatagaatatatttaggtgttttaaaaggtttgagtttaaaaattattttttttgtggttaattttttatttattagaggaaatttttttttttatagaaattatatattttttgatataaaaagggttgattttaggtttggagagagaattaattgagaaagagtatttatttattttttatttagggatagtataagattgataaataattgtttttgagatttgagtgattataagttagggatttgggttttagtttaggttaaattaatgaattatttgtttttgggcgaatattgattaaattttttttcgtagttttatttttatgtgaggatgataatatttgttttttttaagttgtataatagtattgtttaaaaaattacgtgttttgtattttttaaaattattttttagaaatatattaaaggtatttttttttttatgtttagtgtatttatggagattttggtttatagtggaatattgtaaggtataattttaatagtttatttatagttatttgtttttttttagattttagtagaagtgtttgaaggagtaagtgtataataaggaggaagtataggttttttataggtattattaatggagtagagagatggttgatattaaagtaagaaaacgtgtaggatgtttttatagatgttatgttataaaatatggatatgagttatgggtattttttttgagaatttaataagatgatagatattaaatagttttaaatataggtattttaatataaaattaaagataagcgtgtaaatttgtaaattgttttgtattgaaaggtggtaattttataattgtttttttttggggtggttagaagagggtgattatttagttttataaaatattaataaaatagaaggtatttttttttgaagtgaggaattgaggaaagaatatttatataatttaatggattgaattggttatttaggaagaatttgtttttttggaagagaatttttttttttatttttttttaaaattatgtttatttgtttttttaaggatattgta

SEQ ID NO: 153 - DNA, 5982 bp, Artificial Sequence
  chemically treated genomic DNA (Homo sapiens)
attatttttaagaagaatacgtataagagaaagaaggttaagttaacggttttaaaatattataaggtggataagaatggtaaaattagttgtttttgttgtgagtgttttttaggtgagtgtggtgttggagtttttatggttagttattttgaaagatattattgtggtaaatgttgtttgatttattgttttaataaattagaagacgagatgggttaataaaaggtatgaattaaaaagtaaaaataggttgagtgtggtggtttatggttataatttttgtgttttgggaggttgaggtgggagaatggtttaaggttaggagttcgaggttttagtgagtaatgatggtgttattgtattttagtttgggtgaaagagtgagattttatttttaaaataaaaataaaattttaaattatgatatttagaagttaaagtaatatgtttatgttaatgaaaatattgtttagatgaattatttgagaaatttatttaaattttatttaaaataataaaaatggtttatgttagtattatttatattataaagaagagatttttattttaatttttattaaaaattgatagtattttttttttttattggtttttatatttaattgtggagaaagtattaatttatttgtttttttttaaagattgtgtttattggatgatattttattatatttatggtttgtgttaatttgtttaatgtcgaattaaaattaggagaaattttttttttagaaatgaggttttgttatgttttttaggttggttttaaatttttgggtttaagtgatcgtttttttttagtttttagattagttaggattataggtatgtattattgagtttggttgggagaaatatattttggttatgaattgttttttgaataaaatggaaagtgggttgggtatggcggtttatgtttgtaattttagtattttggaaggtcgaggtgggtggattgtttgagtttaggagttggagattagtttgggtaatatggtgaaattttatttttaataaaagtataaaaaaattagcggggtagtggtgacgggcgtttgtaattttagttattgaggaggtagaggtaggagaatagtttgaatttgggaggtagaggttgtagtgagttattatggtattgtattttagtttgagtaatagagtgagattttgtttaaaaaaaaaaaggaaataaaaaggaaagtggattgatattttttttgtaggaatagtgttttttttgtatttaaagttataattttattagtgtttttttgtttgtttgtttgtatttttttttgataggtttagggttttttttgtatttaaagtaagaattttattagtgttttattgtttgattgttggtttgtgttttttttgcgatagagttttgttttgttattaaggttggagcgtagtggtatgatttcggtttattgtaattttcgttttttaggtttaagtgattttcgtgttttagtttttcgagtagttgggattataggtatgtgttattatgttagattaattttcgtatttttagtagagatggggtttcgttatgttgattaggttggttttaaatttttgggtttaagtgattcgtttgttttggttttttaaagtgttgggattatagtcgtgagttattatgtttggtttgtaattttattagttttgattttaagatattttttttagattgatttatattttataaaataatttttatttaaatgaaaaatgtttttttttgtattttgaatttttaatgataaattagataggaagtttttgggtatggggtttttatgtattgtttatatgttgtaagcggatttatattgtgtatattagtggtttttacgtttaaaataaatatttggtagtaggtatagggtagatattgttattttatgttgtgtattatgattttatgtgatatttgataaagaattttgttaatagttttgttatatttttttttttttttttttttttttagattgagtttcgttttgttatttaggttggagtgtagtggtttaatcgattttagtttattgtaatttttattttttaggtttaagcgatttttttgttttagttttttgagtagttaggattataggcgtgtgttaatacgtttagtttatttttgtatttttagtagagatggggttttattatattggttaggttggttttgaatttttgattttagatgatttttttgttttgattttttaaagtgttggaattataggcgtgagttattgtatttagttagttttgttgtattgtttttaaatagaatatgttattaattttgtagttagttgtgtaagtagttttataataaaatgatttttattaatttttttttatagaaatgtaatttgattttttttaattataaaatgtatttatattatataggaaaatattttgtatttattttggaaaaatttattttatttggtaaagaagttatagtatttttttttttttttttttgagatggagttttgttttgtcgtttaggttggagtgtaggggtatttcggtttattgtaatttttgttttttaggtttaagcgatttttttgttttagttatcggagtagttgggattataggtacgcggtattatgttcggttaatttttgtatttttagtaaagatggggttttattatgttggttaggttggtttcgaatatttgattttgtgattcgttttttttggttttttaaagtgttgggattatagttatttcgtttagtttagttaatgtattttttttgggtggatgatttttttttttttggtgatttataaatataataataaaatgaaagaaaaatgaaattttaatagatgtaaataataatatgtaaattatgttaaaatatttttgtagtaaattaaataagtggattaatgtaatttgcgtagtatatatataatttttaagaatgtaaagttgtttaatagtataatgggatttttgttaaaattttaattaaatttgtattaaatattttgtgagcgatatatgaaaatggaagtattttgtagtgttaaaattgtagtgttaaaatagggggatgggtggaataggtttttagtgttagatttttttagtttgttttttatattatttatttgttggatgttttttgtttattttttttgtttttgtttttttaattgtaaaatggaaatagtagtagaatttattttatcgttgttgtgaggattaaatgagtaaatatatataaagtattttggatagtgtttatttcgaatagtttaatgttttttattattaggaaataaaaattagtcgggcgtggtggtgcgcgtttgtaattttagttatttaggaggttgaggtaggataattgtttgaattcgggagggagaggttgtagtgagttaagatcgtattattgtattttagtttgggtgatggagtaagatttcgttttagaaaaaaataaagaaaaaagaaaataaatttgtatagttattattttattgattttttattaaaaattttttattggttaggtgtggtggtttacgtttgtaattttaatagtttgtgagatcgaggcgggtagattgtttgatgttaggagttcgagattagtttggttaacgtcgtgaaattttatttttattaaaaatataaaaaatattagttaggcgtgtggcgtgcgtttgtaattttagttatttaggagattgaggtaggggaattgtttgaatcggggaggtggaggttgtagtgagtcgagattgcgttattgtattttagtttgggcgatagagagagattttgttttaaaaatagataaataaaattttttattttgtttttgttattgattaaagaagttatttatttttaaattattttttttatttattgtttttaattttggttggtaatattttttatattaaatcgttaatatttggatttttttagattatcggttttatagtaggtatttaaaagttagttatttaatttttttattagggataaaagtttttaaaagaggaaaaaaattggaaaggattataaattattatgtgatgtttaggtgttttttagtatttaaagaggatttataagatatattgtttgtacggtaattatttagacgaatttattattaagcgaaggtttttagtaaaatatttttttttttttttttgagacggagtttcgtttttgttgtttagattggcgtgtagtggcgttatttcggtttattgtaatttttgttttttaggtttaagcgatttttttgttttagttttttaagaagttgggattataggtatgcgttattacgttcggttaattttgtatttttagtagagacggggtttcgttatgttggttaggttggtttcgaatttttggttataggtgattcggtcgtttcggttttttaaagtgttgggattatagacgcgagttatcgcgtttagtttaaaatatttattttaattgtattttaatgacgttattcggttattgattttttacgtaaggagggcgagattagggagatagttggatttttttttcgttttttttttattggattggttggcgtagtgagtagttttgtttttggacgatttggtatttttattggttaattttttttaggaggttggtcgtgtgttgatttcgtttattatataggcggggttttttcgtcgtaggggttgggatgttgggggttgttgaagtcgttattttggatttcgcggtagcggaggcggcggttaggcgtcgtttttggggagtggtttttttttttttttttttttcggttcggtggcggcggttttttttattgggggggggggtggcgcggcggcggtggtatttgcggttatggcggcgattattgttaatttcggtgaggagacggaggattggggcgtttttaaaggggaggggtcgaaggggttgataattaaggagatttagggttgaggggacgtagttggagttgaaggcgtcggggcggggcgggggtcgcgagagacggtgggggagcggtgatttggggaggggttcgatttcggggatttgggtagattcgagtatatttaagggagcgagggggtaggtgggagttgaggggggttttttgttttgattttcgttggagcggtagttagtgcggggttggttcgtttttatttttcggtcggcgtttggtttgtgatgtggtttttttttaattttttgttcgttggagtcgtttgatgtcgaaaattgtaggtagagtgtttcggtttattttaagagtagtttggatttataaattttggattatattgttttttagttgaggcgttgtttttaaatatttaaaggtttagattttaatttaaaaaataaaaaatggatattttttgatatatacgacgtttttttaggttgttattttttattcgtaattttcgttttcgttttcgttttcggattatattttgaaatttagattttgtgttaagagggtttgtaggtttttgtttgttgagggtaggggtttgtgtaatggttatggtttcggataggtttttagttttatagttttaggtttaaattttgttaggtttacgtcgaggtaatttttaaatttttttagaaaagtttgattttatattattttttaattttaaaaaataattaaatattaaaaaggtttggtttgttttgtttaagagatggagtagggtgtagtgtagttttagagagattagatttttaaattattagttttagtttttttttttttatgttatagttatttttttttagaaggtattttattttaggggtttagtttattttggagattttggttatttttgttaaataaagtttatttttttttaaaaattaatata

SEQ ID NO: 154 - DNA, 5982 bp, Artificial Sequence
  chemically treated genomic DNA (Homo sapiens)
tatattggtttttggaaaaggatagattttatttggtaagaataattaaggtttttaagataaattagatttttaaaatgaaatgttttttaaagaggaataattgtaatatagaggaaagagggttgggattagtaatttgaagatttgatttttttagaattgtattatattttattttattttttagataaaatagattaaatttttttgatatttgattattttttgaaattgagaaatggtgtggaattaaatttttttgaaagagtttggaaattgtttcgacgtaggtttaataagatttaaatttggggttgtggaattaaagatttgttcggaattataattattatataaatttttgtttttagtaggtaaagatttataggtttttttaatataagatttaagttttaaagtatagttcggggacggagacggggacgggggttgcgggtgggaggtaatagtttaaagaaacgtcgtatatattaaagaatgtttattttttattttttaaattaaaatttaaatttttaaatgtttggaagtaacgttttaattaaagagtagtgtggtttagggtttatgaatttaaattatttttaaagtaaatcgagatattttgtttatagttttcggtattaagcggttttagcgggtagagggttaaaagaggattatattatagattagacgtcgatcgaggagtgagggcgggttagtttcgtattggttgtcgttttaacggaggttaggatagggagttttttttaatttttatttgttttttcgtttttttgggtatattcgagtttatttaagttttcgggatcgggtttttttttaggttatcgtttttttatcgtttttcgcggttttcgtttcgtttcggcgtttttagttttagttgcgtttttttagttttgggtttttttagttgttagttttttcggttttttttttttagaggcgttttagtttttcgtttttttatcggggttggtagtagtcgtcgttatggtcgtagatgttatcgtcgtcgcgttatttttttttttagtgggaggagtcgtcgttatcgaatcgggagggaggggaaaagaaaggttattttttagaagcggcgtttgatcgtcgttttcgttatcgcggaatttaagatggcggttttagtagtttttagtattttagtttttgcggcggggagatttcgtttatatagtaggcggagttaatatacggttagttttttaagaaaaattgattaatgaaaatgttaaatcgtttaagggtagggttatttattgcgttagttagtttagtgaagggagggcgaggaagaagtttagttgtttttttaatttcgttttttttgcgtaagaggttaatgatcgagtaacgttattgaaatgtaattaaaatgggtattttaggttgggcgcggtggttcgcgtttgtaattttagtattttgggaggtcgaggcggtcggattatttgtggttaggggttcgaaattagtttggttaatatggcgaaatttcgtttttattaaaaatataaaattagtcgggcgtggtggcgtatgtttgtaattttagttttttgggaggttgaggtaggagaatcgtttgaatttgggaggtagaggttgtagtgagtcgagatagcgttattgtacgttagtttgggtaataagagcgaaatttcgttttaaaaaaaaaaaaaaggatattttattaaaaattttcgtttggtggtggattcgtttgagtggttgtcgtgtagataatgtattttgtaaattttttttaggtgttaaagagtatttaaatattatatggtgatttgtaattttttttagtttttttttttttttaaggatttttgtttttggtgaaaaagttaaatgattaatttttgaatgtttgttatggaatcggtagtttaaaaggatttaggtgttaacggtttggtatgggagatattgttagttaaaattggaggtaatagatgaagaaagtaatttgagaatgggtaatttttttggttagtgatagggatagagtgaggagttttgtttgtttgtttttgagatagagtttttttttgtcgtttaggttggagtgtagtggcgtaatttcggtttattgtaatttttattttttcggtttaagtaatttttttgttttagttttttgagtagttgggattataggcgtacgttatacgtttggttaatgttttttgtatttttagtagagatggagttttacgacgttggttaggttggtttcgaatttttgatattaggtaatttgttcgtttcggttttataaattgttgggattataggcgtgagttattatatttggttagtgaggagtttttaatagggaattaataagatgatggttgtgtagatttatttttttttttttttatttttttttgagacggagttttgttttattatttaggttggagtgtagtggtgcgattttggtttattgtaatttttttttttcgggtttaagtagttattttgttttagttttttgagtagttgggattataggcgcgtattattacgttcggttaatttttgttttttggtaataggaagtattgagttattcgaggtaggtattgtttaaaatgttttatatgtatttatttatttaatttttataataacgatgaggtaggttttattgttatttttattttgtaattaaggaaatagaaataaagagggtaagtaagggatatttagtaggtaagtaatgtgggaggtaaattaaaggagtttgatattggaaatttgttttatttatttttttattttagtattataattttagtattataaagtatttttatttttatgtatcgtttataaaatgtttaatataaatttaattaaaattttaataaaaattttattatgttattgaatagttttgtatttttagaagttgtatatgtattgcgtagattatattgatttatttatttagtttattgtaaaggtattttaatataatttatatattattgtttatatttgttaaaattttattttttttttattttgttgttatatttataagttattaaaaagaaaaaaattatttatttaaaagaaatatattggttgggttgggcggggtggttgtaattttagtattttgggaggttaaggagggcggattataaagttaggtgttcgagattagtttggttaatatggtgaaattttatttttattaaaaatataaaaattagtcgggtatggtgtcgcgtgtttgtaattttagttatttcggtggttgaggtaggagaatcgtttgaatttgggaggtagaggttgtagtgaatcgaggtgtttttgtattttagtttgggcgatagagtaagattttattttaaaaaaaaaaaaaaaaaaatgttgtagtttttttattaagtaaaatggatttttttagaataaatgtaaaatgtttttttgtatgatgtggatatattttgtggttaaaagagattaagttatatttttgtagaaaaaaattggtagaaattattttgttatagagttgtttatataattagttataaagttaataatatattttgtttggagatagtgtaataaagttggttgggtgtagtggtttacgtttgtaattttagtattttgggaggttaaggtaggaggattatttgagattagaagtttaagattagtttggttaatatggtgaaattttatttttattaaaaatataaaaatgagttgggcgtgttggtatacgtttgtagttttagttatttaggaggttgaggtaggagagtcgtttgaatttggaaggtggaggttgtagtgagttgggatcgattgggttattgtattttagtttgggtgatagagcgagatttaatttaaaaaaaaaaaaaaaaaaaaaaaagtgtaataaagttattggtagaattttttgttaaatattatatggagttatgatatataatatgaaatggtaatatttgttttgtatttgttattagatgtttgttttaagcgtagaaattattgatatatataatatgaattcgtttatagtatataggtaatatataaggattttatgtttagaaattttttgtttggtttattattaaaaatttaagatataaaagaaaatattttttatttagataagaattattttgtgaggtatgagttagtttgaaaaagatattttgggattaaaattgatggagttataggttaggtatggtggtttacggttgtaattttagtattttgggaggttaagataggcggattatttggatttaggagtttgagattagtttggttaatatggcgaaattttatttttattaaaaatacgaaaattagtttggtatggtgatatatgtttgtaattttagttattcgggaggttgaagtacgagaattatttgaatttgggaggcggaggttgtagtgagtcgagattatgttattgcgttttagttttggtaatagagtaagattttgtcgtaaaaaaaatataaattaataattaaataataaaatattgatggagtttttattttggatgtagaaagaattttggatttattaaaaagaagtataaataaataaataaaaaaatattgatggagttataattttggatgtagaaagaatattgtttttataaaaaagatgttagtttatttttttttttattttttttttttttttagatagaattttattttgttgtttaggttggagtgtagtgttatgatggtttattgtaatttttgttttttaagtttaagttatttttttgtttttgtttttttagtagttggaattataggcgttcgttattattgtttcgttaatttttttgtgtttttattagagatgaggttttattatgttgtttaggttggtttttaatttttgagtttagataatttatttatttcggttttttaaagtgttgggattataggtatgagtcgttatgtttagtttattttttattttatttagaaaatagtttatagttaaaatatattttttttagttaggtttaatggtgtatgtttgtagttttagttaatttagaggttgaggagggacgattatttgagtttaggagtttgaggttaatttgggaaatatagtaaggttttatttttaaaaaaaaaattttttttgattttgattcgatattgaataaattagtataaattataaatgtagtaaaatattatttagtgagtataatttttgagaagaaatagataaattggtgttttttttatagttaagtatggaggttagtaagggggggaaatgttgttagtttttaataaggattgaagtgaaaattttttttttatgatatagataatattaatataaattatttttattattttaagtaggatttaagtaggttttttaaatggtttatttgagtaatatttttattaatatgaatatattattttaatttttaaatgttatggtttggagttttgtttttgttttagagatagagttttatttttttatttaggttagagtgtagtggtattattattgtttattggaatttcgaatttttggttttaagttatttttttattttagttttttaaagtatagggattatagttataagttattatatttagtttgtttttgttttttagtttatgttttttattaatttatttcgttttttggtttgttgaaatagtaagttagataatatttgttataataatgttttttaaagtggttggttataaaaattttagtattatatttatttgaagggtatttataataaaggtaattagttttgttatttttgtttattttgtaatattttaggatcgttagtttaatttttttttttttatgcgtattttttttgggagtggt

SEQ ID NO: 155 - DNA, 5763 bp, Artificial Sequence
  chemically treated genomic DNA (Homo sapiens)
ggttgggtttattttttagagggttgtgtgggggttgtggggtgtgggaggaagagaggaaggaagtttagggtaggttttgggttgttaatttgggggttgggaggatagcgtgtgatttaaatagagaattagatttagatggaattatttatattaagtttggggattttatatttatttgttgttgttttattagttgaggtttaagaatgagaagtataaaatttttggttatattatttgtatgtgtttagattggggttaatagaatcggatagtgagcgtttttgaattagattgtaatggggaatgaatgttttgggaggttggaagtagttgtattcgtagatatttatttggagatttttatagcgatcgaggtaaagatattttaaagattgtaagaattagttagtggaatttgaaatgttaaaatttttttttagaaaggttaggaaagtttcgtttaaaatttaaattttgttattttaaggtagtgtagggatggattaggaggatgtggggtgattttttttttttttttagagttagtttttgttagatataggaattttttatatgagttatagggtggagaggagattttttagtttttttagtaaggtgggagggtagtatcgttcggtggttattatgaattttgttttagaattttttttttaatttcgtgtgtgtttaggtgtatttgagatttattgatgttttttttagatcgaggagttcgttttagtagttagttttaggtgttggttttgttggtattatgtttcggtttaatgttttttgaagatttgttttttgttgttttttattgtttttgttgtttggttttaggttattatttttaatttagtaagagttgagtggtgtttttagtagtgaggtagtttttgaaggttattatttttttgttgtgtgattttggttagtttttttatttttttgtgttttagttttttttgtaaaacggagaatataggagtattttttttatagagttatttttaggttttaatgagttaatttatataaaataataaggatagagtttgatataaaattatatttaataagtttttataattatgattatttgatttagtaggagaaataaaaaatataattaatttttttttaaggatatgtttaagaatttagttttagtaattttgaaggtattgttttttatcgaaaatattttttgttagatttttttatgtgtttgtagtttagttttaataaggagttgaaggacggttaggtagtaaggggtggtgagtgtcggtagagtgtgacgagttcgtttagtttttttttttgtaattaggagttatgaattatttatattattttttttagttaataagagatttttatatttatttattttaaagtgatttgtttgggttttttttttttgtggtttttattgtaggtttttggaagaagttgatcgtttgaaaagaaattataaaatatgaaaatcgttttgaggtgattaagtttagaggtttttaattttttttaagttggatttggggtgtaagaattgtgattttaggtaataaagtagtattttttttttgttttttgtgaatttatgatttttggtagtttgtatggtagttttttttttaggaagtgtagttttttttaggaattttgaaatttggggtattttattttatgcggttgtttggttggttaaaaaagggagtgggggattttggaggtattttatgtttgttgtatggtttaagggggttagggttttataaattattaagattttgagggtagggttttgtatttatttttggttttgtttttgtaaatgttaatgataaaataataatgttatttatttaatagggtttttaatatgattaaataattatgaaatattttttgaaggataaattagagagaatagttaggaaatttttaaaaataaagagtagtaggagagtatttgttttgttagttattaaaatgtattttaaagtatagttgtaaaaatagtatagtattgtgatggaaataattagattagaggaatagagtagagagtttagaaataggtgataaattaataaaggtgtattttaagttagtggtaatgggatgtatggattagtaaatggtgttagaaaaaattttttatttattagagggaaataagaaatttttaagtttaggtagtatattaaaataatttttaaatagtattaaattaaaaaaattattaaaattttagaaaaaagaatatttatattattttgggtaagaaaagatttaaaatatgttatttttggttttatatataaatatcgtaaataaagttaaaaagtaaaagggtgggaaaagtgtttataatattaatgatgaataaagaattaatatttttagtatataaatttattcgtttatttaatatttattgagtatttagtatgtattagaaagtattttgggtattaagggtataagtagtaaataatgtttttgtttttttggtatttagattttgatggagaggattgttagtgattatggtagattattgtaggttatattttgataagggttaaggataaaatattacgtaggtggttgggttagggaggtttggtagggtttgtattatgtggatatttaagggggttttattgatggaatgatatgtgaagaaaaagggaaagttattgaatgtcgagttgatagtatatttgttgtttttggaatgtcgagtttataggatttgttgatggattgaatgcgggttgtgaaagaaaggagttagggtggtttttaggtttggggtttggtaattagaaggattgatataggaatgattgagaggtttggtttggagatagagttttggttatggatgttttagtttaatattttttttgtatatttaagtgaggacgttagggaggtggtcggttataaatatttgtaatttagggtgatatttaggttggagatataaatttgggaattgttgtagtgttgatagtatttgaaagaatgatattagttagagtttttggagagtgtgtgtagatatagaagagggtttaggatatttatgggatttttttttagagttgagggagatggagttagttaaagagagtaaaaaggagtgattattgaaatggaaggagtttcgtgagaagggggattttttaagttaagagatagtgagaagggcgaggttagtttttttttggatgtgttgatgggtaaggagagaattggttattggatttagtagtgaggaggttattggttaatttaataagggttgttttatgggaatgatggggagagaatttgtttggagttggattattgagaataagaggaaaaaaattggagatagagaaatgggataatagttggaggaggatggtatttaagtaagtttattttttttaagatgggagttatataatttttgtttttatttaagtggaaatgatttagtagcgtggggagagtggatggtgtaggattgggttggggtgagggttttgaaatggtggtttcgaggaggtgggagaggtagaatttaggtatgagttggggaagggattttaagtaggagtatttaaggaggtggtaggtgtgtatttgtttttttttttagtttattaagaagtagagtttttagcggagaatggagattaaggagacgatggaagtttgaggagagagggtaaagtatgaagttttttatagtagaatgagaaaataaatggttaggggaatgaaggattgttgggcggtatgtaggtttttaaggggtatgtttttttagttatgttttgttatataggtgaatacggggtaggaggttattgtggtagaaaaataggatatgagtagatataacgtaagatagagaaacgtttgtaaagagaaaaagtaatattagtaatagttgaagaatataagtaaaaataatgaggttttttttttttttttttagattggtaagagtttttgttggggatagaaattattgtcgtttttttggagtatagtgttatagtatgttttagaatataacgtgtgtttcgttttgatttgttagttttatttttagaaatttattttaagaaataattgtttaaatgtaaggaaatatatgtataaagatgtttattttagtagtgtttattaaagtgaaaaaatggtagttatttaaataggaggtagttggtttatttatttgtcggtttaatagtgatagtgggaaatagtagtttatatttatttttttgttttgtagatgagggaagttgggtttagagaggggtagtgatagttttagttttattttacggagtttagattttttggttgtaggtaggtattttgtttaatttttttaattgggtttggagttagagttttttgtaaggtatttgttaagttttttttaagggtcggtttgtttaatgtttttaaaatacgagtttttaaaatgttttgtaaatttgtttataatgtttttattttattttatggttttttttgtaaaggatgttgatagtggggggaaaataggtcgattgtttaaaaatttttaaaataaatatgatgttttttttattttattatatgtttgttttgggttcgggggtgtgagagatgtattagtgttgttgtaaattagtttcgggttttttttttcggttttttattattaaatttttaagtattaatttgggttttttattatttttgagagtttatcgaaataaatatatttttgtgttttttgtaataattttagattatttaatggtagattagagaatggatatttttttaattattagtgattttatgttttcgggttttatcgatttgttttttagtttttttggtattagtggtgtggattgtaatcgtaaacggaaaggtagttttattgattattagtaaggtttttggggtatgttttttttttgttaaatttggtgttagttttcgggtatggaatatttagtagttagttattgttttattttggaaaaggggatgggaataaaaaatttaattttaggtggcgatatagttggtttttggttttatttttttttagtttgtaagtaagaaggagtttttagtagtgttgaggtatttaatttttattttttgtttttaaaatgttttatatttagagaaaaagaatagttttaaggttaagttttgttttttattttttttttcgttttttttttttgtttttttgagtaagagggttaagtttatgggtgttattttagggggtttaaagagagttttgtttgagggtttttttgaggaagatagtaagtgttaggtgtttaatgaatgtttatggaaggaatgagtggaggttttttttgaaaataatttaggaatattgatgttgtttttaaatattatttaaattagtatgaatttgttatattaaatagtatttttgtttatttttagatttgttgatttttcgtttgagtaagtaaatttttatatttatagttattttttttatatatgtataaatatttagggaataaggtagtgtagaatatttaaaggtatattttgttttgtcgaagtatttgcgtggaattttatttaaatgtttatttaagaggtttttttttgtttaatgagggaaaattttcgaggaggtatattttttatagtagatgttttttttgttgaagt

SEQ ID NO: 156 - DNA, 5763 bp, Artificial Sequence
  chemically treated genomic DNA (Homo sapiens)
attttagtagaaaggatatttgttgtagggggtatattttttcggagatttttttttattaaataaaagaaaattttttaaatggatatttgggtaagattttacgtaggtgtttcggtaaaataaaatgtgtttttgaatattttatattgttttattttttaggtgtttgtatatatatagaagggatgattgtaagtgtgaaaatttatttatttaaacgaaaagttaataagtttaaaaataaataaaaatattatttaatataataagtttatattaatttaaataatgtttaaggataatattaatgtttttaaattgtttttagagaggatttttatttattttttttataaatatttattaagtatttgatatttgttgttttttttagagaggtttttaggtaaagttttttttgaattttttgagatgatatttatagatttaatttttttgtttaaaggagtaaagaaagaagacgaagaaaggggtaaaagatagaatttggttttaaggttgttttttttttttgggtgtagaatattttggggataggaagtggaagttaaatgttttagtattgttgaaggtttttttttgtttataaattaggggaaggtaaagttaaaaattaattgtgtcgttatttagagttgggttttttatttttatttttttttttaggatgaaatagtagttggttgttagatgttttatgttcgagaattgatattaagtttaataagaggaagatatgttttaaaggttttattggtagttagtggagttgttttttcgtttgcggttgtaatttatattattggtattaagagagttggaaagtaggtcggtggggttcggggatatgaaattattgatggttgaagaaatgtttattttttggtttgttattggatgatttggaattgttataagaggtataaaggtgtgtttatttcgatgagtttttaaaagtggtggagaatttaggttggtgtttgggggtttggtggtggggggtcggggggggagattcggggttggtttatagtagtattaatgtattttttatattttcggatttagaataggtatgtgatagaatggaaagagtattatatttattttaagagtttttgggtagtcggtttgttttttttttattgttagtattttttgtaaggaaagttatgagatgaaatgaagatattgtaaataaatttgtaaaatattttgagaattcgtattttaaaagtattaagtaaatcggtttttgaaaagggtttgataagtgttttgtaagggattttgattttaagtttagttgaagaggttgggtagggtgtttgtttatagttagggggtttgagtttcgtggagtaggattggagttgttattatttttttttggatttaattttttttatttgtaaaataggagggtgagtgtgagttattgttttttattattattgttaggtcgatagataagtgaattagttgttttttgtttagatgattgttatttttttattttgataagtattgttggggtgaatatttttgtgtatatatttttttgtatttgagtaattattttttagaataaatttttaaaggtgggattgataggttaaaacgggatatacgttgtattttggaatatattgtaatattgtgttttagaaaagcgataataatttttatttttaataagagtttttgttagtttaaagagaaaaaaagaaaattttattgtttttatttgtattttttagttattattgatgttgttttttttttttataggcgtttttttgttttacgttgtgtttgtttatgttttgtttttttattataatggttttttatttcgtgtttatttgtgtaataggatatggttggagaaatatattttttagaggtttgtatgtcgtttagtaattttttatttttttggttatttatttttttattttgttatgaaggattttatattttgttttttttttttaaatttttatcgtttttttagtttttatttttcgttgaggattttgttttttagtgaattgagaaaagaggtaggtgtatatttattatttttttagatgtttttatttaggattttttttttagtttatgtttggattttattttttttattttttcgagattattattttagaatttttattttagtttaattttgtattatttattttttttacgttattgaattatttttatttgggtgaaaataagagttatgtaatttttattttgggaaaaataaatttatttgaatattatttttttttagttattgttttatttttttgtttttagtttttttttttttatttttaataatttaattttaaatagattttttttttattatttttataaaatagtttttgttgggttgattagtgatttttttattgttagatttaatggttagttttttttttgtttattagtatatttagaggagagttgatttcgttttttttattgttttttggtttgggagatttttttttttacgggattttttttattttagtggttatttttttttgttttttttagttggttttattttttttaattttaagggagggttttatggatgttttgggtttttttttgtatttatatatattttttaggggttttagttagtgttatttttttaaatattattaatattgtaataatttttaaatttatatttttagtttagatgttattttgaattatagatatttatggtcgattatttttttgacgtttttatttgaatatataagagagatgttaaattgaaatatttataattaaaattttatttttaagttaagttttttagttatttttatgttaatttttttggttgttaggttttaaatttagaagttattttgattttttttttttataattcgtatttaatttattagtaaattttatgagttcgatattttaaaaatagtaaatgtgttattagttcgatatttaatgattttttttttttttttatatgttattttattagtgaagtttttttgaatatttatataatgtaaattttgttaagtttttttagtttagttatttacgtaatgttttgtttttagtttttattaaaatgtgatttataataatttattatagttattggtagttttttttattagggtttaagtattaggagaataggaatattatttattgtttgtgtttttagtgtttagaatattttttagtatatattaagtgtttaataaatattgaatgaacgaataaatttgtatattaagaatattaattttttgtttattattgatgttgtaaatattttttttatttttttgttttttaattttgtttacgatatttgtatgtgggattaaaagtgatatgttttaagtttttttttatttaaaataatataaatatttttttttttaagattttaatgatttttttaatttaatgttatttggaaattattttgatatattatttaagtttaggaattttttatttttttttaatggataggagattttttttaatattatttgttagtttatgtattttattgttattaatttgaaatatatttttattgatttattatttatttttggattttttattttgtttttttgatttagttatttttattatagtattatattgtttttataattgtgttttagaatatattttaatagttagtagaataaatatttttttattgttttttatttttggaaattttttagttattttttttgatttattttttaagaagtattttatgattatttaattatattaaagattttgttgggtgggtgatattgttattttgttattaatatttatagaagtagggttaggaatgagtatagagttttgtttttagggttttggtgatttatggagttttggtttttttgggttatgtagtagatatgaagtatttttagaattttttatttttttttttgattagttaaataatcgtatgaggtagaatattttaagttttagagtttttggaagaaattatattttttaaaggaagaattgttatgtaagttattaagaattatgagtttatagggggtagggaggggatattattttgttatttgaagttatagtttttatattttagatttagtttgggaggagttaggggtttttggatttggttattttaaagcgatttttatgttttataatttttttttaggcggttagttttttttaaaaatttatagtgggggttataagaaaagaaaatttagataggttattttgaggtaagtaaatgtaaaaattttttattagttaagggagatggtgtagatggtttatgatttttaattatagggaggaaggttgggcgagttcgttatattttatcggtatttattattttttgttgtttggtcgttttttagttttttgttaaagttaagttgtaaatatatgaaaaaatttggtaggagatattttcggtgaaaaataatgtttttaaagttattaaaattggatttttgggtatgtttttagaaggaagttagttgtgttttttattttttttattgggttaagtaattataattgtgaaaatttgttgagtgtgattttgtgttaggttttatttttattgttttatgtagattaatttattgaaatttgaaagtaattttatgagggagatatttttgtgtttttcgttttatagaagagattgaggtatagagaggtggagaaattagttaaagttatatagtaagagagtggtggtttttagaagttattttattgttgaaggtattatttagtttttgttaggttgaaggtagtggtttgaagttagataataagaataatgaaaaataatagaaaataagtttttagaaaatattaagtcgaagtataatgttagtagagttaatatttgaaattaattgttgaagcgagtttttcggtttaaagaaaatattagtgaattttaagtgtatttgggtatatacgaagttaagaaagaaattttgaaatagggtttatggtagttatcgggcggtattgtttttttattttattgaaaggattgaggggttttttttttattttatgatttatgtggaggatttttgtgtttggtagaaattggttttgaaaggaagaaaagggttattttatatttttttaatttatttttgtattgttttgagatggtaaaatttagattttaaacggggtttttttgatttttttgaaaaaaaattttggtattttaaattttattggttaatttttgtagtttttggggtatttttgtttcgatcgttatagagatttttaaatgaatatttgcgaatataattgtttttagttttttaaggtatttattttttattgtagtttgatttaggaacgtttattgttcgattttgttaattttagtttgggtatatgtaaataatgtgattagaaattttgtgttttttatttttgagttttaattggtaaagtagtagtaaatagatatgaaatttttaggtttaatataggtaattttatttaaatttgattttttgtttaggttatacgttatttttttagtttttaaattagtaatttagaatttattttgggtttttttttttttttttttttatattttatagtttttatatagttttttaagggatgggtttagtt

SEQ ID NO: 157 - DNA, 15387 bp, Artificial Sequence
  chemically treated genomic DNA (Homo sapiens)
tgtagattataatggttattttattttgggttttgaagttagggggtaaggtaagttttcgacgtttgtttttttaggttttttgggttgttttttaggattttcgtagtagggtatggtgggttatttttttttttagtaggggggttgtttttttttttattttttttgtataatttatataggtatcgttaaaggtgtttggagttaggtttaggggtaggatgggaatagtttgggtttgtggagtaaaagaggtgttatatcgaaaagagtataagtttagagtattggatatgggttttgggggtaaatttatttagaaatatagaattttatttttatttttaaatattaggtatatgtaatttggtaagggtttaataagaggtttaaataatataggtattggagttagttagatatggattgaaattttttttttttttttttttttttgatggagttttgttttgttgtttaggttggagtgtagtggtgagatttcggtttattgtaagcgttattttttaggttggagtgatttttttattttagttttttaattaattgggattatttgtgtatgttattatgtttggttaatttgtttttgtgtttgtttttttgagacgaagtttcgttttgttgtttaggtcggagtataatggtacgattttggtttattgtaatttttgtttttcgggtttaagtaattttttttttttagttttttaagtagttaggattataggtgcgtaatattacgtttagttaattttttgtatttttagtagagatagggttttattatgttggttaggttggtttcgaatttttgattttaagtgatttattagttttagttttttaaagtgttgggattataggagtgagttatcgcgcgtaggttgaaattttgattttattatttattagttgtgaggttttgggtaagtgttataatttttttggatttgaggatatttttaattttatagttattatgaagatagtataaagagtattatttttgtataatttaaaaggggttattttgttattagaaaggtttttgtagtcggtgggaggtgggattagatgattattaagtattttttcggttgtaagatttggtaggtaggtgatgtgtaaatattatatatagttagtgtttagttgtttaatttttagttttatttttttcgggtttttttttttttttatttagtaggaagtttttgtaggtaggtgtttagttattatattaaattattgtgagttttgagacgtttgagtttttttttgttttgtatttatatttggggtaggggtggtggggaggttaagttttggttgggacgggttgttaggattgtagtatataggtaatttaaggaggttttgtcgggttgtgtttgcgttgggagatgagaggtggggaggagaacgttggaggtatttagagagggatggagatgggggttttaggagatagaatgggaatttggggttttttgtagagatggaggtttttgagaggaagagagttaagagtggaattttagggaagagtttttgggagagggatgtgaggagttagtttcgggtttatttttttagggtttgttttttaatgttttttttggggttaggagatggtttttggagttatttgttaggtgtggaggtcgaggttgtcgagggcgattattaaagtcgttagcgttatttttggaggagacgtgagggttaggggttcgggtgagggcgggattagaggtgttggagttttggtttcgaggggttggaggtagatttggattttgtttttaggcgtacgggatttcgggtttaggattagggtttcggcggggcgtgggcggggtttgggagtttattgttcgtttttcgttttaagttttcgttttcgattttttatattttttttttagagtttttagtttggggattttttcgagattgtaaaggcggggtcgtagtttggtttcgtttgagaggggagggtcgggggcggaggatttatttgaaggttgcggaagtcgttagcgggagggagcgtcgagggttttggcgggcgttgcgttgttttcggaggagttcggagttcggttgaaagtaaaggttttcgaggttaattgtagttttcgcgttggtaattcgatattttttttttagcgtcgtacgcggggtcgggagcgggcgcgttagggtagggattgaggagtaatttttttttttaaggtttgcggggtttttttgcgggattttttttggttgtgagtgatggggaggaaatttgtgagattcggttttttttttaggcgggttttgattcggtcggtttttggttttcggtttattaggttaggggtttcgcgggggtttcgtcggtcgagaggtcgttttcggagtattgcgatttgtatatagtttgtatttggtttatattttgggttacgtgttttagtatttgagtagcgtttattttttgtttgttttgggttttttttttattcgtttttagtggggttgggttagagatagagtttttggtcgtagatttatagggttcggtttcgttttttttttagatcgttttcgtggtcgtttagatttaggtgatttatgtttgtaaatattggttttttttttattttttttgggtttatttataaataatttggttttgagttttggatgtttcgttagaggttatgggagaaggggttagcggaggaattggtaatttagggaagagttttttagtagttagagttaggaggaggtggggttgttattttttttttttttagcggtcggagggtcgtcgaaagttaggatttgagaaatgttgtttgttggggttgaggtgggtacgaaagattagagttatttaaaggaatttattttggtttggtttattaattttttttatttttgtttttttatttttttagagtgttagttaaataaaaagttttttttatttagaattttgttattttttagaattttttttgtagattaaacgggaagatatacggtgggtttaggtttggaggagggtggggagggaggtgtttttgagtgtttgttagaaaaatagttttagggtagggcgtagtggttttcgtttgtaattttagtattttgggaggttgaagtgggaggattacgaggttaggagttcgggattagtttggttaataaagattagtcgggcgtggtggtaggggtttgtaattttagttatttgggtggttgaggtaggagaatcgtttgaaatcggaaggtggagattgtagtgagttgagatggagttattgtattttagtttgggtaaaagggcgaaattttattttaaaaaaaaaaaaaaagaaaaaagaaagaaagaaagaaaaatagttttaggataagtttttttgtttttttttatgagtttagttattttaaagtttttttagattttaaaataaggaattattttatcgttttttattatggtgaaaaatagtatttgtttatatattttgtttgtttattttttggaggaagttgagtgtttgtagttgtttgaaaagatattatttgaggatagtttggtttgttgggatgattcgagattagatgtattggaattattgttttgtttttttttattttttggttttgggggattgttttttttattttaggatttggaatttaaaataaggttttaagagatggatttaaatttagttattgggggtcgggtgcggtggtttatatttgtaattttagtattttgggaggtcgaggtaggcggattacgaggttaagagatcgagattattttggttaatatggtgaaattttatttttattaaaaatataaaaattagttgggcgtggtggtaggcgtttgtagttttagttatttaggaggttgaggtaggagaatcgtttgaattcgagaggtagaggttatagtgagttaagattgcgttattgtattttagtttggtgatagagcgagattttatttaaaaaaaaaaattagttattgggtagggattttaagtatagtattaagaagttttgtaagattattggtaagttagagttggaattgggatttagaatatagtttttttagttcgaattttttttggtattttagttaagttttagtgtttgtgtgaaaggtataaaatttaaggagacgttttttgaggtcggggtgttgaagttttttttttttttttttttttttggttgattagagtataggattatagttagtgaggaggtagttgttttagtttggatttttagtgttttagtttattttttttttggttttagggatttttttttttgtgggaaatgtagtaggaagagttttagataaaattttttagatgttgagttaaagaaggaaggggtttatttagttgggagtatcggtaagatttttgttttaagagttgagttttttgagtgagtaatttttattttttttaagggtttataattttaagggggttcgcgtgagagcgtcgtgatcgattgagtaagtagcgggtacgtgattgggggatgtatatatcggtaattagaagggaatagaataggatagggatttttatagtgtttttttatataaataatcgattaggttaggggttaatttttaattgttaggtttagggtgtggcgttgggttgtttggttgtttgtttgtggattttatttttgttttttagtgtttattttggaggtagaaatcggatataagataatatgaggtatggtttttttttttagaagaatattgggtaggttagattgggtagaggttggtgtttttgagttttgaggagatatttagaaatagatgggggcgtgttacgtttttgagtagttgtgtgggggaggtttaaggggtggggattaataatattaaaaagaaatttgttttttttttttttggtggttatggtggagattagtagtagtttttttatttaggataaggtttaggtaaggagtgtattattttttttttgggtgttgggtaggaaaagtggttttgaggtgaaatttgggagatgaacggtggaattttaggagttatgagaaaaagtttttaggaaattttgatgaagtttgggatatttaggaaggttgggagttatgggaagtttgggatttttgtggggagatttggggttatatttttaggagggtatgtttagtaagggtttggatgagaaattgatgatagaattgtttcgagtaggatgagagggaggatagaagcgtagtttttttgggttagaaaaggaattgtttagtatttttagttttttgggtttatgtttattttattttttcggtttttattatattttttttgatattggttattaaggttagttatttatttgttttgtagtggtttatattgttagttgcgttgagaaagttttttagatttttagtaaatatgttggggtttttttagtttttggttttggtatatatggtttttgtttttaaggaatttattggttagaagaggagttaggtatatataagggtagtatagtgtgataaggatagtgatagaggatagtatagggtgatattagagtttagaggagttagagggttttttggaggaggtggttttcgggttaagttttgaagagtaggtatttaggagaagggtgttttaaggagaggggcgatgtgtgtagagttatagggagggtaattacggagtcgtatttgcgacgttgttttgtattatagaagttaagtaggagtggtaggtgcgagtttgtagagggtgtagagggttaggataaggacgttggtttttgtttttagggtatggagggatgttttgtttgtttgttttgttttttttttttagatgtgtttgtatttttttttttatgatttttatttttgtatttttattttatattttgagatattttttttagttagttttggtatagagggtttttaagtatgtaaggaatatgattagagtcgcgttttagaaatattgttttttttgggtaggtaggatattggggttgattgtggaggcggggagattagcgaggaggaaggggtaaatttgagttagggtagggggtgtggatgttgaagggaaggagaatttaggatggatttttattttatttagtattagttggtaattatgtgaatgtttgacgaatgattgattgaatggatatttaggggattattatgggtgattgggtgaataatggggatggtttattacgtgagatttgttatggtaaattaataggagttattttgagttagattaagtttaaagaggattttattataaggatattagggtattttatggaatttaaggattagatgtaaagagtttttagaaagttaaggaggagtgcggttttatttgatttttggttttattaattaagtagtttattttttgttttttagtttttttttttttttgttttggggattttattttttttttgattttaattatttgtgatttttagatgtttttttgattgtttattttgttattttttggatatttgttttagggagtttatattttttaaagtgaatttattattttttttttaaattcgattatttatttaatatatttttattgagtatttgttttgtattgggattataataatgagtaagatgagttttttaagtttattttggtataatattgtgtttatagtaataataaggtattgtgtatttaaatatgtgtaaagagggtatattttatattaaatgtttttgttatatgaaaattaaaaataaaataaaataaaataaaaataaaaataggttaggtacggtggtttatgtttgtaattttagtattttaggaggtcgaggcgggtagcggattatttgaggttaggaatttgagattagtttgattaacgtggagaaattttatttttattaaaaatataaaattagttaggtatgatggtatatgtttgtaatcgtaattattggggaggttgaggcggagaattgtttgaattcgggaggtagaggttgtagtgagtcgagattgtattattgtattttagtttgggtaacgagtaaaatttcgttttaaaaaaaataaaataaaataaaaaaaaaaacgaggttgggtgcggtggtttaggtttataattttagtattttgaaaggtttgggtaggtggattatttgaggttaggagttttagaatagtttggttaatatggtaaaatttttttttaattaaatataaaaattagttgggcgtgtttgtgggtatttgtagtattagttatttgggaagttgaggtgggagaattatttgaattcgggaggtagaggttgaagtgagtcgagattgtattattgtattttagtttgggcgatagagtgagattttgttttaaaataaataaataatatataaataaaaataaaaataaaatgaaaataaagggatatatagaaatttggaagtgatgaatatgtttatttttttgattgtgggaatggtaatatgagtgtatatttatttttaaatttattaaattgtatatattaattatgtgtagttttttgtatattaattatattttaatgaggttgaaaaaaaaaaaagtaaagttgtatagggttgtgttggagtaggatattttgtagttatgtaagaatggtggaagaagatagagggtaataaaagaagatgggtaataaaagaggtgttaggtttttgagtcgaagttaagttattatattttttgtgatttgtataaatatatttagatggtcggtttttgttttaattgatgatattgttttgtgaaatttttttttttggtttattttggtttaaaagtttttttattgagtattttgtgatttttattttgtttgttagagaataatttttttttgattgtaatttttttttatttatttaaattttataaaacggttttatttttattttttttcgttgatttttttttcggatttagtttatttgtatttaggtgattaaaagttttattgtttatataaagtttgtttggtggtgtttttatacggacgcgtatgaaatttggtgttttgatttagatcgggggattttttttaggagattaattttttgtttttttgttttttgttttgtgagaaagatttatttataattttaggtttttagatcgattagcgtaagaaatattttattaattttaaatttagtaagtagattttttttatttatttttttaattttttttattattttttaatttttttttttttttaattttggcgttatattttaatttttttatttttttaattttaattttttttattttttggtagagataaaggagatacgttttatttgtggatttaaaatttcggcgtcggttacggattgggaaggtagtttttttttggtgtttaattattgtagggatatttttttgattatttatttacgttttagaggtgttagattatgtagggacgtttgttttggttttttatttttagcggtaagtttcgtttttttggaggaggggtaagtattttaattttttttttttgtgtttttattttttttttgtttttttgggggaggggtaaaaattttttaatttttttttttttatttttagcggtaagtttcgtttttttaggaggaaagaatttttaattttttatttttatattttaattttttatttttgtgttttaattttttatttttacgtttcgattttttatttttgtgttttattttttattttcgtgtttcgattttttatttttgcgtttaaattttttatttttacgttttgatttttttttcgtttttttggagggtaagaatttttgaatttttttttttcgtttttttatttttttttttttttgggtttgttttttttattacgggtaattttttatttttcgttttttcgttttttttagtttgtgtttttaagaatttaaaatttttttaatttatatttgatttaaaatttaaatgttttatttttttttgtaaggttgtttgattttaatataaattcgatagtggttttaaatagttagaaaacggtatttttaatttttttattttgtaagatttaaataatttttgtcgtaaaatggataaacggtttgaggtgtttgacgttaaggtatttttttatatattagtttttttttagtttttgtttaatgtaatttgttttaaattttttttttttttttttcgtttgtttttttagttttaattttaagtgtcgttgagtttttttaattttttttttttatagattcgtttgacgtttttttttttttttaggttgtttttcgttaggttgagttaggttttaatttttttttagttttagtttttttattttgtaatttttttattattttttttttttatattcggtttggtttattattttattttatgattagttttttttaatttgtttagtaatttttttttaaaaaggtggttgaagttaaaggcgtagttaaggttaatgtttttttttagtttatttgtatttaggtgattaaaagttttattgtttatataaagtttgtttggtggtttttttatacggacgcgtatgaaaagaggagtttcgtattttttttaaatttatttcgttttttttttgtgtttttagtttaaagaatggaaatttgggtgttatttttgattttttttttttttacgttttttatagtttattagatattaagttttgtaaattttattttttatttttgtttatttttattgttatttttttattagatattaagttttgtaaattttattttttatttttgtttgtttttattgttatttttttattagatattaagttttgtaaattttattttttatttttgtttgtttttattgttatttttttattagatattaagttttgtaaattttattttttatttttgtttatttttattgttatttttttattagatattaagttttgtaaattttattttttatttttgtttatttttattgttatttttttattagatattaagttttgtaaattttattttttatttttgtttgtttttattgttatttttttattagatattaagttttgtaaattttattttttatttttgtttgtatttattgttatttttttattagatattaagttttgtaaattttaatttttatttttgtttatttttattgttatttttttattagatattaagttttgtaaattttattttttatttttgtttatttttattgttatttttttattagatattaagttttgtaaattttattttttatttttgtttatttttattgttatttttttattagatattaagttttgtaaattttattttttatttttgtttatttttattgttatttttttattagatattaagttttgtaaattttattttttatttttgtttgtttttattgttatttttttattagatattaagttttgtaaattttattttttatttttgtttatttttattgttatttttttattagatattaagttttgtaaattttattttttatttttgtttgtttttattgttatttttttattagatattaagttttgtaaattttattttttatttttgtttgtttttattgttatttttttattagatattaagttttgtaaattttattttttatttttgtttatttttattgttatttttttattagatattaagttttgtaaattttattttttatttttgtttatttttattgttatttttttattagatattaagttttgtaaattttattttttatttttgtttatttttattgttatttttttattagatattaagttttgtaaattttattttttatttttgtttgtttttattgttatttttttatttaggtttattaattttatgtttttagtttgtttttaagttttttttttttttaagtttttgatgtattttgtttattgtagagtagatgtagatagaaatagagttgtggagatataatgagagatatagttggtttagtgggtttttgttgtataattattttgtcgtgtgttataaaattttagtggtaaataaatatttatttttaggtttatggtttttgggttgacggtaagtggtttatttaaattggatttggttgggtagttttgtttaggtcgtcggtttggtttagttggggttttttttgttttgggttgggtttaggtttgttttttacgtgtttattttgggggtttagattaaagaagaattttttaaagaaaagatttttagttttttttttttaaaagtagatttatagataagtatatgggtgtagtgagtttttttgtaaagtgattttaagaaatataagttagggagcggtaaagttagatagagaagagaaaagtagttaattaaaagtttgttattattgtgattaattagttttattggggattttttatgggataggaagtttgatttttagtttttattggttgaaggttgtttttgagaatattaaattttttatatttttggtttgttttgtgtttataaaaaataggtttttagggtgatggagaatgttttagagatagaaaaatgtgagttttagaagtgggaggttgatagtttgtatgagaattatttattgtatttgtatgtggattcgaagatagttttcgggaatatgggttgaggaatttatagtgttaggtatatttttttttattttgtatttatagattaattcgtaggaaggtttttgattggtttttttgggttatgtgtttatttatgagttagttataatggttaaagttttagggtattagttttggggtatgtgttttttttatggggtgtatagaatgagaaaagttttatttgagtttatgattggattttatataggaaagtgaggaattagtaatagtagttttagtttttttgttggattttaagagattatagataagagtttaagtttttttttttttttttttttttgagatagagttttatttttgtcgtttaggttagagagtaatggtgcgatttcgggttattgtaatttttattttttaggtttaagagatttttttgttttagtttttcgagtagttgggattataagcgtataatattacgtttagttaattttttgtaattttagtagagatggggttttattatgttggttagtttggttttaaatttttgattttaggtgatttattcgttttggttttttagagtgttgggattataagcgtgagttatcgcgttcggtttagggaagtgggtttttatagtttattgtagatttaattttttggttttaagtaatttttttatttttagtttgtcgagttgttgggattatagatatgtattattatatttgtagtttggtttatttatttatttatttatttatttatttattttttaaatttttgagacggagtttcgttttgttatttaggtttgagtgtaatggcgtaattttggtttattgtaattttcgttttttgggtttaagttatttttttgttttagtttttcgagtagttgggattataggtatttgttattatgtttagttaatttttgtatttttgtggagatggggttttattacgttggttaggttggttttgaatttttgattttaggtgattcgtttattttagtttttcggagttgttcggatgtatttttttatttttagtagtaatggtgttttataatgttgtttaggttcgttttaaatttttgggtttaagtaattttttcgttttagttttttaaagtgttgggattataggttggagttattatggttggttgttgtttataattttatttttaatgtttgatatgttatagatgttaaataataataataaaaaaaattgttgaataaatgagtaagtagtttttgagggggagaagataatgagttttattttggatatgtggaatttggtaaaaattattgttaattttattgtttagagaagtttatattttatatttaaattgtgtattggtaattataggattttagatttgaagattaatgaaattatagatatatagaattttagtgttttagagttattgaattatttaaatttaggtttttttagagttagaggagatgataaagtagcgacgtttaatttaaatgagattgggggtagaggtataattattttgatatttatgtaatatttgtgtgaaggcgtatatatttattttttgaagggaggttttagtttttattagattttaaaatataaagatttattgattatattattatttgtgtatagaaagaaaatagaggttgggagttgtggtttacgtttgtaattttagtattttgggaggttaaggtgggtagaatgtttgagtttaggaattcgagattagtttgggtaatacggtaaaattttatttttataaaaaatataaaaataagttaggtatcgtgatgtgtgtttgtatttttagttattcgggaggttgaggtaggaggatcgattgagtttaggaggttaaggttgtagtgagttatgattgtgttattgtattttagtttgggtaatagagtaagattttgttttaaataaataaataaagtagatattattttttttattagttaaatggaaattaaaaagagattaattatatttagtattggtaaagatgtggaataaagggtatttttatttattgttggtggggtggtagtttttgttaaaataaaaaatatttatattttttaaattttattttattttttaaaattttttttataaaaatatgtatatatatagagaaggatttatatatttaaatatttattgtagtattatgtataatattttaaaattagggaagaaatttaagtgtttataagtatgaaatggttaattatggtttatattatgagataaattaagttgttattatgtgagtagggagatatttatgtattgatatggaaggaagttaatattttttttttgaggaaaaaaggtaataaaatgtgtatgtgtaagtatgtttttttttagtttttaaaaaaatgataataaggtcggtatggtggtttatatttgtaattttaatattttgggaggttgaggcgggcggattatttgaggttaggagttcgagattattttggttagtatggtgaaatttcgtttttattaaaaatataaaaattagttgggtgtggaggcgggtatttttagttttagttatttcggaggttgaggtaaaagaattatttgaatttaggaggtggaggatgtagtgcgtcgagattacgttattgtattttagtttgggtaatagagtgagatttggtttcggaaaaaaaaaaaaaaagagagagaaagaaaaaaaaggaaattgtttgttttaatttagatttaatgtttggatattttttttttggaattatttcgggtatttcgtttgttttttagtaaagagggtgtggaaggtttgtggtttttgttgttttttttagggaaattggtattttttgtttttttttgtttttttgattttttttttttttagtattcggggtttatatttgtttttttttggaagtatcgaaggtttattttataagaggattgtagggagtgggggtaattggtggattaagttttgttttaagtttgtttttggagattttgttaaggttttattagttgaatatttttggatttgtttttgttttaaaatttataatttttgcgaggtgaagtttaggttttttattgtggttgttaagtttttttatgattggtttatttttttaacgtttttatttcgtaagttttgttagtttagatgatatgtttttttttttttatatttttagtttttatttttaatatttttgttttttttatttttgttgtataaaagtttttttttatttaaatattagtttttttttttttagtttttatttgttgatattttagttttttgtttattttataagatttgtttacgttatttttttaggaagttatttatgttttttttagtaagaagggtttttttttttttgagtttttatgtttgttttatgatttttagtgttaagtattaggaatggtatagattaagtgtcgatttatgtttattaaattatatagattaatattgtaattttttaga

SEQ ID NO: 158 - DNA, 15387 bp, Artificial Sequence
  chemically treated genomic DNA (Homo sapiens)
tttggaaaattgtagtgttaatttgtatagtttaataaatatgaatcgatatttagtttgtgttatttttagtgtttggtattgagagttataagatagatatggaggtttagaagagagaggattttttttgttgaaaggaatatgagtgattttttggaggagtgacgtgaataggttttgtaggatgaataggagattaagatgttagtaagtggagattgggagagaaaagattggtgtttgggtgggaaaggatttttgtgtagtaggaatggaaaaagtaaaggtattggaggtgggaattgaggatgtaaagagagaaagatatgttatttaggttggtagagtttgcggggtaggaacgttgggaagatgggttagttatgaaaggatttgatagttatagtgagagatttgggttttatttcgtaggggttgtgggttttgggataggggtagatttaggagtgtttagttggtggggttttagtaggatttttagggatagatttagagtagggtttggtttattagttgtttttattttttgtagtttttttgtggaatgagttttcggtgtttttagggagggatagatataaatttcgggtgttgggggaagaggggattagaagagtaggagaagatagaggatattagtttttttaagagaagtagtaggaattataagttttttatattttttttgttgggggataggcggagtgttcgaagtggttttaggaagagggtgtttaggtattgggtttggattggagtaggtagttttttttttttttttttttttttttttttttttttttttcgagattaagttttattttgttgtttaggttggagtgtagtggcgtgatttcggcgtattgtattttttattttttgagtttaagtgatttttttgttttagttttcggagtagttgggattagaggtgttcgtttttatatttagttaatttttgtatttttagtaaagacggggttttattatgttggttaggatggtttcgaatttttgattttaggtgattcgttcgttttagttttttaaaatgttgggattataggtgtgagttattatgtcggttttattgttatttttttaagaattgaaaggaaatatgtttatatatatatattttattattttttttttttagaaaaaaaatattaatttttttttatgttagtatataaatatttttttgtttatataatggtagtttggtttattttatggtataaattataattaattattttatatttatgaatatttaggttttttttttaattttaaaatattatatataatattatagtgaatatttaggtatataaatttttttttatgtgtgtgtatgtttttataggaaagattttgagaagtaaaatgagatttaaagaatatgaatattttttattttgatagaaattgttattttattaataatggatgagagtgttttttattttatatttttgttagtgttgaatatgattgatttttttttaatttttatttaattggtaggaaaaatggtatttattttgtttgtttgtttgaggtagggttttgttttgttgtttaggttggagtgtagtggtataattatagtttattgtagttttgattttttgagtttaatcgatttttttgttttagtttttcgagtagttgggagtataggtatatattacgatgtttggtttatttttatattttttgtagaggtggggttttgtcgtgttgtttaggttgatttcgaatttttgggtttaagtattttatttattttggttttttaaagtgttgggattataggcgtgagttatagtttttagtttttgttttttttttgtatataaatggtaatatagttaatgggtttttatgttttggaatttgataaaagttgaaatttttttttagaaaatgaatatatgcgtttttatataaatgttatataaatattaaggtggttatgtttttgtttttaattttatttaggttaagcgtcgttgttttattattttttttggttttggggagatttaagtttggatagtttagtgattttaagatattgggattttatgtgtttataattttattaatttttaaatttaagattttataattgttaatatataatttaaatgtgaagtatgagtttttttggataatggggttagtagtagtttttattaaattttatatgtttaaaatggagtttattatttttttttttttaaaagttgtttatttatttatttaataattttttttgttattgttgtttagtatttgtagtatgttaggtattaaggataaaattatgaataatagttagttatggtggttttagtttgtaattttagtattttgggagattgaggcgggaggattatttgagtttaggagtttgaaacgagtttgggtaatattgtgagatattattgttattaaaaataaaaaaatatattcggataatttcgggaggttgaggtgggcggattatttgaagttaggagtttaagattagtttggttaacgtggtgaaattttatttttataaaaatataaaaattagttgggtatgatggtaggtgtttataattttagttattcgggaggttgaggtaggagaatagtttgaatttaggaagcggaggttgtagtgagttaagattgcgttattgtatttaagtttgggtgatagagcgagatttcgttttaaaaatttaaaaaataaataaataaataaataaataaataaataagttaggttataggtgtggtggtgtatatttgtagttttaataattcggtaggttgaaggtaggaggattgtttgagattaggaggttgagtttgtagtgagttatgaaaatttatttttttgggtcgggcgcggtggtttacgtttgtaattttagtattttgggaggttaaggcgggtggattatttgaggttaggagtttgaaattagattggttaatatggtgaaattttatttttattaaaattataaaaaattagttgggcgtggtgttgtgcgtttgtaattttaattattcgggaagttgaggtagaagaattttttgaatttgggaggtggaggttgtagtgattcgagatcgtattattgttttttagtttgggcgataagagtgaaattttgttttaaaaaaaaaaaaaaaaaaaaagatttgagtttttgtttgtggttttttgaagtttagtaaggaggttagagttgttgttattagttttttatttttttgtgtagaatttagttatgggtttaggtggggttttttttattttatgtattttatgagaggaatatatgttttaggattggtgttttaaggttttgattattgtgattggtttatggatgggtatatgatttaagaaggttaattagaggtttttttgcgagttgatttatggatgtagggtaaaagagagtgtatttgatattgtggattttttagtttatattttcggagattgttttcgagtttatatgtaggtatagtggatagtttttatgtaggttgttagttttttatttttagggtttatatttttttgtttttgaagtattttttattattttgggagtttgttttttgtgagtatagggtaggttaaaagtgtaagggatttaatatttttaaggatagtttttaattaatgagggttggaagttagattttttgttttatagagggtttttagtgggattagttgattatagtggtaataggtttttaattggttgttttttttttttttgtttgattttgtcgttttttgatttgtattttttgggattattttataaagaagtttattgtatttatgtatttgtttgtgggtttgtttttgggggaaggaaattgagagttttttttttggaagatttttttttagtttggatttttagaatgaatacgtgaggaatagatttgagtttagtttagagtaaggaagattttagttgagttagatcggcggtttgagtagagttgtttaattaagtttagtttagataagttatttgtcgttaatttaaagattatgagtttgggagtaaatgtttgtttgttattgagattttgtggtatacggtaaaatagttatgtagtaaaagtttattgggttagttgtattttttattgtgtttttatagttttgtttttgtttgtatttgttttataataaataagatatattagaggtttgaggggaggagaggtttgaaggtagattgaggatatggaattagtggatttgagtaagagaatggtagtgaggatagatagaggtaggaggtggaatttataagatttgatgtttgatgggagaatggtagtgaggatagatagaggtaggaggtggaatttataagatttgatgtttgatgggagaatggtagtgaggatagatagaggtaggaggtggaatttataagatttgatgtttgatgggagaatggtagtgaggatagatagaggtaggaggtggaatttataagatttgatgtttgatgggagaatggtagtgaggatagatagaggtaggaggtggaatttataagatttgatgtttgatgggagaatggtagtgaggatagatagaggtaggaggtggaatttataagatttgatgtttgatgggagaatggtagtgaggatagatagaggtaggaggtggaatttataagatttgatgtttgatgggagaatggtagtgaggatagatagaggtaggaggtggaatttataagatttgatgtttgatgggagaatggtagtgaggatagatagaggtaggaggtggaatttataagatttgatgtttgatgggagaatggtagtgaggatagatagaggtaggaggtggaatttataagatttgatgtttgatgggagaatggtagtgaggatagatagaggtaggaggtggaatttataagatttgatgtttgatgggagaatggtagtgaggatagatagaggtaggagttggaatttataaaatttgatgtttgatgggagaatggtagtgagtatagatagaggtaggaggtggaatttataagatttgatgtttgatgggagaatggtagtgaggatagatagaggtaggaggtggaatttataagatttgatgtttgatgggagaatggtagtgaggatagatagaggtaggaggtggaatttataagatttgatgtttgatgggagaatggtagtgaggatagatagaggtaggaggtggaatttataagatttgatgtttgatgggagaatggtagtgaggatagatagaggtaggaggtggaatttataagatttgatgtttgatgggagaatggtagtgaggatagatagaggtaggaggtggaatttataagatttgatgtttgatgggagaatggtagtgaggatagatagaggtaggaggtggaatttataagatttgatgtttgatgggttataggggacgtgagagagggaaaaattaaggatgatatttaggtttttattttttaaattagaaatatagaggagaagcggagtagatttaaaaaaaatacgaagtttttttttttatgcgcgttcgtgtgaagagattattaaataggttttgtgtgagtaataaagtttttaattatttgagtgtaggtggattgaaaaggagtattaattttgattacgtttttagttttagttatttttttaagaggaaattgttgggtaggttggggagggttagttatgaaatgaaatggtaaattagatcgggtgtgaggaggggaggtgataaaaagattatagggtggaggagttgaggttgaggaagaattgggatttagtttagtttggcgaggagtagtttggggaggaggggagacgttagacgggtttgtagaaaaggaagattagaaagatttagcgatatttggggttgggattgaggggataggcgggagggaaagaaggaagatttgggataagttgtattgggtagagattagggagggattgatgtgtaaaagaatgttttgacgttaggtattttagatcgtttgtttattttacgataagaattatttagattttgtaggatggaaaaattgaaagtgtcgttttttggttatttggaattattgtcgagtttgtattggggttaagtagttttgtagaagaaaataaggtatttaggttttaggttaggtgtgagttgaagaggttttaagtttttgagagtataggttaagggagacggaggaacggagggtggaaggttgttcgtagtgaaggaggtaagtttagagaaaagagagagtagagaaacggagggaaggggtttaggggtttttattttttagaaaagcgggaaaggggttagggcgtggaaataaggggtttgggcgtagagataagaggtcggggtacggaaataagggatggggtatagagataagaggtcggggcgtggaaataagggattggggtatagaggtaagaggttggggtgtggaaataagggattgggggttttttttttttagaaaagcgggatttgtcgttaagggtgaaggagaaggggttgaggagtttttgttttttttttagaaaagtagagaaggggtagagatatagagaaaaggggttggggtatttattttttttttagaaaagcgggatttgtcgttaagggtgaaggattaaggtaggcgtttttgtatgatttgatatttttgaaacgtgggtgaataattagagaggtgtttttgtaatgattaaatattaagggaaggttgtttttttagttcgtgatcggcgtcggagttttgggtttatagataaaacgtgttttttttgtttttattagaaaatgaaaggaattgaaattaagagaatggagagattgaagtgtggcgttaagattgaaaggggaaagaggttgagggatagtgagggaggttggagaagtgagtaaaaagagtttgtttattggatttgaaattggtgagatattttttgcgttggtcggtttgaggatttgaggttgtaggtgggttttttttatagagtaaagagtaggaggataggggattgattttttaagggaggtttttcgatttgagttagggtattaaattttatgcgcgttcgtgtgaagatattattaaataggttttgtgtgagtaataaagtttttaattatttgggtgtaggtggattgagttcgaaaagagagttagcgaagggagataagggtggggtcgttttataggatttgggtaggtaaaggaaaattatagttaaaggggggttgttttttggtaggtagagtgggggttataaggtgtttagtaggggagtttttgagttaggatgagttaggagaaggaattttataagataatgttattagttaaggtaggaatcggttatttggatgtgtttgtgtaggttataggggatatgatggtttagtttcggtttagaggtttgatattttttttattgtttatttttttttattgttttttatttttttttattatttttatatgattgtagagtgttttgttttagtatagttttgtgtaattttattttttttttttttagttttattgaagtataattggtatataaaaaattgtatataattaatatatataatttggtgagtttggaaataagtatatatttatgttattatttttataattaagggaataaatatgtttattatttttaagtttttgtgtatttttttgtttttattttatttttatttttatttatatattatttatttattttgagatagggttttattttgtcgtttaggttggagtgtagtggtgtaatttcggtttattttaatttttatttttcgggtttaagtgatttttttattttaattttttaagtagttggtattataggtgtttataagtacgtttagttaatttttgtatttagttgagaaggggttttgttatgttgattaagttgttttggaatttttgattttaggtgatttatttgtttaggttttttaaagtgttgggattataggtttgagttatcgtatttagtttcgtttttttttttgttttgttttgttttttttgagacggagttttgttcgttgtttaggttggagtgtaatggtgtaatttcgatttattgtaatttttgtttttcgggtttaagtaatttttcgttttagtttttttagtagttgcgattataggtatgtgttattatgtttggttaattttatatttttagtagaaatggggtttttttacgttggttaggttggttttaaatttttgattttaggtgattcgttgttcgtttcggttttttaaagtgttgggattataggtataagttatcgtgtttggtttgtttttatttttattttgttttgttttgtttttggtttttatgtagtaagaatatttaatgtgagatgtattttttttatatatgtttaagtgtatagtgttttattgttattataggtataatgttatattagagtagatttgaaaagtttattttgtttattattgtagttttagtataaagtaggtgtttagtaaaaatgtattgaatgaatgatcgggtttggaggggaaatggtgagtttattttgggaaatgtgaattttttgaagtagatgtttaagaggtagtagaatggataattaaggagatatttgagagttataggtgattgaaattagggaagagatgagatttttagagtaagggaaagagaaggttgaaaggtagagggtgagttgtttgattgatgaagttagaggttaggtggagtcgtatttttttttggttttttagaggttttttgtatttggtttttgggttttatgagatattttggtatttttgtgataaaattttttttaggtttaatttagtttagggtggtttttgttaatttgttatggtaagttttacgtgataaattatttttattatttatttagttatttatgatggttttttgggtgtttatttagttaattattcgttaaatatttatatagttgttaattaatgttgggtgagataggggtttattttagattttttttttttttaatatttatattttttgttttggtttaggtttgttttttttttttcgttgattttttcgtttttatagttagttttaatattttgtttgtttagggagagtaatgtttttaaagcgcgattttggttatgttttttatatgtttaaaagttttttgtgttaaaattgattggaagaaatattttaaaatatagagtaaaaatgtagagatgaaaattatgagggaagagatataaatatatttagaaaaaaaaaataaaataaataaataaaatatttttttatattttaaggatagaggttagcgtttttattttggttttttgtattttttgtaggttcgtatttgttatttttgtttggtttttgtagtgtagaataacgtcgtaggtgcggtttcgtggttattttttttgtggttttgtatatatcgtttttttttttgggatattttttttttggatatttattttttaaggtttaattcgagggttattttttttaggaagttttttgatttttttgggttttggtattattttgtgttgttttttgttattgtttttattatattgtgttgtttttatatgtgtttggttttttttttggttagtgagttttttgagggtagggattatgtatgttaaggttagggattggggaggttttagtatgtttgttgagagtttgaggaatttttttagcgtagttaatagtgtagattattgtagagtaggtgggtggttggttttggtgattagtgttaggggagatgtggtgggaatcggagggatggggtgggtatgggtttaaggagttggggatgttgagtaattttttttttagtttaagggagttgcgtttttgtttttttttttattttgttcggagtaattttgttattagttttttatttaggtttttgttgaatatatttttttgggaatgtgattttaaatttttttataggaattttaaattttttatggtttttaatttttttaggtattttaaattttattaaagttttttggaaatttttttttatgatttttaaaattttatcgtttattttttaaattttattttaaaattattttttttgtttagtatttaggaggagagtggtgtattttttatttaggttttgttttgggtggggaagttgttgttgatttttattatggttattaggagaggggaggataagtttttttttgatattgttagtttttattttttgaattttttttatatagttgtttagaaacgtgatacgtttttatttatttttggatgtttttttagggtttaggaatattagtttttgtttagtttgatttgtttagtgtttttttaagggaggaaattatattttatattgttttatgttcgatttttgtttttaaagtaaatattaaaaggtagaaatgaaatttataagtagatagttagatagtttagcgttatattttgggtttggtagttaaagattgatttttgatttaatcggttatttgtataaaaaagtattgtgaagatttttgttttgttttgtttttttttaattatcggtgtatgtattttttagttacgtattcgttgtttgtttaatcgattacgacgtttttacgcggatttttttagagttgtgagtttttaaaagggataggaattgtttatttagggagtttagtttttgagataggagttttgtcgatgtttttagttgaataaattttttttttttttaatttagtatttgaggggttttgtttgaggttttttttgttatattttttataaaaaagggaatttttgaagttagagaggaggtggattgaagtattggggatttaggttgggataattgtttttttattggttgtggttttgtattttggttagttaaggaggaggaagagaggaggaagttttagtatttcgattttagagagcgtttttttagattttgtattttttatataaatattgagatttagttaaggtgttaggagagattcgaattaaggaggttgtattttgagttttagttttagttttgatttattagtgattttgtaggattttttaatgttatatttaggatttttgtttaatgattagtttttttttttagatggagtttcgttttgttattaggttggagtgtagtggcgtaattttggtttattgtaatttttgtttttcgggtttaagcgatttttttgttttagttttttgaatagttgggattataggcgtttgttattacgtttagttaatttttgtatttttagtagagatggggttttattatgttggttaggatggtttcgattttttgatttcgtgattcgtttgtttcggttttttaaagtgttgggattataggtgtgagttatcgtattcggtttttaatgattagatttgaatttattttttggggttttattttgggttttaggttttgggatgggagaagtaattttttaaagttagagggtggagagggataaagtagtgattttaatatatttggtttcgggttattttagtaggttaagttgtttttaggtggtatttttttaagtaattgtaaatatttaattttttttagagagtgggtaggtaggatatataggtaaatgttgttttttattatgatgggaaacggtaggatgattttttattttagaatttgggagggttttgggatggttagatttatagaagggggtaaaagaatttgttttggagttgttttttttttttttttttttttttttttttttttttttttgagatggagtttcgtttttttgtttaggttggagtgtagtggttttattttagtttattgtaatttttatttttcggttttaggcgatttttttgttttagttatttaagtagttgggattataggtttttgttattacgttcggttaatttttgttggttaggttggtttcgaatttttgatttcgtgatttttttattttagttttttaaagtgttgggattataggcgggagttattgcgttttgttttggagttgtttttttaataagtatttagaagtatttttttttttatttttttttaagtttggatttatcgtatgttttttcgtttggtttatagaaaggattttgggagatagtaggattttaggtggaggaaattttttatttggttgatattttgaggggatggggggatagggatggggaaaattaatgagttagattaggatggatttttttgggtagttttaatttttcgtgtttattttagttttagtaggtagtattttttaaattttagttttcggcgatttttcggtcgttgggggaaggaggggtgataattttatttttttttggttttggttgttaggaagtttttttttgagttattaattttttcgttggtttttttttttatgatttttgacggggtatttaaaatttagagttaggttatttatagataagtttagaggaggtgggggaaaggttagtgtttataaatatgggttatttgagtttgagcggttacgagagcggtttgggggaggggcgagatcggattttgtggatttgcgattaagggttttgtttttggtttaattttattgaaggcgaatggggagagggtttagagtaggtagggagtgggcgttgtttagatgttggagtacgtggtttagggtgtgggttaaatgtaaattgtatgtaaatcgtagtgtttcgggggcgatttttcggtcggcgggattttcgcggggtttttggtttggtgggtcggggattaggggtcgatcgggttagggttcgtttgagggagaggtcgagttttataagttttttttttattatttatagttaaagagggtttcgtagaaagatttcgtaggttttgagaaagggaattgttttttagtttttgttttggcgcgttcgttttcggtttcgcgtgcggcgttgggaaaggggtgtcgggttattagcgcgggggttatagttagtttcgagaatttttgtttttagtcggatttcggattttttcggggatagcgtagcgttcgttagagttttcggcgttttttttcgttggcggttttcgtagtttttaagtgggtttttcgttttcggttttttttttttaggcggagttaaattgcggtttcgtttttatagtttcggaaaggtttttagattggaggttttgaggaaggggtgtggggagtcgggggcggagatttggggcggggggcgggtaataaatttttaggtttcgtttacgtttcgtcggggttttaattttggattcgggatttcgtgcgtttggagatagggtttagatttgtttttagtttttcgaaattaggattttagtatttttggtttcgtttttattcggatttttggtttttacgttttttttagggatggcgttggcggttttgatgatcgttttcggtagtttcggtttttatatttggtaggtaattttaggaattattttttagttttaagggggatattaagggatagattttgaggaagtggattcggggttgattttttatattttttttttagggatttttttttaggattttatttttaatttttttttttttaggaatttttatttttgtagggagttttaagtttttattttgttttttagaatttttatttttatttttttttggatgtttttaacgtttttttttttattttttattttttagcgtaggtatagttcggtaaagtttttttgggttatttgtgtgttgtagttttggtagttcgttttaattaaggtttggtttttttattatttttattttaaatgtgggtatagagtaggggaggatttaggcgttttagagtttatagtgatttggtgtggtggttgagtatttatttgtaagggttttttgttggatgagagggaaagagagttcgaggagaatggggttgggggttaggtagttggatattggttgtgtgtaatatttgtatattatttgtttgttagattttatagtcggaaaagtgtttgatagttatttagttttattttttatcgattgtaagaatttttttaatgataggatgattttttttaggttgtatagaagtaatgttttttatgttgtttttataataattgtgaggttggaagtatttttaagtttagaaaagttatgatatttgtttaaggttttatagttaataggtggtaaagttaagattttagtttgcgcgcggtggtttatttttgtaattttagtattttgggaggttgaggttggtggattatttgaggttaggagttcgagattagtttgattaatatggtgaaattttgtttttattaaaaatataaaaaattagttgggcgtggtattgcgtatttgtaattttagttatttgggaggttgagagaggagaattgtttgaattcgggaggtagaggttgtagtgagttaagatcgtgttattgtatttcggtttgggtaatagagcgagatttcgttttaaagaaataaatataaaaataaattagttaggtatggtggtatgtataggtaattttagttagttgggaggttgaggtgggagaattattttaatttgggaggtggcgtttgtagtgagtcgagattttattattgtattttagtttgggtaatagagtaagattttattaaaaaaaaaaaaaaaaaaaaaagattttagtttatgtttgattgattttagtgtttgtgttatttaagttttttattgggtttttgttaaattgtatatatttgatatttagggatagaaatgagattttgtgtttttggatgggtttgtttttaggatttatgtttagtgttttgaatttatgtttttttcggtgtggtattttttttgttttataggtttaggttgtttttattttgtttttgggtttggttttagatatttttgacgatatttatgtgggttgtgtagaggagatggaggagaaggtagtttttttgttaaaggaggaaatggtttattatgttttgttgcgggaattttgggaggtagtttaggagatttgggaggataagcgtcgagggtttattttgttttttggttttaaagtttagaatggaatagttattatggtttata

SEQ ID NO: 159 - DNA, 5209 bp, Artificial Sequence
  chemically treated genomic DNA (Homo sapiens)
ggtagagatattttgtagtcggttaatggatatatgaggggtttagttagaagtaggatttttaattttatggtttattttttatggtttatgtttttgtttttataaatggtaattttaataattcgtagtttttatttaatggagtttgttaggagaaggttttgtggaatatagatttttttattttgtttttgaatgtatttggagattttttttagaagtttttggtaatgagtttttaagtataggaagatggtatatgttgttaaataagttaaataattttcgagatatgattggttattaagtttttttgtttttgtataaaggttatttagagtttgaattatttttttaaattgttgtttattaatttggttttttagttttatggagaatatggtttggaattggtagtttgtgttattgttgtagtttcgttgaatgaatatttttttggattttggtgtttgtcgtagttttatggtaaggataggataggtcgtattttaatttttgtgtttttagtagagatttagttttattatgttggttaggttggttttaattttttgattttaggtgattcgtttattttagttttttaaagtgttgggattataggcgtgagttatttcgttttgtttttttatgagtttttaatgttaaggatgttttgttaagataaaggtttacgtttattttagtgttaattgttagggatttagttgtagatatttttgatttatttgttttttgtttatttgtttttgattttttgttttttgtaagtttttatgttgtttttttgtttttttttttttttgagattaagtttcgttttgtttttaggttggagtgtagtggtacgatttcggtttattgtaatttttattttttgggtttaagcgatttttttgttttagttttttaagtagttggggttataggtatgagttatcgtgtttagtttgtttttttgttttttttttttttttgagttttttttttatttttatagtatggtttttacgtatgttaagtttgtaagtttgttgtttgttgtaaataaatttggattgataattttttttttgttttgtggatagttagattgattgtttttttttatttgggtgtttgtgtatatgttttttaatttttaattttaattttttgtagtttttgtttttttttttttttttttttttttttttttttttgagatggagttttatttttgttgtttaggttagagtgtaatggtacgatttcggtttatcgtaattttcgtttttcgatttaagcgattttttgttttagtttttcgagtagttaggattataggtatgtattattatgtttagttaattttgtatttttagtagagatgggttttttttatgttggttaggttggttttaaattttcgattttaggtgatttgtttgtttcggttttttaaagtgttgagattataggtgtgagttacggattttagttagtttttttttttttatttataaatagaattgtcgtgaagatgtaatgagatgaattttagtttagagtttgttatttggtgatttatttatgttaggtattgtggttatagttttgttgttaaattatttttttaattttttttttagttttagtttatttgttaaagggtttggttttagtattttgttggatatttagaagtacgattttacgtttgtagaatgttattgatttttatacgaggttttttaggaagggatgttaggttttagatattagttgttggatttcgggatttgttattttattttggtattttttaggattatacggtatatagttgatttaatagttttttttgtttttttagtggttagttgtagtttagttttagggtttttgtgggagaagataggagagggttgggagttagggtatatagatgtgttagatgaggttttgtttgtaaggagtttattatttgggtggtggagaaggtttagaaggtattattatagtgtttttaaattaggaaaagattgttaaatgttcgtatatttaggattatatgggagtttagagttggatgtttggattagttgggagtttatttgatattgatgatgtttggttagaatattgatggataaggttaggcgcggtggtttacgtttgtaattttagtatttttagaggttaaggcgggtggattacgaggttaggagattgagattattttggttaatacgatgaaattttatttttattgaaaatataaaaaattagttgggcgtggtggtgggcgtttgtagttttagttatttaggaggttgaggtaggagaatggcgtgaatttaggaggtggagtttgtattgagtcgagattgtgttattgtattttagtttgggggatagagcgagatttcgttttaaaaaaaaaaaaaatattgatggacgaatgggaggtggtaagatcgatattgagggaagggtattttaggtatagggaagagtatttaggaaggtttgaaatagttaggtgtattttgggaattttaagtaattttatttttgagttgagtgagggttaaatatttttaaattataaaatattttagttattggtttttttttttttttttattttatttttaatattatagttagatttattttttttttttttttttttttttttttaatatggggttttagtcgggcgtagtggtttatttttgtattttagtattttgggaggttgaggcgggtagattatttgaggttaggagtttaagaatagtttggttaatatggagagattttatttttattaaaaatataaaattagttaggcgtggtggtgtatgtttgtaattttagttatttggaaggttgaggtaggagaatcgtttgaatttgggaggtagaggttgtagtgagttgggatcgtgttattgtattttagtttgggtaataagagcgaaattttattttaaaaaaataaataaaaataaaataaaataaaataaatttggtttttttgattttaaaatcgatcggggttttttatgatttataggattaagaataaatttttttttttgatattgaagattttttatagtttttttttaaattttttttattttttttttttattttttgttatagttatagttatttggatgattttttgtttttaaagtaggttagttatattttttgtttagatttttttttttgtttggaatgtttttttttttttttttgggtaaattttttttattttttaagatttaatgtagaagataggtttattagaagtttttttagggtatttttagtgtttagaatttagtttgatattttggttgaataattaattaattagattaaggattttttttttgagtatttaatatagtttttttttttaacgtttgtgttttttgtatattttttttatgttatgttggaattttttgaagttaggttttattttttttgtttcgtttttttttttgttttttttttttttttttttttttttttttttttttttttttttttttttttttcgagataagagttttattgtcgtttaggttgtagtgtagtggtgtcgttttagtttattgtagtttttatttttttggtttaagtgatttttttgttttagttgtcggagtagttgggattataggtatttattattatattcggttaatagagataaggttttattatgttagttaggtttatttcgaatttttgattttaggtgattcgttcgttttagttttttaaagtgttgggattaaaggcgtaagttattgtgttcggttgcgttttttttttttttttttttttttttttttttttttttttttttttttttttttttttttttttgagatagaattttgttttgttatttaggttggagtgtaatggtattattttagtttattgtaattttcgtttttcgggtttaagagatttttttgttttagttttcggagtcgttgggattgtaggtattcgttatcgtgttcggttaatttttgtatttttagtagagacggggttttattattttggttaggttggttttaaatttttgatttcgtgatttattcgtttcggttttttaaagtgttgggattataggcgtgagttatcgcgttcggttttcggtcgcgtttttttttttttttagaggagttaggttggagtgtcgtggtataatagtttattgtagtttcgaatttttgggtttaagtgtttttttcgttttagttttttgagtagttaggattgtaggcgtgtattattacgttcggttttttttttattattattaatttttttgtagagacgggattttgttgtattgtttaggttggtttttaattcgtagttttaagcgatttttttatttcggttttttaaagtgttgggattatagttgtgagttatcgcgtttggtataggttttatttttgatggttttttttttttttttgatgtttttttttgtatttggtatatagaggtgtttggtacgtgtttgttgaatgaatgaatgaatgagtgaatgagcgaatatgttattttattttatatattttgtgaatttgttaggttcgggtttgatgttatagtttttatttttggttcgagtttttagttttttgcgtgtttgttgattatagtacgaacgttagcgtattattttttttaattttagtttaggtttttttttcgtcggggtttttttaatttttttttcgttcgttttttcgtttcggggtcgtttagtttttagtttagcgggaggtattttcgtttacggttaggattggaggatggaggtaacgtttatttcgtcgggcggttttttattggcgcggtcgtcgttaggggtggggataggatcggcggttgttgacgttatttcggttagaaaagttttggttagtggcgggcgcgatattattcgtgcggttaggcggaggtgagtgcgcggcggtcggatgggcgggacgggcgtggaggacgtcgagtatcgtggcgcgcgtttacgttcgcgtttttaagggttgcgtttttttaagcgtagtgtttagaattcggagttagttcggttcgggggattttgttggttaaggaggtcgttagttcggttttgttttttaga

SEQ ID NO: 160 - DNA, 5209 bp, Artificial Sequence
  chemically treated genomic DNA (Homo sapiens)
tttggaagataagatcggattgacgatttttttggttagtagggtttttcgggtcgggttggtttcgagttttgggtattgcgtttgagggagcgtagtttttggggacgcggacgtgagcgcgcgttacggtgttcggcgttttttacgttcgtttcgtttattcggtcgtcgcgtatttattttcgtttggtcgtacggatagtgtcgcgttcgttattggttagggtttttttggtcgggatggcgttagtagtcgtcggttttgtttttatttttggcgacggtcgcgttaataggaggtcgttcggcggggtgggcgttgtttttattttttaattttggtcgtgggcggggatatttttcgttgagttggaggttaagcggtttcggggcggggaagcgggcggggaaagggttggggggatttcgacggggaaggggtttgggttggggttgaggagggtagtgcgttggcgttcgtgttgtggttagtagatacgtaggggattggagattcgggttaggggtagaggttatgatattaggttcgggtttggtaggtttataagatatataaggtgaaatggtatgttcgtttatttatttatttatttatttatttaataaatacgtattaggtatttttatgtgttaggtatagagaaaggtattaaggaaaaaggaaggattattagaaatgaagtttgtgttaggcgcggtggtttatagttgtaattttagtattttgggaggtcgaggtgggaggatcgtttgaggttacgagttggagattagtttgggtaatataataagatttcgtttttataaaaaaattaataataataaaaaaaaagtcgggcgtggtggtgtacgtttgtagttttagttatttaggaggttgaggcgggaggagtatttgagtttaggagttcgaagttgtagtgagttattgtgttacggtattttagtttgatttttttaaaaaagaaaagaaacgcggtcggaggtcgggcgcggtggtttacgtttgtaattttagtattttggaaggtcgaggcgggtggattacgaggttaggagtttgagattagtttggttaaggtggtgaaatttcgtttttattaagaatataaaaattagtcgggtacggtggcgggtgtttgtaattttagcgatttcggaggttgaggtaggagaattttttgaattcgggaggcggagattgtagtgagttgagatggtgttattgtattttagtttgggtgatagagtaagattttgttttaaaaaaaaaaaaaaaaaaaaaaagaaagaaagaaagaaagaaagaaaagaaaagaaaaaagaaacgtagtcgggtatagtggtttacgtttttaattttagtattttgagaggttgaggcgggcggattatttgaggttaggaattcgagatgagtttggttgatatggtgaaattttgtttttattagtcgggtgtggtggtgggtgtttgtagttttagttatttcgatagttgaggtaggagaattatttgaattagggaggtggaggttgtagtgagttgagacggtattattgtattgtagtttgggcgatagtgagatttttgtttcgaaaaaaaaaaaaaaaaaagaaagaaagaaagaaaaagaaaaagagaagagaaaataaagaaagaaacgaaataaaagaaatgaagtttgattttaagaagttttaatatagtatggaggaggtgtgtagggagtataggcgttggggaggggggttatgttgggtatttagggaagaggtttttgatttgattaattaattatttaattaaaatgttaggttggattttaggtattggaagtattttgaaggggtttttaatgaatttgttttttgtattgggttttggaagatggggggaatttgtttagggaagaaggggagaatattttaggtagagggagaagtttggataaaaaatgtgattggtttgttttaagaataggaaattatttaagtggttgtaattataataaaaggtagggaggagaggtggaaggagtttgggagaaggttgtgaagagtttttaatgttaagagagggagtttgtttttggttttataggttataggaaatttcgatcgattttaaaattagaggagttaaatttattttattttattttatttttatttatttttttgagatggagtttcgtttttattgtttaggttagagtgtaatggtacggttttagtttattgtaatttttgttttttaggtttaagcgatttttttgttttagttttttaagtagttggggttataggtatgtattattacgtttggttaattttatatttttagtagagatggggtttttttatgttggttaggttgtttttgaatttttgattttaggtgatttgttcgttttagttttttaaagtgttgggatataggggtgagttattgcgttcggttgaaattttatgttaaaaaagaaagaaaggaaggaaggaagataaatttagttatagtattgaggatggaatggagggagaagaagagattagtggttggaatgttttgtgatttgaaggtgtttagtttttatttaatttaagagtggaattatttggagtttttagaatgtatttgattgttttaagtttttttaaatgtttttttttgtgtttgggatgttttttttttagtgtcggttttgttattttttattcgtttattagtattttttttttttttgagacggagtttcgttttgttttttaggttggagtgtagtggtataatttcggtttaatgtaagttttattttttgggtttacgttatttttttgttttagttttttgagtagttgggattataggcgtttattattacgtttagttaattttttgtatttttagtagagatggggttttatcgtgttagttaggatggttttaattttttgatttcgtgatttattcgttttggtttttgaaagtgttgggattataggcgtgagttatcgcgtttggttttgtttattagtattttagttaaatattattaatgttaggtagatttttagttgatttaggtatttaattttgggtttttatgtgattttgagtatacgggtatttagtaatttttttttgatttgggagtattgtagtagtgttttttgggttttttttattatttaagtggtgagttttttgtaagtaaagttttatttgatatatttgtgtgttttgatttttagtttttttttgtttttttttatagaagttttagaattgggttgtagttgattattgggaggataggaaagattgttagattaattgtatgtcgtgtggttttgaaaaatgttaaagtggagtggtaagtttcgagatttaatagttagtgtttgaggtttggtatttttttttgggaggtttcgtgtgaaagttagtggtattttgtagacgtgaggtcgtatttttgaatatttagtaaaatattggggttaaattttttgataaatgaattgaggttagaaagagagttggagaagtggtttgatagtagagttgtaattataatatttaatatgggtaagttattaggtggtaggttttgagttaaaatttattttattgtatttttacgatagttttatttatagataaagaaagagaagttggttgggattcgtggtttatatttgtaattttaatattttgggaggtcgaggtaggtagattatttgaggtcgggagtttgagattagtttgattaatatagagaaagtttatttttattaaaagtataaaattagttgggtatagtggtgtatgtttgtaattttagttattcgggaggttgaggtaggagatcgtttgaatcgggaggcggaggttgcggtgagtcgaaatcgtgttattgtattttagtttgggtagtaagagtgaaattttattttaaaaaaaaaaaaaaagaaaaagaaaagaaaagaaatagaagttgtaaagggttagggttaggggttagaggatatgtatataggtatttaggtagaagaggatagttagtttggttgtttataagatagaagagagattgttagtttaggtttgtttgtaataaatagtaagtttgtaagtttggtatacgtgaaggttatgttgtagggatggggaagagatttaggaagaggagaaagataggaaggtaagttgggtacggtggtttatgtttgtagttttagttatttgggaggttgaggtaagagaatcgtttgaatttaggaggtggaggttgtagtgagtcgagatcgtgttattgtattttagtttggggatagagcgagatttggttttaaaaaaaaaaaaagataggaaggtagtataaaggtttgtaaaaaataaaaaattaaaaataaataaatagaaagtagatgagttaaaagtgtttgtagttgagtttttgatagttgatattgaaatggacgtgagtttttattttgataaagtatttttggtattaaagatttataggagggtagggcgaagtggtttacgtttgtaattttagtattttgggaggttgaggtgaacggattatttgaggttaggagattgagattagtttggttaatatggtgaaattaagtttttattaaaaatataaaaattagagtgcggtttgttttgtttttgttatgaggttgcggtaggtattagagtttagaaaggtgtttatttagcgagattatagtagtggtataggttgttagttttagattatgttttttatggagttggagaattagattgataggtagtagtttgaagaaatagtttaaattttaaataatttttatgtagaagtagagaagtttggtggttaattatatttcgaaggttgtttggtttgtttaatagtatatattatttttttatgtttggaaatttattattagaagtttttgaagaaagtttttaaatgtatttaagagtagaatgagaagatttatgttttataaggtttttttttgatagattttattgagtaaggattgcgagttattgaaattattatttatgaaggtagaggtatgagttatggaagataaattatagaattaaagattttatttttagttgggttttttatgtatttattggtcgattgtagagtgtttttatt

SEQ ID NO: 161 - DNA, 7659 bp, Artificial Sequence
  chemically treated genomic DNA (Homo sapiens)
taataattggatggtgttttaagttgtttagtttgtattggtaaatttattaataggaaagtaatatagaagttaaatgggttaggtatggtggtttatgtttgtaattttaatattttgggaggttaaggtgggtggattataatattaggagatcgagattattttggttaatatggtaaaatttcgtttttattaaaaatataaaaattagttaggcgtggtggtacgtatttgtagttttagttatttaggaggttgaggtaggggaattatttgaatttaggaggtggaggttgtagtgattcgggattatgttattgtattttaatttgggtaatagagagagattttattttaaaaaaaaaaaaaaaaagaagttaaatgaatatttttgattattgatggaagttgtttttatttttttttatttaattatttttattttagttttgaaagagggatgttttaattttatttgtaataagtgagtttgaggtttaggaaagtgatagaatttagtaaagtttattttgttatttggtggttttagttagaatttagttttaggtttatatatttaaagttattatagcgtttattaaaattttgtttttttttcgatgtttttttttttagaagtttgtttttttagggatagattttaatttagtgttataaggtattgaattttgatttttataaaatatagtaattgttttttaaaattaataatagtatttttgagttgggtacggtggtttatgtttgtaattttagtattttgggaggttgaggtgggtggattatgaggttaagagatcgagagtattttggataatatggtgaaatttcgtttttattaaaaatataaaaattaattgggagtggtagtaggtatttgtaattttagttatttaggaggttgaggtaggagaatcgattgaatttaggaggtagaggttgtagtgagtcgagattgtattattgtattttagtttggtaatagagtaagatttcgttttaaaaaaaaaaaaaaaaatatgtttgagtttttatgtgttaattattgggttattttaatattaatagttattatgattatgattattttttttattttattgatgaggaaattaatatatagaaaggtaaaggaatttgttaaaggtgacggttatatagttaaagagttgtagaagtagtataggaatattagtaaatttatagttaagttttgttttttatttttatattatatagtttttagattaaaattttaattttgattttttaaattaaaaattatatttaaggtcgggtgcggcggtttatgtttattattttagtattttgggaggtcgaggtaggtggattatttgaggttaggagttttagattaattaggttaatatggtgaaattttatttttattaaaaatataaaatttagttaggcgtggtggtgggtgtttgtaattttagtattttgggaggttgatgtatgaaaattatttgaatttaggaggtagaagttgtagcgatttatgattatgttattgtattttagtttgggtaagagagtaagattttgttttaaaaaaaaaaaaattgtttaataatagtttggaagtgtatatgttttttgtgaaggttgatggattataattagttttaaaatataaataagtaattgtgtttaaatgaggttttttgtgtaatatttagggaaaattaatgtggttatttaaatttgtttttttttttaagtatagagaagttgtttatgattttgtgattcgttttgtttaatgaattatgagtagtagtagtaatttgagttatttttaggtggaagtgttaagaggttttatgatttattatatttcgttttttttgaagggtgattaaggatatatgtagagatggggtttttgttagtttggatttttgagtgaatataatgaatagattattatataatgttttaatatagtttagatatgtaacgtgattaagaataagttttattgtggttaggtatggtggtttatgtttgttattttagaattttgggaggttaaggcgggtggattatttgaggttaggagtttaagattagtttggttaatatggtgaaattttgtttttattaagtataaaaattagttagatagtggtggtatgggtttgtaattttagttatttaggaggtaggagaattatttgagtttgggaggtagaggttgtagtgagttgagattgtattattgtattttagtttgggtgatagagtgagattttgttttaaaaataaataaatattttattgtatggagttattgagatttggggattgtcgttattgtattagaatttaaattattttgatcgttagggtgttttaattagggtttttttttaaaagtaaaggtatttttaaagttcgtgatatttaaataaaagagtaaatattaatatttattatttcgttaggttaataaatttaaataaagttaatagttagaagttaaaataaatagattattaggttgaaaatagaattgttaaaataggtataattgattttatttagtgattgtaaagaatattaggtaagatatacgtgtggttattataatatttattatatgtttaattgtatatgtttgattaagaaaaatataaagtatttaagtttatttgtagtttaaagtgtttattcgtgtatttatttatttattttgatgtatttattgagtaatttttttgtgttaggtattgtgttgtgttgcgggaagttagggattttaaacggagggattagttgaagttatgatagaagaacgtggattatgaagattttatggatatttattagttttttaaattaatatttttgtaattttttatgtttgtttttattgtaatttttaaatataaattgtaaagattttatggattaaatttattatttttttaattaatatttttgtgattttttatgtttgttattattttaattttttaattttgttagtcgagaaggatgtatatcgttttaggatttgtaataattgcgttaagtatataaattatatagtatgtgtgtttgagtaatatgaaatgtgggtattttgaaaaaagaataggataatagtaattgtttagggaataagagagataattttaaattttgatcgtcggtgagttaggtagaatagaattatatttttttttttttaaaagtaaatgggagaaatatcgttgaatttttttttttagtatggaacgtttttgagaaagagaatgcgtatttaggggtaggtttttaaattggtttttcggggcgtatttgttttttatggtcgagattgtagaggtgaaataaattttagttttttatagtatttttaggtttattaggaagagaaaatttttatttaataaattttggttagatcggttgattttaaaattttgttttttgataagatgttattaatgataatggtgttaaaattttattagtaattttaattttattttttgtatttttttgaaatgtttgtttttgtatattttttttgaaagaggagggtaagggagttaggatagaaagtgaggtggagaagtgtagagttttggacggataagtaggagatacgtagtataaggaagtatattaggtaatatattaagtaggggaatttgttttttattatataggtaagatgttacgggaaatgggttttgggtttatatagattatgatttagttttttattgttgtgaagttgtgtttggataaattttttaatttttttgagttttatttttttatttgtaaaatgtagatagaagatttatttttttatattgtttttaggtttaaagtacgttaattaggatatagtaaagtttgtttgatattgaaaattttttagtaataatgaattttagaataagttattttttatttttgtttttgtttgtaattattaagcgattattttattttttgtttttagggattttaaattgttgacgtttttgatttagttaggaatgcgttgtatggggatattaaatttgtatgttttttaagtattgattgtagtttgattttagtaggtcgtgtatatataattttattattttttaatttatttcggtgttgatgtaattagtaaaatacgatttaagagtgttatgatattttttaaaaatcgtgatgttttttttttattaaagagatatttaaaagtatataattattttgtggaggtaagttgataaaattttttttgagattttaaaaggaatttttgtatttaaaatgtttaaggattattgatgtattttggttttatgtattaattagatttagattttattgttttagagatgggggtttttttttgtcgtttaggttggagttgagtttattttagttttaaacgtttgggtttaaattatttttttgttttagttttttgagttgttgggattattatggtgtgttattaatttttatagagatgtgatttcgttgtgttttttaggttggttttgaatttttggttttaagtgatttttttgttttggttttttaaagtgttgggattataggcgtgagttatcgtttttggtttcgatttattaatagattttataaggatattttaggttttacgtattagttttttaggataagtttttttttgtattgtataataaattagacggtagtgtaataaaaaaacggtgatgatttttcgaagaataaattaagtttagaagtttttttaattgttagaatagtaggtagtttgggcggagttttgaggttatttttaaataggcgtattgagacgtaaggcgttggaaataaaagagtttttttttgcgttttttcgtcgttttatttagttttgtttcgtttcggatatttcgcggtttcgtttttgtgcgcgttggttggttttcgtaggtatgatgaaatttttcgtacgcgttataggagttaggtcggtataagcgttagcggtttcgtcgttcgttaagttgtttatatttttggttttagttcgttatattattttgatttgtttacgtttaggtgagtcgggttttgcgtttcgtgttttgcgtttcgcgttagtatttttttcgcgtgttttggggttgtttcggaaggaaggggtggaggatgcggtttttagtttggtattcggtagacgcggttcgcgggcgtttgttgatgttgcggtttttgcggtagggagggcggggcggacgtttagcgattgttacgtatttgatagttagcggaaggatttttttgttttggttttttgaagtatcgagagggaatcgcggtcggtaggtcggatcgtttcggagaggaggtagcggtagtttgagtttttgtaaatgttatatgtgtatttttttttattatgtggcgtcgaagtttgtggatattttcgcggttcgggtttttgcggcggacgggtcggatcgtgttcgtggttagggcgtagttaggtgtcgcgtggttttgatttaggaagagattgcggttttattatcgtttcggtgtttgtttttatttttaattgtttttttttttatttggatcgtttattttttttttttttttttatttcgttatttttattagtttttatttgtttttgtagattgtaagatttattaagtgatttgttgagtaaattttgtcgagaagaggtttgtttagggatataggcgattaagtatagaaaaaggtaaaagaattagtatgttttttttaatggttgttattttgtagggttggttttagatgattgttatagttttaaataaaaaggatagtttttatttcggttcgtggtttatattatttttttattgtttattgttttgggcgtttgattaataatttaatagtagtttttttttttaaattttaaattatgatttatagtattgttgtaagagtaattagaggtaaagtagggtttgaatttgtttgtagttggttatttattgagattttaatataaaagtaaagggagagggtgaagttgtaagtagtattaagtggaatagaaattaaatgtattgaaattgttatgtttagttcggtaggcgttagttatttgtaattgttgagtatttgaagtgttggttagttttaattgagatgtattgtgttaaatatattggattttgtcgttggagtaggaagaatagtgtaaaatatttgttcgataatattttatattgattatatatatgttaaaatgttattatttgggatatattgagttaagtttatttaaaattaattttattttttttttttaatggggttattagtatatttaaaattatatatgtggtttatatatatatttattggatagtattgttttagaagtttaggaagaaataagaaaaatattgagaataggtagcggtagtaggaattttgtttttttataagattgattttaataaaaataataggttatagttttaattggtttttttttattagaaaaaataagtgtattttatatgtttttttgtttttttttttttttttttagtttagtggttagaatgtatttattatagtaggattaatatagggatttattaagtagcgttaagaagatttaggtaattgattttttgatgattatatttgatttttaaagtatttttttaattcgttttaaattgatatagagttaaaggtagatggtttattagtagttattttatttaaattttatggaatttttttagtaaattttaaataatttgttataggttatttgggttatttggttaagtgtatggaagagatagtataggatatgtggtattttatttttaaattgtttgagatgatttttattttaattatatattatttggttttggtttttcggaaaagttagttaaatttttggtttttttagatataaatgaaatattattaaagaatagtttaaagtgatttatgtaatttgaatgtatattttttttttagggtgtttattttaaattatttgggtatttgttgtaattcgtagtttttttaaaaaaaatattaaaatagttattttttaagttagagatgttttaattaaaatattttgtttttggtgtatttattgatatttttaaaacggaatgtatttggatttttgtgtataattttcgtagtatttagatattgaatagaaaggtagttattattgttaaatagggtttaaatgttatatatggtgtaatgtgttattttgagttggtagtagttaaataaaatagttttttattttatagttgagaatttgaaattggaaagtaattaacgtatgtaagggtgatttatttgttttcgggtttatagggatgagttaagttttttattagggatgttgttggtgtatatgttttatttattttgtttttttattgaataatgtaattttgagatagaaatatttgagaatatttttgttagtgaggatattttgatagtgaatattttgtattttttattaatttgaaatgttttatttgttataaagttaggatatttgatattaaattaaattgttttttttttttttttaga

SEQ ID NO: 162 - DNA, 7659 bp, Artificial Sequence
  chemically treated genomic DNA (Homo sapiens)
tttaaagggaaaaaaaaaataatttaatttgatattagatattttggttttataataaataaaatattttaagttaatagaagatataaaatatttattattaaaatgtttttattgataaaaatgtttttaaatatttttgttttaaagttgtattgtttagtaaggaagtaaagtaggtgagatatatatattaataatatttttaataaaaaatttagtttatttttataagttcggaagtaaataaattatttttatatacgttaattattttttaattttaaatttttaattgtgaaataaagggttgttttatttggttgttgttagtttaaaatgatatattgtattatgtgtggtatttgggttttgtttggtagtgatgattgtttttttgtttagtgtttgagtgttacgaagattgtatatagaggtttagatatatttcgttttgagaatgttaatggatatattaaaaataagatgttttaattaaaatatttttaatttgaaaaataattattttggtgttttttttaaaaaaattgcgaattgtagtaaatgtttaaatagtttgggataaatattttaaggaaaaaatatatatttaagttgtataagttattttgagttattttttgatgatattttatttatatttaaaagaattaaaggtttagttggttttttcggaaaattagaattaaataatatatggttagaatgaaaattattttaagtaatttggaaatgaagtattatatgttttatgttgttttttttatgtatttgattaaatagtttaaatagtttataataaattatttgagatttattggaaaaattttataagatttaaatgagatgattattaataagttatttgtttttgattttatattaatttaaaacgggttaggaaagtgttttgaaaattaagtatggttattagggaattagttatttaagtttttttaacgttgtttagtgaatttttgtattaattttgttataataaatatattttaattattaaattggaggggaaaaagggagaataaagaggtatgtaaagtatatttattttttttagtaggaaaaagttaattaaaattataatttattatttttattggaattagttttataggagggtaaagtttttattgtcgttatttgtttttaatattttttttatttttttttaaatttttagaatagtgttgtttaataaatatatatgtaagttatatatgtaattttaaatatattagtagttttattaaaagaaaaaggtgaaattaattttaaataaatttaatttagtatgttttaaatagtaatattttaatatatatgtaattaatataaaatattatcgagtagatattttatattgttttttttattttaacgataaaatttagtgtatttaatataatatattttagttaggattagttagtattttaagtgtttaatagttataggtggttagcgtttatcgaattggatatggtagttttagtgtatttaatttttattttatttagtgttatttataattttattttttttttttatttttatattaagattttagtaagtaattaattatagataggtttaagttttattttatttttaattatttttatagtaatgttatgaattatgatttaaaatttaaaaaaaaaaattgttgttaaattattagttaagcgtttagggtaatggatagtaaagaaataatgtaggttacgggtcgagatgaaaattgttttttttatttaaagttataataattatttgaagttagttttgtaaaatgatagttattgaaaaaggtatgttagtttttttgtttttttttgtatttggtcgtttgtgtttttaaatagattttttttcggtagggtttgtttagtaagttatttgatgagttttgtagtttatagagataggtggggattggtggggatggcggggtgagaggggaggaggagggtgagcggtttaggtgaggaggggggtagttgaaggtgaaagtagatatcgagacggtgataaggtcgtagtttttttttagattaggattacgcgatatttgattgcgttttggttacgagtacgattcgattcgttcgtcgtagggattcggatcgcgaaaatgtttataggtttcgacgttatatagtaaaaaaaagtatatatataatatttataggggtttaaattgtcgttgtttttttttcggagcggttcggtttgtcggtcgcggttttttttcgatgttttagggaattaggatagaaaggttttttcgttagttgttaggtgcgtaataatcgttaggcgttcgtttcgttttttttatcgtaggagtcgtagtattagtaggcgttcgcgaatcgcgtttgtcgggtgttaggttgaagatcgtattttttatttttttttttcggagtagttttagggtacgcgaggaggatgttggcgcggggcgtagggtacggggcgtaggattcggtttatttgggcgtaagtaggttagggtgatgtggcgggttgaggttagggatgtggatagtttgacgggcggcgaggtcgttggcgtttatatcgatttggtttttgtaacgcgtgcgggaagttttattatgtttgcgaggattaattagcgcgtataggggcggggtcgcggggtgttcggggcggagtaggattaagtggggcggcggaagggcgtaaggaggagtttttttgtttttagcgttttgcgttttagtgcgtttgtttaaggatagttttagagtttcgtttaggttatttgttgttttgataattagggaggtttttgaatttggtttgtttttcgggaaattattatcgtttttttgttgtattgtcgtttgatttattatgtagtgtagagaaaagtttgttttaagaaattgatgcgtgaggtttaaaatgtttttataagatttattaataaatcggggttaggagcggtggtttacgtttgtaattttaatattttgggaagttaaggtaagaggattatttgaaattaggagtttaagattagtttgggaaatatagcgagattatatttttataaaaattggtggtatattatggtagttttagtaatttaggaggttgaggtagaaggatagtttgagtttaggcgtttgaggttgaggtgagtttaattttagtttgggcgataaagggagatttttatttttaaaataataaaatttaaatttaattgatatatgaagttaaaatatattagtggtttttaaatattttaagtataaagattttttttagaattttaaaaaggattttgttaatttgtttttataagatgattatgtgtttttaagtatttttttgatgaagaaaagatattacgatttttaaaaagtattataatatttttaaatcgtattttattaattatattagtatcgaaataaattgagaaatagtaaaattatatgtgtacgatttattaagattagattatagttaatgtttggagagtatgtaggtttgatatttttatataacgtatttttgattaaattaaaaacgttaataatttaaaatttttaagaatagaagatggagtagtcgtttagtagttataggtaagagtaaagatgagagatgatttgttttaaggtttattgttgttggaaagtttttagtattaaatagattttgttgtattttaattgacgtattttaaatttgagagtaatgtgggaaagtaggttttttatttatattttataaatgaaaaaataagatttagaaaagttgagggatttatttaaatatagttttataatagtagagaattgagttataatttgtgtaaatttagagtttatttttcgtagtattttgtttatgtagtgaaagataggtttttttgtttggtgtgttatttagtgtgtttttttgtgttgcgtattttttgtttgttcgtttagagttttatatttttttattttattttttattttggtttttttgttttttttttttagggagagtgtgtaaaggtagatattttaaggagatgtaaaaggtgaaattaaaattgttaatgaagttttggtattattgttattgataatattttattaggagatagggttttgagattaatcggtttgattaaagtttattaggtgggaattttttttttttaataagtttgggagtgttatgggagattggagtttattttatttttgtagtttcgattataagagataggtacgtttcggggggttagtttagagatttatttttaggtgcgtatttttttttttagggacgttttatgttgagaaaaggaatttagcgatattttttttatttgtttttgaaagaagagaaatatggttttgttttgtttggtttatcggcggttagagtttaaggttattttttttattttttgaataattgttgttattttgttttttttttagggtgtttatattttatattgtttaaatatatatgttgtataatttgtgtatttaacgtaattattataggttttgagacgatatatatttttttcggttgataggattaagagattaaagtaatgataggtataggaaattataagggtattgattagggaagtgataagtttagtttatgaaatttttataatttatgtttagagattgtagtgaaggtaggtataagaaattataaaagtattaatttggggaattaataaatgtttataaaatttttataatttacgtttttttgttatggttttagttggttttttcgtttggggtttttgatttttcgtaatatagtatagtgtttggtataaaagagttgtttaataaatatattaggatgaatagataaatatacggataggtattttgaattatagatgagtttaaatattttgtgttttttttagttaaatatgtgtaattaagtatgtgataaatgttatgatgattatacgtgtgttttgtttgatgttttttgtaattattaaatgaagttaattgtgtttgttttgatagttttatttttaatttaatgatttgtttattttaatttttggttgttggttttgtttgggtttgttagtttgacgaagtggtagatattggtatttgtttttttgtttaaatgttacgaattttaaaaatgtttttgtttttgggaagaaattttagttaggatattttagcggttaggatgatttgggttttggtgtagtaacgataatttttaaattttagtggttttatgtagtgaggtatttgtttgtttttgagatagggttttattttgttatttagattagagtgtagtggtgtaattttagtttattgtaatttttgttttttagatttaagtgatttttttgttttttgagtagttgggattataggtttatgttattattgtttggttaatttttgtatttagtagagataggattttattatgttagttaggttggttttgaatttttgattttaaatgatttattcgttttggttttttaaagttttgggatgataggtatgagttattatgtttggttatagtgaggtttatttttggttacgttgtatgtttgggttgtgttagggtattgtgtggtggtttgtttattgtgtttatttagggatttaggttgataaaagttttatttttgtatgtgtttttgattattttttaggggaaacggaatgtggtggattatagagttttttaatatttttatttggaggtgatttaagttgttgttgttgtttatggtttattggataaaacggattatagagttatgagtaatttttttgtgtttggaaggggaaataaatttgaatagttatattgattttttttagatattatatagaaggttttatttaaatatagttatttatttgtgttttgaagttaattgtagtttattaatttttatagaagatatgtgtatttttaagttattattaggtaatttttttttttttgagatagagttttatttttttgtttaggttggagtgtagtggtatgattatggatcgttgtaatttttgttttttgggtttaagtgatttttatgtattagttttttaaaatgttgggattatagatatttattattacgtttggttaagttttgtatttttagtagagatggggttttattatgttggtttggttggtttggaatttttgattttaggtgatttatttgtttcggttttttaaagtgttgagatgataggtatgagtcgtcgtattcggttttgagtatgatttttgatttggaaggttagagttagggttttagtttgaggattgtatgatgtgaaggtgaaaagtagagtttggttgtgagtttgttggtatttttgtgttgtttttatagttttttggttgtgtgatcgttatttttggtaagtttttttatttttttatgtgttggtttttttattaataaaatggaaaaaataattataattataatagttattggtgttgggatagtttagtggttgatatataaggatttaaatatatttttttttttttttttgagacggagttttgttttgttgttaggttggagtgtagtggtgtaatttcggtttattgtaatttttgttttttggatttaatcgatttttttgttttagttttttgagtagttgggattataggtgtttgttattatttttagttaatttttgtatttttagtagagacggggttttattatgttgtttaggatgttttcgattttttgattttatgatttatttattttagttttttaaagtgttgggattataggtatgaattatcgtgtttagtttaaaaatattattattaattttggggggtagttattatattttgtgaaaattagagtttagtattttgtaatattgagttgggatttatttttgaaggaataggtttttaaagaggaaggtatcgagagaggggtaaaattttagtggacgttgtaatgattttaggtatatggatttggggttgagttttagttggggttattaggtagtaaggtggattttgttaaattttattatttttttgagttttagatttatttgttataaatggggttaaagtattttttttttagggttaagataaagatgattaagtaagagggaatgaaagtaatttttattaatggttaaaagtatttatttaatttttttttttttttttttttgagatggagtttttttttgttgtttaggttggagtgtagtggtatggtttcgggttattgtaatttttattttttgggtttaagtgatttttttgttttagttttttgagtagttgggattataggtgcgtgttattacgtttggttaatttttgtatttttagtagagacggggttttattatgttggttaggatggtttcgattttttgatattgtgatttatttattttagttttttaaagtgttgggattataggtatgagttattatgtttggtttatttaatttttatattatttttttgttggtggatttattagtgtaaattgagtagtttaaaatattatttagttatta

SEQ ID NO: 163 - DNA, 17137 bp, Artificial Sequence
  chemically treated genomic DNA (Homo sapiens)
tgattttgaattttttttttttttttgtgtttaatatgtgttaaatgaggtttttattaaaggtagtttgaaggagaaaagttattagaaaagagtagaaggggtagggggtagaggtattttatatatttttttttggtgtttggcggtaaaggttgatgaggtatgaggagtatatagtagtgtttagtgatgatcgttttttttttatgatcgtttgtgttatgagttagtttgtatgcgtaagtaggaattagatttgaataagtattatttagtgagatttgttgtttttaatgtttgtttttttttagtaagtagaattttgaatttgagtttaatttgagtttaattttgaatttgagtagatttgaatttgagtttaatgagtttatttggagatttttaatatttgaaatgatttttttaatttaagatttaattttttttttttaaggattagatgaaatataaattgatagtgtataataatttatgtgaaatttattaagtttttattgtttatgtatatatgtttaattaattataaataagattgattataattttggtattagatttaattttttttaatttggaaatagaaaataataaaaagatttagttaaatttagttaatggaatatatttttttttttttgttgtttttttttttagttttatgttatttatagatgattttttttgttttatgttgttttgatttgaagttatatcgattttgtgaagttattataattgtagagagttggtagtttatttgtttaatattggttaggttttatattttaagtaggtattttttaaatgtagttttttatttacgttaagttattatattttttaagtgattattgtatagatttatataatgtttattttttttttatgtttgttttttgattttttattttagttatttacggttgtttgtatttgtatgatgggataaatgataaatgggttatttttatttatttttaagaaaataatttttttcggtcgagtattatttgtaaaaaagtattatttgttatttttttgttaataagatattgattttatatgtttttttttttgttattgttaaatataagtttttatttgtagttgtttagtgttttaatggttaattattttatattaatatatatagtttttattaaaatttttgtagttggagaggtattgtagggttgaagggataaattaagagggtgacgagtaaagagtttggtggttttttgcgagaaagtatattttgggttgaggaataataaatttaaagagttcgaggtgaaaatgtttatataattattttattttagatattgttttgtttattagggatatggaattgagaatgttaatagtttttatggtttgtagtttgaatatagtttttttaatattatttgtaatttagtttatttttatataagtttaagtgttatattgaggtgtttatattttatttttatttttttaaatttggaaaagagaatattaaaaaattaattttttgggatacgtttaattagttaaattttttatatttaggtttttagataattgtttttatatgtatattttttggtagttgtattatttaattttttttttgtattgtagttagaaaaacgaagtgtaatacgtgtagtttaaaaagtagaaaaaatagaattttgtataatttgtgagatagttgtttagaaataatttttattaaattttatttgattaatatgttttttggggttaggagaagtagttttagtaaatatttaggatattggtgtatgtttttaatttaaacggatttgttaaaagagaaatgattttgttatttgatgaagttagtattatagtagttttattaagaatgataaaatattttggattatttgtttatttgttataatatgtcgtgaaataattttttaaagtaatggatattgtattttttaaagtaaagaaatattgtagaattttaaatatattagtagtggtttttaggttaataaaatattgttgtaatgatatacggagattttttttattttttatgtttgtaagttttttggtaaagttttttaggattttttttttttggtatgagttggtaatatttgttatgtggttatgaaattgtagaatagagttaagttagaatgatgatagtgtaaaaaggattgtgttagtattaattttatgtagtgtatgtgtgatttttcgttaattgttaagaatttaggttgattaattgatttagttttgtatattgtaataatattatttattttaaggtaaatttttttgatttatatatttagatttgatgatattggaggattttagaagttagttttaggatatttttttttagataagggatttgtatttaatggaagaggttggttatttttatgaaagataaagaaataattattttatttagatatatatatatatatatatatatatatatatatttttttttttttatacgatttttgaagtaaatatagtttaagtaaaattattattttgtaaataattgaattattgagatttttttatattttttttttttttttttttattttttaattatttttaaattatattaatatgttttttatatattatggaattgttatgattgtaattttttgttattttttaatgtttggttttttttttatgtttaagtttttttttggtattaagtttgagatttaagaagagttagttaattttattatttttttgtgttagaaaatttaagaattggtaatagtatttatttagatgttatttgatagaaaggaattttggttttaagaagtattaattttgataggaaatttaaagaattgaaaggaaaaaggaaatgataggttttttaattaatgtgattttagattattttattatatcgtaatataatagtattaatttaaatttattttagattggatttaaaattatttttgtttatataaatttattttatttatttatgatgtagatattagttaggtttattttttttagataatttgaagttaagttgtttggtgaaaatgatagtttatttacgtgttgagatatgatttatatgaggataattgttttgaaaatattgagtagggaatgtttttaaaatttttttatatttattaatattttttcgttgtaataaattttattaatataatatgaaaaatatataaatgaattatgattagttgaaatttattgttttttattatggttttattatggtaaataaagatgaggaaatatttagttttagtttgtaataataaaattttatagtaggaagattgtataaaaatgagaggtattttttaggaagtaggttaaagtggaatttttaaaacgatgttatagtaggtataagtaagtttagaaatattaatttggaaggaatttgattggaggttgtaaagggttattagaatggaaaaaaaagaagtagggtaaatcgtgttttttagtttttatttgtaaattttattgaaggtagtggaaggtttatggaaatatttgaaagatatatttgatttagtttaaaagttttattaaattagtattttaataaattgttttagataagttttgtttttatggtttttttaatattattttatttatagtttgtttgaaaattatagaaaagaggaaaagttaataagggatatttgattttttttttaatttaaaagatattaagatattttgttttttttataattatgttgagaaaatgttttttgtaaagaaatatatgaattttaagtaagttttgcgttttttgatgtttataatatgggaagtatagatagatataaaatgtatattttttgttatttagtttgagggaatttagtttttgaaatgaaattgtgtttagaattgatggtatttgatttaagttttattttttaagtttttgtttggtttaattacgtgttaagatattttaatattttgttgggaatttttaggtagtataggtttaggcgttagtaaagtagttagggattttagatagagggtgttatttagggtaagaaaatgaattttttgtgttatatttgtatttttattttttaattaagagtatttgaaaatattgatggtataaacgaattaaatttttgttttagtattaaatggatgaattattacggtttaagtattgaattagttttaatattattattttagaaatgttttagtattaattaggataagaaatagggatttttttcgtaagaagcgagattgtatttttttttttttttgtatacggaaaggggataaaatttatagtgaaaggtttagaagcggcgtatttcgtttacgggcggtttacgtgtttatttatttcgtatcgcgttttgttttatttttatggagcggggtttgttaacgttcgcgagagttttttcggtttttacgtttgttacgttttaaaggatcgagataaattggaaagtcgaaagaggttcgcgtttataggtagttgcgtagcgttcgaatagttttaagtgagtaggggcggggagcgcggtagggtatcgtcgtttcgtaagggtttttgcgattgggttttaggcgtcgttatttagtttttcgggggcggggcgaggtcgggaaggggcgtggtcgtcgggcggcgagtcgcgcgttttcgtttcgggagggagttataggttcgtatacgcgaggtcgggcgcgcgtagtcggtaggcgggtgaagtttttttaggtgttgtaggcggtgttgaggtatagggtttgttgtaggagtagcggttcgaattcgttttagcggttcgtcgtcgttagcggttttcgcgtcgcgtgtgtattttcgcgtattgaaggaggttcgttagtttttattagttttcgcggatcgtgtaatggtttagcgtaagaatgttaagagtagcggtaatagtagtagtagcggtttcggtagcggtagtacgagtgcgggtagtagtagtttcggggttcggagaggttagaggttttgcggggcggggatttggggtttcgtttcggggtagggagtcggttggcgcggcggacgttgcgggtgtatttttttaggttttatcgcgcgtcgtttttatttttcgcgacgttttttttttaggcgcgcggggcggaggtcgtattcggcgggtttggcgggcgggcgaggggttaggcggatcggggttcgagttttcgggatgttagtttcggggagtttttttttagcggtttttttatttgtagggcgtagtcgagatagaggttgttgaacgattgttttttggtttttcgtggaattgaatatgggagtaagagaataatttatcgtttgttttgcgtgttttggggagttgaaaatgagttaaagttagggaaagtgagtttttgtttaattagtagcgttttagagtaatttaaaggaggtgaaaatgggggcgtcggggggtagggggagggaagaagttgggagtgatttgaatgtttttagaaattattttaaatatttttgtttgtatgtagtttttttaatatgcgttgtagttgtttttaaaatagaatgttatgaaatattgaacgagcgtttgtatttttattatttttatttaaaataaaaatcgattggatatttattttttttttcgttcgtgtgtatatttagtagagagaatagatttttaaatttgtttcgttttatattttagtgatttttggttttttttatattttttttgatttatatttgggatattgaaattgtaatatatatgtgtatggaatgtgagttgtaaattttatttgaagtgatttagattttttgttttttgagatttttagattatgtatttataatatattaagaaaatgaattagttatagttaaagaagtattttttttatagtatttgttattatttgaatttgttttattatttttatgtgtgttgtttttggtttattttttttgtatttttagtttttagaatgttttttttttataataggtgtttaataaatatttgagtagtgaatgaatgaatggatttaaatggggaaagtagtgtattaaatttattgtataaatttatattttaaggattaatatttgtattttaaaagtaaagatgtagatatagtttgaagtttaatgtaagtatattaatttatttttgatataagtgaaagtttgtgttttttttttatttgtttttaaatgttatttatttaaatttgtagagggatagattaattgttttagtcgattgaggttatttttttttaatatttttaaatgagaatgggttttttttattgtgtttttaagggtattaagtagagaaagttgatgaataattttaatgttagttgtttttaaaaggtttttgtagttatttgttagagaagtatgttttcgttttattttatttttgtgtttatgaggagagggttgattgtatttgagggaagttattttatatggttttttattggtgagaattaatattgggaaatgtgttttacgtttttagatttattttataattatttgaagtattttaataggtaagagataggtttagaaaatgtagtaatttaaattaattttttttgatttttatagttaggtattttagaataaattttgtttatatttgaggatttatagttttttaagtattttatacgttgattttttaatagttatgaaatagatatagtatgtaaaagaatatgtaaaagggaggaatgttcgtgatacgaaaataaaagttgatattggaattttgtatgtgacgtaatgagtattttttattcgtatattcgtaatttttttttttttttttttagtagatattgagtttttattgtgtgttagatagaaggtattgggtatggaaattatttttttttattattttaaatagttaaagtatagtgtcgtgtatagtaggttgtattcgaaagataaagtcggttttttttttaatgttgtttatttggttattaaagtacggacgttgtgcgaattatttttttttattgggaaaattaaagattttttagtagtgttatattgtgagatttatttagttttttgtttaaattatatagatgaggaaattaatgtttagagaagttgtcgagtttattgaaggttgtttagtttatggaaatttaattaattattggaagaatcgagattaagaatttaggttttgttatttattttgttatgtttgaattttaggttttttagtatgtaattggagttgaattagattattaagtttttttttggttgtttttatgagtattatatttaattattggagaaaattatgtttttgttttattattaattatattttttttgataaaaattttatttgaaatattatttgaaattttagtttgagaagaagtatatgtgtttaaatagtacgttttttgatatgttttatattgagagttagaaaatgacggtattggttatattaaatattattattttttaagttgttgtgtaaacgtatggggaaaaaagaatttagttatttgaaatatgtattttagggaaaaggtgatttttttttttttttttggttaaattttattttggtggtttttttgttgaaaagtgatgtttggaagttggaatttggggaatttatattatagatttttaaagtaagtgtttgttttttattttttttagtttaagttgaaaaatgataaaatggttttttatagagtttaattttattttttttttagttttattttttataatataaaagaaatatgaataaattagattttttatttttattttgtatatagaattggatttgtatggttagttgggtttaggggaagttttttttaaatttattgatttgaaaatagtttgataaagaaggattatgatgtttttttgggtttattttgtagatattcgtatgtgtaatgttttttgtttgtttgtttagttttttttttttgagtattattttttaattttttgtattttttagtagttttttatttttttgtttattttgtttgggtgttttgttattatattaatttttgttattaggtgttattgtagaatatattttttttttagtttgaagtttggggttatgtaatagtaggttttaattattatttaattcgtttgtatatatttaaaattattgatagataagtatttaaaaatttttagttattttttaatttttttaaggtgttttagtagattgagtagtttttttgtttaggtttaattagaatgaaatatatttttgtattgtttgtaaaatattaatagttttatttgatgagtatttgttatttagaaatatatttttgagtttagtttagttttttttttttttttattttgagtgttttttagattattaagtaattgagggatttaatatattgttgattgtattgtggagtttttgaatgaagaggttttagtaaaattttttttttttagttaaagattattagagttaattgtttaattttttattatttattttaagatgaaaatataggaggattataatttttttattgtaagaatcgttagttattttgtgtttagtttaatagtattttgtttattttgattaaattatatgaaattaagtattaaataatgttttgagggagtttatgaatatattttttagagattagttaatttttggtggtttgtggaagtgaaagttttatattttggattatattttagttttgttttaaaataatttgttttatagagattattagaaaatgaatgtatgatatttttatttttagttagttattaatagaggaatttggataaaggtttatagggtttatttattttgttgttagttaatattagatatttagtttttgagttttttggttttaatagaaaaatttttttttttagaaagttagtgtagtttgggagaaggaatatgatgatttggattatatttgtgtaagaattagaattaagaatcgttaaaaatttttgtttttagtttttttaaatgtaaagaattattatttattttttttttagagttttgatattattaatgttgattttatatggttttgtgttttttagttgttttcgttaaagtacgtttaatagtaggggtgagtgtaaaattttggagattataaaagtgtagatgttattaggttattgtatgttttgatttttttgatgatttatttttatttatttatttatttttatgttttatagtatttttgtgttaagtaaaatgtatatttttgagatagagtttatattatgttttgaggattgttcgatatattttttttagtttttggaggtgtaagtatttatttgtatattaatttttaagttggtgatttgtttttaatggtttagaaatttgtaatattattttattttatttaggtttagatatatttagttttttgaggtaattttagttattgttttaatattatgaaaatatgtagtttagtttgtggtttggatatttttatattatttttaaatggtttgattttattttgtattaaggtataaaaatgttttttaaatgaatttttttttaataaattttgtatgtatatataatttatgtatattttatttaaattttcggggaaaagttttagttatttatcgggaaatgtggaggtgtaagggttgtttgttttattatttgttgttagtgtttgttttgtattgtatatgtgggtgtgatgagtttttttggttcggttttgtagttttggttatttttattagaggattaaggatttaggatgttttttttttttttgtgtattattgtgggagtatagtttggaggttagtgttttaatttttttttaattatatttttttttggtattgttgggagttaagatggtatttttttgttagttattatttttaaaattttagtattttatttttttgatgtgagggatgttttaggtttttgttttgtatttgatttttgttttttagggatgtgttttggttatttttggttgatgtggttattttttaacggtaaattattgaatgtaatttagtttttattaaattggttatagttgaggataaatttggtttagataatttattagatttaaaggaaatgttgagtttttttggtgaataattttttttaaaaagaaaattattttttgaaggatttgggttattcggttttttgtgagatttaggttatttgtttagttatgtgattgttattatttgtcgtagatattatgtgtgttttagagcggagagtattggtgaattgatttggttgaggggtggggggttggggggtgggagtggttgttgtttagttatagttaggtttttaagggtagttattatttttgtatttggagaaatgttagtattttttttttatatgtgtgtttatacgttgaatttagtgatttattttgtatttaagattttaaggattagttttaaatttaaagtaggagaatattttttgataattttattttataattagtattgttgtaattgtttttttttatattttatataggtttgatagttatttttattattttatagtgtagagttattattattttgttgttttattttgtttgtaattttttttttttatttattatttttttaatatatagtttttgtttttattttttataggttgtttttaattttaatttttttggtatattggaaagatttttttggttttagttttatttgtaaattttatttaggatatttaattttttgatttatataaattttaaaatttgtgttgtaaatatttgttgaaagaatatttagtatttaattatttttttattttttgaattaagttaatttgtataagatgtttgttattgagtttttgtaagttgttttatggatttgttttttggtagagagttagttttttaatttttataataaaaatatttttgtgtattgttttttaaaattgtatgtatttgaaatagtatatatttaagtttataaataattgtagagagtaatgtagtggatgtttatgtattgattatataggcgaagaaatgaaatattattagatttttagattttttttttttgtggtatttttttttaattattgttaaatattttatggtagttattattataaatataggtatatatgtataaaataatatataatatgtagtatatatatattatgtatttatatatgtaaattgtatttattattaaattaatgtatttgaaaattgtttaggaagtatatttatatttttatgtgtagaaatatatttatatatatatatatatatatgtatatatattgtatagtacgtattaaaagttttgtgaataggtttttatttggtatattattttgatagtatttgtttgaaatttttttaaattttagttttttatttttatatatgtagttttatattatatgaatatgttttgttttttatttagttattttatcgtaggttatttttttttttttaaataatgttgttttgtatatgtatgtgtttatttttttttatgtatatatgtttgagtgtttttttagggtataatttggaattggaattgtgggttatagaaagtatatatattagattttattggatattgttattttttaatttttaagtggttgtattaatttatagttttgtttttaatgaataagagtttgttttgtgttattattatattgttaatatttggtgaagtttaatatttgttagttgagtggttgtgaagtagtatttgagggtttaaatttgtatttttttaattattagtgaagttattggtaagagtagttttgtgtttttttttttgaattgtttgttcgtatattttgtttatttttttgtttttgttttgtatttgtagtattgataggtagattttttttttttaatattttgaattttttgattatttttgataaaggattttttttagtttgtgtttatttatatttttattttttatggtatacgttgttgaatagaattttaagattttaatatattaatagaatttttttattttgtattttgtggtttatatttttatattttttgtaagatatataatatagatgttatgaattatttttgtatttttttttaaaagatttgaaacgttgtttttttatatttagatttttgaattatttggtgtagtattttattgtatattttgttattagggatttaatttagtattgttttttaaaaagggttaatgagaatgttttgtattgttagttgatttgttatttttttatcgtagtttgtagtattattttttgtgtatgaatacgtcgggttttattttgttttaggtatgtagaagtaatattaaattgaattgtttattatagttttgtaatgagtttatatatttgatagggtatgtttttttattttgttttttttattattgtgtttgttgttttgggatttttttttatttatttttttagattttagaatttgtttattaaatatgtttatgaaaaatatttgagaatttttattggtattgtattgaatttatagaataatttgggataaatatagatgtttataatattgaatttttttatatatgtatttggtcggttggtttgttttttttttttttttttttttttttttttttttttttttttttttttttttttttttttttttttttttttttttttttttttttttttttttttttttttttttttttttttttgagttatgatttcgtttttttatttaggttgtagtgttgtggtagttttgattttttaggtttcggtgatttttcgattttagtttttttggtagttgggattataggtatgtattattatgtttggttaatttttttattttttgtatagatggggttttgtcgtgttggtttgtttgtttttaaatttttgggtttaagtggtttgtttatttcgattttttaaagtgttgggattataggtgtgagttttgtatttggtttataattttttatgtatttaagtttgataatttttataattttatttgaaagttatatatattttttattagattaagtttgggtattttgtattttaaaaaatatttttaatagtatttttaaattaatattttttaatgaaatttaaaaaatatgtatttaaattgaaagagttttgtaatgattttattatgtagatgttatagcggttaatattttgatagatttgttttgttatgtttattagttaattttatttttttatgttttcgaagtaagttgtaggtattagtatattttatttttataaatatttatatgtgtttgtagttaattagagtttagtatttgttttttttttttttttgaggtaaaatttttacgtagtgaattgtataaattttagtgtttgatttgaggagtttttatatttatttttatttttgtaaaataataatttattaggatagagaatatttttattattttgtaaagtttttttaagttttttttttgcgtttatttttgttattagaggtagttattgtattatattttttgattatagattagtgttttttattttagaattttttttgtaagtatttttttttgtaaagtttttttttatttagtataatattttttagttcgtttatgttgtgtatacggttatttgtttttttttattgttaaatagtattttagtgtttgattatagtataattttttttaagtttttattttaggtttaggggtatatatataggtttgttatatgggtaaattgtatgttataggggtttggtgtatagataattttgttatataggtaataagttttatatttgttgagtagtttttttgatttgataaatgataattttttttttagaattttagaaattttttttttttatttttttttaagagagatagaaatggagaaatgattaaaatttgaatttaaattattattttgttttattagttattttattatagattttttaattttttttttaagaaagggttttgttttgttgtttaggttggagtataatggtgtaattatagtttattgtagtataggtttattttaaataatattattttgggtatttgtttggttatatatttattataaaaatttaattattgggtaaaattatttgatatttatgtattgaataaaaatgttggatgaatgaaaagatgaattatatttgtttagttttgttgttttttagttaatgaggaaaaatataagagattggtattagttatagaatgtttaagaggatataagataagaatttagttttattgaagttttagtattttttttgttaaaaaaaaatttaatttgatttttagaggtaataagtagtaaaggtaggaaatttttagttattagttattataattttatatttagagtatgtggatattttggaaggtagtatttttgttaaatttagtgttgtacgtaaatggatttgtacgtatatgtttgtatgttatatagaaataagcgtttttttttggatatagtgttagaaaataagtttttttgtttataaaaatgtagtgaattagatatataaaattgtttttgaatttgtggtgttttttgattttatagaagtttatttattttcgtaaatttttttttttttaaattttagtagtggtttaatttgtatttttttttttatatgtttataatatataaaaattttggaaattattatttttttttattaatattgtagatatttttatttaatttttttttgttatggttgtgttttaggtaatgatatttatttgaagttgatttaatttgtaataataggatttatgtttagtaagtatttttatttaatatataaattacgtttttatatagttagtttttatatagattatattagaaataaagttgatggttatttgttatttggtaagtatattttatgaatttattatattatttataattttggttttgagggatttattaatatttaaagaatgttagaaaaaggaattatttgacgttttaagaattatttagtattttgagaggttgaggtgggtagattatttgaggttaggagtttaagattagtttggttaatatggtgaaattttgtttttattaaaaatataaaaattagttaggcgtggtggtaggtgtttgtaattttagttatttaggaggttgaagtaggagaattttttgaatcgagtcgagattatgttagtgtattatagtttgggtgatagagggagattatgttttaaaaaaaaaaaaaaatttatttatatgtaggtatgtagataaatatatgtatatgtttgagtgtatatatatatatttagatggatttagtttttatggttttttttgaaaaattgatttagtggtgtatttttaaaaaatgtatatatttttttaatataaagaattttatttttttttttagaagaatatattggtaatatatttttgatttgagtcgttggaaattattaatagtattttgtaattagaattggatttagaagttaaagggtaagttttagattagagttagtggggttttttgaaatcgtgtaatttggtttattgattagagattaaggaatttagagttgtagagatgagagtatgtttttagttttatttaatttgtattggtgattttgggagaattattttatgttttatttataaaatagataattatttttgtttttttttttgttggtttttatttaggaattgtttttgaagggaatatgtggaaatgtttggggatgttttttttgttataagttttgatagttttttgtttttgagtttaggggaaattagggatgttagaaattttgtaatgtgaggaataggtgtataggatgaaatattgttttgtataaatatttagaaatgttttttgtagaaatagtggtaggatatcgtgaggattatcggtagtaaagtatatgaaagtattttgatggcgattttatttgttatataaatgggagatatcgttttggttttttattatttgtttgataaattttttttttttttagaaggtattttgggatattatttattttttttatttattaatattgatatatgtattatatttttttttatgggaaatttgaatattgtatatttttttaagggtagtgttgattattttttgttaatattaaattatttttgtttatttttggttgtaagaagaatatttataaaagaatataaggtatattaagtatattaaatgcgataaatgatattttaggtggatagtagtttataaagttgttttttgtagtgagattaattgtgaatgagtttttttttgtttttttaggttttaacggattttgtaaaggagtaggaatggattgtgttgttttatttttttgtttttttttttttggttaagaatatggaatggtttagggggagatatttttttttgtgtgttaatagagtttttaagattttgtagaaatgaaatgggacggagaaaaggatttggttatatttttatgtgattttattaagttgtttatgtgttttgtttttggaaagaggtaatatttaggttattttgatgagtaatttggatggaatatatatattatattaaatttttaaaaaaatttaggagtttattttttgtattattttaaagttagtgttgtatttaaataattttttttgtttttagaaatattttgtgtgacgtgttttgagaatttaattggaaattgtttttgaaatgatttattattgtatataattttaaattattggagaaataattgtgagaataagtgtttagtaaaatgttttttttttatgatattttatatttatttttaaataga

SEQ ID NO: 164 - DNA, 17137 bp, Artificial Sequence
  chemically treated genomic DNA (Homo sapiens)
tttgtttagaaataaatgtaagatattataagaagaaaatattttattgaatatttatttttataattatttttttaataatttgggattatgtataatgatagattattttaaaaatagtttttagttaaatttttaaaatacgttatataaaatatttttgaaaatagaaaagattgtttagatgtaatattaattttgaagtagtgtaggaaataaatttttgaatttttttaaagatttagtataatatgtatattttatttaagttatttattaaaatgatttgaatattatttttttttaaaggtagagtatataaataatttaatgaaattatataaaaatgtagttaaattttttttttcgttttattttatttttgtagaattttaaaaattttgttaatatatagaagaaaatatttttttttaaattattttatatttttagttagagagaaaaggatagaaaagtgaaatagtataatttatttttatttttttataagattcgttgaggtttaaggaaataggaaaaggtttatttataattggttttattgtaggaaatagttttgtaaattgttgtttatttaaagtgttatttatcgtatttgatatgtttaatatattttatatttttttgtaaatattttttttatagttaaaaataaataaaaatgatttgatattaatagaaaatagttaatattgtttttaaaaagatatataatatttaaattttttataaaaaggaatataatatatatattaatattaataaataaaaagaataaataatattttaaaatgttttttgagaagaggaaaagtttattaaatagatgatggaaggttagggcggtgttttttatttgtgtggtaggtagagtcgttattaaagtgtttttatgtgttttgttgtcggtgatttttacggtgttttgttattatttttatagagggtatttttggatgtttatgtaggataatgttttattttgtgtatttgttttttatattgtaagatttttggtatttttggttttttttggatttaaaggtaaggagttgttaaggtttatgataaaaaaaatatttttagatatttttatatgttttttttaggggtagtttttgggtgagaattaataggaagaaggataggaataattatttgttttataagtgaaatatgaaatgatttttttaaagttattagtataagttgggtagaattaagaatatatttttatttttatagttttgagttttttaatttttaattagtgggttaaattatacgattttaaaaaattttattagttttaatttagaatttgttttttgatttttaagtttagttttaattatagaatattattagtaatttttagcggtttaagttaagaatatattgttaatatatttttttggaagaaaaaatgaaattttttgtgttaaaaggatatatgtattttttaaaaatatattattagattagttttttaaaaggggttataaaaattaaatttatttgagtatatatatgtatatttaaatatatatatatatttatttatatgtttatatgtagataaatttttttttttttttgagatatggtttttttttgttatttaggttgtagtgtattagtatgatttcggttcggtttaagggatttttttgttttagttttttgagtaattgggattataggtatttgttattacgtttggttaatttttgtatttttagtagagatagggttttattatattggttaggttggttttgaatttttgattttaagtgatttgtttattttagttttttaaagtgttgggtaatttttaaaacgttaagtaatttttttttttgatattttttaaatattaatggattttttagaattagagttgtaaataatatggtaaatttataaagtatgtttattaaatgataaatggttattaattttgtttttaatgtgatttatataaaagttggttatataaaaacgtaatttatgtattaaataaaaatatttgttgggtatagattttattgttgtagattaaattaattttaaataggtattattatttgaaatatagttatagtaggagaagattgggtgagaatgtttgtaatgttggtagagggaaatggtggtttttaaaatttttatgtgttgtaagtatataaaaagaaaaatataaattaaattattattaaaatttgaagaaaaaaagatttacgaaagtgagtaagtttttgtgaggttaggaagtattatagatttagaaatagttttgtatgtttaatttattatatttttataaatagaaagatttattttttaatattgtatttaaaaaagaacgtttatttttatataatatatagatatatgcgtataaatttatttgcgtataatattaagtttaataaaaatattattttttaaaatatttatatattttaaatatggaattatagtagttaatgattaagaattttttgtttttgttatttattgtttttaagaattaaattgaatttttttttggtaaaaggaatgttaaaattttagtaaaattgggtttttgttttatgtttttttgaatattttgtagttgatattagttttttgtatttttttttattaattggaaaatagtaaggttaaataaatatagtttatttttttatttatttaatatttttatttagtatatgaatattagataattttatttaataattaagtttttataatgagtatgtggttaaatagatatttaagatgatattatttaaaataagtttatattgtagtgagttatgattgtattattatattttagtttgggtaataaagtaagatttttttttaaaaaaaaaattaaaaagtttataatgaaatagttaataaaataaagtaatagtttgaatttaaattttaattatttttttatttttattttttttaaagggaaatggaggagaaaaatttttgagattttgaaaaggaaattattatttattagattaaaaaagttatttagtaggtataaagtttattatttgtgtgataaaattatttgtatattaaatttttgtgatatgtaatttatttatataataaatttgtatatgtatttttgaatttaaaataaaagtttaaaaaaaattgtgttatagttagatattggaatattatttgataataaaaaggaataagtgatcgtgtatataatataaacgaattaaaaaatattatgttgagtgaaaggagattttataaaaaaaagtatttgtaaaagaagttttagaatagaaaatattaatttatgattaaaaaatgtagtataatggttgtttttggtggtagaggtggacgtaagaaaggggtttgagagaattttatagggtgatgaaaatattttttattttaataggttattgttttataaaggtagaaatggatataaaaattttttagattagatattaaaatttgtgtaatttattacgtgaaaattttattttaggagggaaaaaaaaataaatgttaagttttagttagttataggtatatgtaaatgtttatgaaagtgaaatatattaatatttgtaatttatttcgaaggtatgaaagaataagattgattaatagatatgataaagtaaatttattaaaatgttaatcgttgtagtatttatatggtggagttattatagaatttttttaatttggatatatattttttaagttttattaaaaaatgttaatttaaaaatattattgaaaatgttttttaaaatataaagtatttagatttaatttaataaaagatgtatatgatttttaaataagattataaaaattgttagatttaaatatataagaaattataggttaggtgtagggtttatatttgtaattttagtattttgggaagtcgagatgagtagattatttgagtttaggagtttgagagtagataggttaatacggtaaaattttatttgtataagaaataagaaaattagttaggtatggtggtgtatgtttgtagttttagttattagggaggttgaggtcggaggattatcggagtttgggaagttaaggttgttatagtattgtagtttgggtgaaagagcgaggttatgatttaaaaaaaaaaaaaaaaaaaaaaaaagaagaagaagaagaagaagaagaagaaggaggaagaggaagaagaagaagaaagaagaaagaagaaaaaagaaagaagaaagaagagaaagtaggttagtcggttaggtgtatgtataagaagatttagtattataaatatttgtatttgttttaaattgttttatagatttaatataatgttagtaaaaatttttaaatattttttatgaatatatttgataagtagattttaaaatttagagaaatggatgaggaaaggttttaaagtagtaaatataatagtgaaaaaggtagggtagaaggatatgttttattagatatgtggatttattataaagttatagtgagtaatttagtttggtgttgtttttatatgtttggaataaaatagagttcgacgtatttatatataagaggtgatgttgtagattacggtaaaaagatgataaattaattaatagtataggatatttttattggttttttttaaaaaataatattgaattagatttttaataataaaatatataataaaatgttatattaggtggtttagagatttaaatgtaaaaaagtaacgttttagattttttagaggaaaatataagaataatttataatatttgtgttatgtgttttataaaaagtataaaggtgtgaattataaagtataaaatggaaaaattttattaatatattaaaattttaaaattttgtttaataacgtatattataaaaaatgaaaatgtgagtaaatatagattaggagaagttttttattaaaaataattaaaaggtttaggatattaaaaaaaaaaaatttatttattaatattataaatataaaataaaaatagaagaataggtaagatatacgaataggtaatttaaaggaggaaatataaggttatttttattagtaattttattagtaattagaaaaatgtaagtttaaatttttaagtattattttatagttatttaattggtaaatattaaattttattaaatgttgataatgtgatgatggtatagaataagtttttatttattaggggtagaattgtaagttgatataattatttgggggttaaaaaatggtaatatttagtaaagtttaatgtgtgtattttttatgatttataattttaattttagattatgttttagaaaaatatttagatatgtatgtatggggagagataggtatatatatgtatagggtagtattatttgaaagaaaaaaagtggtttgcgataggatggttaaatgaaaagtaaggtatatttatatggtgtagaattatatatgtgaaaataaagaattggagtttggaggaattttaaataaatgttgttaaaatagtatgttaagtagaagtttgtttataaaatttttaatacgtgttatatagtatatatatatatatgtgtgtgtgtgtataggtatatttttatatatagggatatagatatattttttgggtagtttttaaatatattgatttaataatagatatagtttatatgtgtggatatataatgtgtatgtgttatatgttatatattattttgtgtatatatatttgtatttatgataatgattattataaaatgtttaataatggttaggaaggaatattataggagaggaaaatttaggaatttgataatgttttattttttcgtttatatggttagtatatgggtatttattgtattattttttataattatttataggtttaaatatgtattattttaaatatatataattttaaagagtaatatatagaaatatttttattataaaggttagagaattagttttttgttaaaaagtaaatttatgaaataatttataaaaatttagtgataagtattttatataaattgatttgatttaaagaatggaaaagtagttaaatgttagatatttttttaataaatatttataatatagattttgaggtttatgtaagttaaaaaattaagtgttttaaataaaatttataagtgaaattaagattaaaagagtttttttagtatattaagaaaattgaaattgaaagtagtttgtgaaagatagggataaaaattgtatattagaagaataataaataagaaaaagaagttatagataggatagaataataaaataatagtgattttgtattatggaatggtagaaatggttgttaaatttatgtaaaatatgagaaaaggtagttataataatgttggttgtgaaataaaattattaaaggatatttttttattttaaatttaagattgatttttggggttttaagtataggatgagttattgggtttaacgtgtgggtatatatgtaggagagaagtgttggtatttttttaagtatagagatagtggttgtttttggaaatttgattataattggatagtaattatttttattttttagttttttattttttaattaagttaatttattaatgtttttcgttttggagtatatatagtatttacggtagatgatgatagttatatgattaggtaagtgatttgaattttatagggggtcgaatagtttagattttttaaaagatgattttttttttaaaaagagttatttattaagggagtttaatattttttttgagtttaataggttatttaaattaaatttgtttttagttgtggttaatttgataggaattgaattatatttagtgatttgtcgttaaaagataattatattagttaaaggtaattaagatatatttttgaaaaataaagattaaatgtaggataaaagtttgaagtattttttatattaggggaataaaatattaaaattttaaaaataatgattaataagaaaatattattttggtttttagtagtattagaagaaagtataattaaaaaaaagttaaagtattggtttttagattatatttttatagtggtatatagggaagaaaagaatattttgaatttttagttttttaataaaaatggttagagttgtaggatcgaattagagaaatttattatatttatatgtgtagtgtagagtagatattggtagtagataatgaagtaagtagtttttgtatttttatatttttcgatagatggttgaggttttttttcggaggtttaggtggggtgtatataggttatatgtatatatagggtttattaaagagaagtttatttgaaaaatatttttgtattttggtatagaatgaagttaagttatttagaggtgatatggaagtatttaagttataaattaagttgtatatttttatgatattaaaatagtggttggagttattttaaaagattaaatatatttgagtttgggtaagataaaataatgttatagatttttgagttattaagggtaaattattaatttgaaagttgatgtgtaaatggatatttatatttttagaagttgagagaaatgtatcgagtagtttttaaagtatagtataaattttattttaagaatatatattttatttaatataaagatgttatggaatatgaaaataaataaataaataagaataaattattaaaaaagttaaagtatgtaatggtttgatgatatttatatttttatagtttttaaagttttgtatttatttttattattagacgtattttaacggaaataattgagaaatataaagttatatgaaattagtattagtgatattaaaattttgaaaagaaagtagataataattttttatatttaaggaggttgggaatagagatttttagcgatttttggttttgatttttatatagatatgatttaggttattatatttttttttttaaattgtattagttttttggagaaaagggtttttttattggaattagagagtttaggggttaagtatttgatattaattaataataagatggatagattttatgagtttttatttaagtttttttgttgataattggttgaaaatgaaaatgttatatatttattttttaataatttttatgagatagattattttaaagtaagattaaaatatagtttaaaatatagaatttttatttttatagattattagaggttaattggtttttggaaaatgtgtttataaatttttttagaatattatttagtgtttggttttatatgatttggttaggatggataaaatgttgttgaattgaatataaaatagttgacggtttttgtagtggaagaattatggtttttttatgtttttattttagaatgagtaatggaggattaagtaattggttttgatggtttttggttaaagaaagaaaattttgttagggtttttttatttaagggttttataatgtaattagtagtgtattgaattttttagttatttagtaatttaagagatatttaaagtagaaagaaaaaggaagttaaattaaatttagaagtgtgtttttaaatgataaatatttattaaatgaagttgttaatgttttataggtagtataggaatatattttattttaattaagtttaaataaaaaggttgtttaatttattgagatattttgagagagttaaaaagtagttaagagtttttaagtgtttatttattaatagttttgagtatatatagacggattaaataataattaaaatttgttgttatataattttaagttttaaattaaaagggggatatattttatagtgatatttagtggtaaaagttaatgtagtagtaggatatttagataaaataaatagggagatggaaagttgttaggagatatagggagttaaggggtgatatttaaaagggaaaaattaaataaataaatagaaaatattatatatacgagtgtttataaaataagtttaaaaggatattatgatttttttttgttaaattatttttaaattaataaatttgaaaaaggttttttttgggtttaattggttatgtaagtttagttttatatgtaaaataaaggtaggaagtttaatttatttatgttttttttatattataaagagtaaaattgaaaaaaaagtaaaattgaattttgtagaaaattattttattattttttagtttaagttgaagaaaataaaaagtagatatttgttttaaaaatttgtgatataaattttttaaattttagtttttaaatattattttttagtaaaaaaattattaagataaagtttggttaggaaaaaaaaaagaaattattttttttttaaaatgtatgttttaaatgattgggtttttttttttttatacgtttatataataatttaagaaataataatgtttaatgtgattaatgtcgttattttttgatttttaatgtaagatatattaaaaaacgtattatttgaatatatatatttttttttaaattaaaattttaaatagtgttttaaatagaatttttgttaagggaaatgtaattggtgataggataaaagtatagttttttttaataattaaatgtagtatttatggagatagttagaagaaaatttgataatttagtttaattttaattatatattagagaatttaaaatttaagtatggtaaaatgaataataaaatttgggtttttagtttcggtttttttagtaattagttgagtttttatgaattaaataatttttaatgaattcggtaatttttttgggtattaatttttttatttgtatgatttgagtaggaaattaaatgggttttatagtatgatattgttaaaaagtttttgatttttttagtagaaggaaatggttcgtataacgttcgtattttaatgattaggtaaatagtattaaaagaaaagtcggttttatttttcgagtatagtttattatatacgatattgtattttaattgtttagggtgatggaaggaaatggtttttatatttagtgttttttatttggtatatagtaagaatttagtatttattggagaaaaaaaagaaaaggttgcggatatgcggataaagaatatttattacgttatatgtagggttttaatattaatttttgttttcgtattacgggtattttttttttttatatatttttttatatattatgtttgttttatgattattagagaattaacgtgtaaaatgtttaaaaggttgtagatttttaaatatgggtagagtttgttttaaaatgtttgattatgaaagttaggagaagttaatttaagttattgtattttttaaatttattttttgtttgttaaaatgttttaaatagttatggggtaggtttagaaacgtgagatatattttttagtattagtttttattaataagaggttatataaagtgattttttttagatgtaattagttttttttttataaatataaaaatgaaatggaacgaagatatgtttttttggtaaatagttatagaaattttttgaaaataattaatattaaagttgtttattagttttttttgtttagtgtttttagaggtataatgagaagaatttatttttatttagggatgttaaaaaagagtagttttagtcggttgaggtaattaatttatttttttgtaggtttaagtaagtgatatttaagaataagtgaaaaaggaatataaatttttatttatgttaaaggtgaattaatatgtttgtattgaattttaaattgtgtttatatttttatttttagaatataaatattagtttttagaatgtaaatttgtgtaatggatttaatgtattattttttttatttaaatttatttatttatttattatttaaatatttattgagtatttattatgggaaaggaatattttaggagttggggatatagagagaatgagttaaagataatatatatgaaagtaataagataagtttagatagtgataagtgttataaagaaaatatttttttgattatagttgatttatttttttggtatattatgaatgtatgatttgaagattttagaaaataaagagtttaaattattttaagtgaagtttatagtttatattttatatatatgtgtattgtagttttaatattttaaatatgagttaaaggaagtataaaagaaattaagaattattgaaatatgagacgaaatagatttaaaaatttgttttttttgttggatatgtatacggacgaggagaaaggtgaatatttaatcgatttttattttaagtaaaagtggtaaaaatatagacgttcgtttagtattttatgatattttattttaaaggtaattgtaacgtatattaagaaagttatatataagtaaaaatatttaaaataatttttgagagtatttaaattatttttaattttttttttttttttgtttttcggcgtttttatttttattttttttgagttgttttgaaacgttgttggttaggtaggaatttattttttttgattttggtttatttttaattttttaaaatacgtaaggtaaacgataaattgtttttttatttttatgtttaattttacggaaagttaagaaatagtcgtttagtaatttttgtttcggttgcgttttgtaggtgaaggaatcgttgggaaggggtttttcgagattagtatttcgagggttcggatttcggttcgtttggtttttcgttcgttcgttaggttcgtcgaatgcggttttcgtttcgcgcgtttaaaggaggagcgtcgcgggggatggaggcggcgcgcggtgggatttggggagatgtattcgtagcgttcgtcgcgttagtcggttttttatttcgaggcgaggttttagattttcgtttcgtagggtttttgattttttcgggtttcggggttgttgttgttcgtattcgtgttatcgttgtcggagtcgttgttgttgttgttgtcgttgtttttggtatttttacgttgggttattgtacggttcgcgggggttggtgagggttggcggattttttttagtgcgcgggggtatatacgcgacgcgggaatcgttggcggcggcgggtcgttggagcgggttcgggtcgttgtttttgtagtagattttgtgttttagtatcgtttgtagtatttgggaagattttattcgtttgtcggttgcgcgcgttcggtttcgcgtgtacgaatttgtgattttttttcggggcgagagcgcgcggttcgtcgttcgacggttacgttttttttcggtttcgtttcgttttcggaaggttgagtgacggcgtttgggatttaatcgtaagggtttttacgaggcggcggtattttgtcgcgtttttcgtttttgtttatttagggttgttcgggcgttacgtagttgtttgtgagcgcgagtttttttcggttttttagtttgtttcggttttttggaacgtggtaaacgtggaagtcgagagggttttcgcgagcgttggtagatttcgttttatagggatgggatagggcgcggtgcggaataggtggatacgtgggtcgttcgtgggcggagtgcgtcgtttttaggttttttattgtggattttgtttttttttcgtatataaggaaaggaaggagtgtagtttcgttttttgcgaaagagatttttattttttgttttgattaatattaagatatttttggaatggtgatattaggattagtttaatgtttaaatcgtagtagtttatttatttggtgttgaagtaggaatttagttcgtttgtgttattagtatttttagatatttttagttaaggaatgaaaatgtaaatgtgatataaaaagtttatttttttattttggatggtattttttgtttgaaatttttggttgttttgttaacgtttgggtttgtgttgtttgagaatttttaatagagtattaaaatgttttggtacgtggttgaattagataaggatttgagaaataaaatttagattagatgttattagttttagatatagttttattttagggattgaatttttttaagttaagtaataagaagtatatattttatatttgtttgtattttttatattatgggtattaaaaaacgtaaagtttatttaggatttatatatttttttataaaggatatttttttagtatggttgtgaaaaagataaagtattttagtattttttaaattaaaggagaagttaaatgttttttgttagtttttttttttttttgtaatttttaagtaaattatgggtgaaataatgttaaaaggattataaagataagatttatttaggataatttattaaaatattaatttaatagagtttttgaattaggttaaatgtgttttttaggtatttttataaattttttattgtttttagtgggatttgtaagtgagaattggaggatacgatttgttttattttttttttttttattttgatgattttttataatttttagttaaattttttttaaattaatatttttggatttatttatatttattatagtatcgttttaaaaattttattttaatttgttttttagaaaatgttttttatttttatgtaatttttttattgtgaagttttattattgtaaattggaattgagtatttttttatttttatttgttatagtaagattatagtggaaaataataaattttaattggttatgatttatttatatgttttttatattatattagtgaaatttgttgtaacgaaaggatattggtaagtataggaggattttgaaggtattttttatttagtgtttttaaagtaattatttttatatgagttatattttaatacgtaaatgaattgttatttttattaaatagtttgattttagattatttagaaaaaataagtttgattaatatttatattataaataaatagaataaatttatatgagtagaagtgattttaaatttagtttaaaatggatttgagttagtattattgtgttacgatatggtaaaatgatttgaagttatattagttaagaaatttattattttttttttttttttaattttttaaattttttattaagattggtattttttagagttaaagtttttttttattaaataatatttaagtaagtgttattgttagtttttgagttttttagtatagggaaatgatggaattaattgattttttttaagttttaaatttaatgttagaaagaaatttaaatatggagaaaaagttaaatattagagaataataagaaattatagttatggtaattttatagtatataaaggatatattaatgtgatttaggagtagttagaaagtaagaggaaaaaaggaaaaaatgtggagaaattttaataatttaattgtttgtaagataataattttatttaaattgtatttgttttaaggatcgtgtgagagagagagagtgtgtgtgtgtgtgtgtgtgtatgtgtgtgtgtttaagtaaagtaattatttttttgttttttatgaaaataattagttttttttattggatataagttttttatttaaagaaaagtattttgaaattagtttttagaattttttaatgttattaaatttaaatatataaattagaaggatttgttttaaaataaatagtgttattataatatgtaaaattggattaattagttaatttaaatttttgatagttgacgggaaattatatatatattatataaaattagtattgatatagttttttttgtattgttattattttgatttgattttattttgtaattttataattatatgataaatattattagtttatgttaaaaaaaaaaaattttgagagattttgttaaagagtttgtaagtataaaaaatagagaggattttcgtgtattattgtaataatattttattaatttaaagattattattaatatatttgaaattttatagtatttttttattttaagaagtataatatttattattttaaaaaattattttacgatatattgtggtaaataaataagtggtttagaatattttgttatttttggtgaaattgttataatattgattttattaaataataaagttattttttttttggtaaattcgtttgagttagagatatgtattaatattttagatgtttattaaagttattttttttagttttagaaagtatattgattaagtaaaatttagtggaagttgtttttaagtagttgttttataaattatataaaattttgttttttttattttttaagttatacgtattgtatttcgtttttttgattgtaatataaaagaagaattgagtaatgtagttattaaaaggtatgtatataaaagtaattgtttaaaaatttaagtatagaaggtttggttgattagacgtattttaagagattgattttttaatatttttttttttaaatttgagaaaatagaaataaaatatgaatattttaatatagtatttgggtttatgtgaaaataaattaagttataaataatattaaggaaattatgtttaggttatagattataagaattgttgatatttttaattttatatttttggtgagtaggatagtgtttagagtggagtaattatgtaaatatttttatttcggattttttgagtttgttattttttagtttagggtgtgttttttcgtagagggttattagattttttattcgttatttttttagtttatttttttagttttgtagtgtttttttagttgtagaagttttggtgagaattgtatgtgttggtatgaaatggttagttattaaaatattgggtagttgtaggtgagagtttatgtttgatagtaataaggaagaagatatataaagttaatgttttgttaatagaagggtaataagtagtatttttttataagtagtattcgatcgaaaaggattatttttttaaaaataggtagagatagtttatttattatttattttattatataaatgtaggtagtcgtgaatagttgaagtaagaaattaaaaagtaagtataggaagaaaatgaatattgtatggatttgtgtagtaattatttagggaatatggtagtttgacgtagataaagaattatatttaaggaatatttatttaaaatgtgaaatttaattaatgttaaatagataggttgttaattttttgtaattatgatagttttataaaatcgatgtgattttaaattagaatagtataagatagagaagattatttatgaatgatataaaattaggaggggagatagtagaaaaaaaaagatgtgttttattagttaagtttgattgggtttttttgttgttttttatttttaagttaggagaggttggatttaatgttagaattatggttaattttatttgtagttggttggatatgtgtgtatgaataataagaatttggtaaattttatataagttgttgtatattgttagtttatattttatttaatttttaaaaaaaggaagttaagttttgagttaaaaggattattttaagtattaaagatttttaagtggatttattaggtttaaatttaggtttgtttaaatttaaggttagatttaaattagatttaaatttaaggttttgtttattgagaaagagtagatattaaaaatagtaaattttattgaatgatgtttatttaagtttaatttttgtttgcgtatgtaggttgatttataatataggcggttataggggaggagcggttattattaagtattattatgtgttttttatgttttattaatttttgtcgttaagtattaaggaaaggtgtgtgggatgtttttgttttttgttttttttgtttttttttaatggttttttttttttaaattgtttttgatggaaattttatttgatatatgttgggtataaagaaaaggagagaatttagagtta

SEQ ID NO: 165 - DNA, 6669 bp, Artificial Sequence
  chemically treated genomic DNA (Homo sapiens)
aaaataatttaagaataaaagaagtgtatttttttgtgtaaatttattgataaaggtttttgaataggtaagaaagtatgtttgagttttttttttaatataatattatttttagtttatttttattataagtggaggtggtaatgagtaattaaatgaattgaaggggaaataatcgaaaaagagaagaaaggataagattttaattatatgaagggtattttttttttttatttgtagagagggaaagataaaaagagaggtttaaagtaagtaagagatagtaaagtacgttatgtgaaaatattttttttatatattttattattttttagaaagattagtaatttaatgttttttaagtatgtaaataatttttaggaagtcgtattttatgttgttttatattattagatttataaataatagggataaggtttttgtttataaagttataatttatttggagatagaagatatatatataaataattgtaatgtaaagtaaaaatggtaagaaaatagagttgatttattttatgggaagggaggggttggagaaattattattaagtttggaaattatgtgatgtttgaaggtgtagatgagtattgaaggatggttgggaattttaaagaagttgatagaaagtatatatgtaattatatttggggaatatgtttagtttggatgtagtataaggtttatgaagggtaatagttggagatataatagaaaagataaaatgggtaaggattatgaaaagttttagatagtaatgagtatatatattattaaataaataaaggagtgttataattagagttatatttttgtaaatgttttattaaatatttatgttttggtgatataaaggtgaatagaattagtagtttttgatttgttaggggtgtgttagttttggttttgtttgattttaaatacgtttttgatttttttgtcgttttttattgtatgatataaagtttgattttatataggtaatgttttttaagtttttttgtcggtttgttattggttgggtttagtaaataggaagtattggtgggaggttggagggtaggaggaagtagttatattttttttttattttttttttgttttagtagagttttttttaagattattatttttttattagataagttttttacgtttcgtagttaaattagttttttgattgttttttttttttttattttttttattagtatagtggttttttattgttgttaattattgagatgttttagttgtaagttgttgggcgttttagttttttttttattagtgtaaacgaatttttttattaaatttttttatgttaaatatttagaatggtttttattttttttattgtatgttgttttatatagaaggtaataaatttatttaagaaaatttttatagatgatagttttggggatttttagaatttttgaagtttgtttatttatttatgattaagattattaataaaataaaaaattaagtaagttttaaattgggaagatgaaaaagttttagaaattgatggtagtgatggttgtagaaaaatgttaatatagttaatattattgatttgtatattaaaaataaataataataataataataataataaatttattgttttgggttttaagaattatatatttttaagtgttgaattttgttagtatattttattaaaaaaaagtaaatatatatttataatgagatatgataaggttgtaatagaagtataatgttatggtaatatttaagaagtattgattgtatttgttgaatgaagttttagagattaggtatgatttgaattttgaatagaagtgtattaggaagttaaagagaagtagaatatatataagaatttttaaagaaattttaattcgtttggtatgtttgtagtataaaatagatgttaggaagttgagattaagttggagaggtaggtaggattagttttatagagtattttgaataaatagataaaaattgaattgatggtttagaggtaataaatattttgatgtattttggtttatataatattttgtaaaattttagtaaggtaataagggttatttaagtggagtagtgagatgtaaaagttagagtgtagtattttgaaggataaaaggtaggtgaagaatagtaattaagtggaatttattgttttttgaataaatttgatttgtgaaagggtgatatagaatataagatagaatgttttgtttaatgggtgtttaatgtttagtggggtttagaaaagtgtttttttgtgtgtatgtttaagaatttaaaaaaaatttaattatttgaatattaaggggagaaaatttaatttttttatgtttagtaattggtatagtgtttggaatatattaggtatttaaagatttgttagaaaaaaaatattatgaagggattaataataagaggagttgaagatggcgagggggtattgataggaaaagaattatgagtaaataataaattttatatgagaaagatatatacgatatgtatttatttaagatgtaaaatgataaacgataaaagtaagagtattaggtatggggaggtttttttgtattgtatatttttgtttatttgaaatttttagtaagaatagaattattttaatttttagattaaaaggtatagtgtgaaagttttagggagatttgtaataatagtaaataaaatgaattgcgaggataattgtttgggaagttatgatagaagtttaaaagagaagtaatggtaggtatattgcgggattggtggtagtgaaaatggaatgtgaatgataaagatttttaagataagaaaattatggttggcgttttttgtttattaaatgaaaagtaggaagttagtagagtagttggtttgtggagaaagaatatttatatatcgatgtgaattattttaattagaaaatgatattgtttttttagggtttttttaattaggggtgattttgttttttaggggatatattagtaatatttagagatatttttattgattataattgggtaagggtagggtggggaacgggtgttttattgtaatttagtgaatagaagttaggaatgttgttaaatattttataatgtttgagtataggatagttttttataataaagaattatgaggtttaaaatgttaatagtattgaggttgagaaattatgtttaagattatagttatcgaaatttaattagattattaaattgttaaaatttagaatttttaagtaaaagattaattagatattaataaaatattaaatttgttattaagtttttttaaaaatggatggtggaattattttcgtttaacgttttttgtaaaatgtgtttattaagagttttgcgtaaataatatttttgtggatagcgttgggtatttaaaagaggtataagataaatgggtttttcgaataataaaataatagtagtaatggttgtgaatattatgggaggttttattatagatgtttgttatttatttttagggacgtcgtatacgacgttcgtaaattattggttcgggttttgagttttatttggttttcgttttttgtagtataattttttttatttttttaggggataaataataataaaattcgttttttatatagataatatattttgatagataagtgatttataaataatttttttttaaatgaaggtaaaattagggttagaaaacgtttaattaatttaaggtaattaattttttgaaatttttcgttgattaaaggaataggaattgttgttttaaaatatgtaattggtattttatatttttatattggacgacgtattgcgtggaggatggagaaggaagattatttttatttttaaattcgtagttataagggcgggttattagaagggcgttaggaaggtttttttataaagatggggggtcggggaattttttatttgttttattttggttttaatattgaattaaggaaattgcgtttaaggttgaagtatacgtaattcgttcgttatgtagataaatgtttttttaggggttttaattaagtgtggaggtttgatttttttttcgaattcgttttaggtgttttatttcgagttttttttcgggttttttttcgttacgtagtttttgaagagaggagtatttatatataaagaggtttaaattgtttagaattttcgaatgacgaagaattatcgttagttttaattcgtaagttgggaggtaaaattttaaagtttttttattaagggaaaatttttggttttaaaggtttttttgtttagtatagtcgggtttaataattttttttttcgcgttcgcgtttatttaatataagtcgggttacgttcgagggtaataatatgattaaaattatagtaggaattataataaggaataagatttaggttaaagtaaatatagcgatagtttttgcgtcgtattttttggttttagtggcggtattgaattcgcggtaatttgtttcgtttttttcgttttacggtagttaatcgttttcgttagagaaagaaaggcgtcgaaatgaaattcgttttcgttcgttttcggaattgtcgttattttcgtttttagatttggaggggcggggatgaggagggcggggaggacgacgagggcgaagagggtgggtgagagtttcggagttcgagtcgaagggcgagtcgtaaacgttaagtcgttggttattggtggatatggcgtaggcgcgtttgtttcgacgggtcgaatgttttggggtagtgttttgagcgcggagatcgcgtgatattggatgcgtatgggtatatcgtgttttgcggttgtttggcgttgtttttttttttagaagtgggcgttgggtagttacgtagggtttgaatcggaagcgggagtaggtagttgcgtggttaacggagaaaagaagtcgtggttacgggaggaggcgagaggagtcgggatttgcgttgtagttatcgtcgcggttgatattattttgatttttcgagtgtagtggtaggggcgcggaggtaacgtagcggtttttgcgttgggaaatttagtcgtgtgcgatttagtttgttttttttttagatcgttaattttatgtatttttttagagtggtttttgatttttttttttttttattttattttttttggttttttttcgggtgtttagcggatttggttaataattttttttttttaaacgttttgaattgaattttgttttttgcgtattttttttttgtgttattttagggtttagatttaattacgcgatttgattagttattttttgatttttttttcgtatttagtatttttagttagcgagtatttattgatattttaattttagtttcgcggttaagagtttgggttttggaattatacggttggaattggaattttgttagtcgtgtggtcgttttttattgttttgtgaagataagtgagataattttgatttgtggtgagtattcgtgagcgttagttgttgtatttattaggtatagataagataattatagtggatgataatgtatgtggtgataggggagtattttgatggtagaggagtgattttggttttttgtaaatttagtttgagattattaatttagtttgtggtgagatttcgtagtgttattttggtagatggtagaagttttttagatggaaggaaaaatgcgtgtaaaggtataaagtgtagaaggattttgaagttttagcgtgaggtttggtattgaatgaaatatattttgtgggtttttagttgttgaagttataggaatggatgagattaagaaaataaagttgtttttgaggtatgagcggaagaagagatattaggagattttcgaaatagttataacggaagttaatatgattattgttaatatttgttgtgttttaggtattgtaagtatgtatatgggtttttaaagggatttatagaggtaggtattagtattgtttttttttttattattgagaaattgaggtttgaagagattagtgaatttgttttagattatatagtttgtaagtggttgaattaggatttgaattaatataatttgattatagaggttatattttttagtattagaaaagaatggtatgttaagggtagagttatttttaggaagatgggatataagcgttattgttaagttgtgtaaaggggttaatttggttgagatttaaaaaggaatattgaattcgttaatttagaggttcgtaggaagtaggaaatttttattttttcgtttgaattttgagtggaatttagatattttggattaatgtataagtgaagtttatttttatatggtgatatttatattttagttgattatttaatagtttttttgtttttttttagtttcgttaatatattgtgttttttaatattgtagaattttttggttatgttagtttttttttttgaagtgttggttttttagttttttttttgattggtattagttagtttagattttggttttattataaatttttttgagatatatgttttttgatagtttatttaaaatgattttttttatagttattttttattattgtgtttttgtttttttaga

SEQ ID NO: 166 - DNA, 6669 bp, Artificial Sequence
  chemically treated genomic DNA (Homo sapiens)
tttgaggaaataaaaatatagtaatagaaaataattgtagagagaattattttagataaattgttagggaatatatattttagaggagtttataataaagttaagatttgaattaattggtgttaattaaaaaaagggttagaggattaatattttagggaaggagattagtatagttaaagggttttataatgttaaagaatatagtatgttggcggaattgaaagaaggtagaggaattattaggtagttaattagagtatgagtgttattatataaagatgaattttatttatatattaatttagaatatttaggttttatttaaggtttaaacgaaaagataaggattttttattttttacgagtttttgaattgacgaatttagtgtttttttttagattttaattaagttgatttttttgtataatttgataatgacgtttatattttatttttttagaaataattttgtttttggtatgttatttttttttagtgttaaggagtgtggtttttgtagttagattgtattagtttaaattttggtttagttatttataaattgtataatttagagtaagtttattaatttttttaaattttagttttttaatgataaaaggaaaaataatattagtatttatttttatgagtttttttaaggatttatatatatgtttatagtgtttgaaatatagtaaatgttagtaatgattatattaattttcgttatgattgtttcgaaagttttttgatattttttttttcgtttatattttaaaaatagttttgtttttttggttttatttatttttatgattttagtagttgaaaatttataaaatatattttatttaatgttaggttttacgttggagttttagggtttttttatattttgtgtttttatacgtatttttttttttatttggaaggtttttattatttgttaaggtaatattgcgaggttttattataaattgaattgatagttttaggttgagtttgtagagaattaaagttatttttttattattagagtatttttttattattatatatattattatttattgtagttgttttatttgtatttggtaaatatagtagttaacgtttacgagtgtttattataggttaagattattttatttatttttataagatagtagagagcggttatacgattgatagaattttaattttagtcgtatgattttagagtttaagtttttaatcgcgaggttgaagttgaaatattaataaatgttcgttgattaaaagtattaaatacgagagagagattaaaagatgattagttaagtcgcgtagttaaatttgaattttaaggtgatataaaaagaggatgcgtaggaggtagggtttaatttagggcgtttaaaaggaggaggttattggttaagttcgttaagtattcggagagaggttaggaaagatggagtgaggagagggaggagttaagggttattttggaggggtgtatgagattggcggtttggggagaggatagattgggtcgtatacgattgaattttttagcgtagaagtcgttgcgttgttttcgcgtttttattattgtattcggaaggttaaagtagtattaatcgcggcggtggttgtagcgtagatttcgatttttttcgttttttttcgtggttacggtttttttttttcgttagttacgtagttatttattttcgttttcggtttaaattttgcgtgattgtttagcgtttatttttggaggaagaagtaacgttaagtagtcgtagagtacggtatgtttatgcgtatttagtattacgcggttttcgcgtttaaaatattgttttaaaatattcggttcgtcggagtaaacgcgtttgcgttatgtttattaatggttagcgatttagcgtttgcggttcgtttttcggttcgggtttcggggtttttatttatttttttcgttttcgtcgtttttttcgttttttttattttcgtttttttaagtttgaggacggaagtgacgatagtttcgaaggcgaacggaggcgggttttatttcggcgtttttttttttttggcggaagcgattggttgtcgtgaagcgaaagaggcgggataaattgtcgcgagtttagtgtcgttattggaattaggagatgcggcgtaggagttgtcgttgtgtttgttttaatttgagttttgttttttattgtggtttttgttgtggttttgattatgttgttattttcggacgtagttcggtttgtattgggtaagcgcggacgcgggaaggagggttattggattcggttatgttggatagaaggatttttgaggttaaaggtttttttttggtagggaagttttggggttttgttttttagtttacgagttgagattggcggtgatttttcgttattcggaggttttgggtagtttaagtttttttgtatgtagatgtttttttttttagaggttgcgtggcgaggggaagttcgaggggaagttcggggtggaatatttggggcggattcggaaggaaagttaggtttttatatttaattaggatttttgaaagagtatttgtttgtatgacggacggattgcgtgtgttttaattttgggcgtaatttttttggtttagtgttgggattaaaatagggtaaatagggagtttttcggttttttatttttgtagagagatttttttggcgtttttttaataattcgtttttataattacgaatttgggagtaggggtgattttttttttttattttttacgtaatacgtcgtttagtgtagaggtgtgaaatgttagttgtatattttaaaatagtaatttttgtttttttgattagcgaaaaattttagagggttaattgttttaaattagttgaacgttttttagttttagttttatttttatttgaggagggattgtttgtgggttatttgtttgttagggtgtattgtttgtgtgagagacgggttttgttgttgtttgttttttgaaagaataaagaggattgtattataggggacgagagttaggtaaagtttaaaattcgagttagtaatttacggacgtcgtatgcgacgtttttaaaagtaaatggtaagtatttgtgatgaaattttttatagtatttatagttattattattattattttattgttcggaaaatttatttgttttgtgttttttttaaatgtttagcgttgtttataaaaatgttatttgcgtagggtttttgataagtatattttgtaggaaacgttaaacggaaatggttttattatttatttttgaagaaatttaatgataagtttaatgttttgttaatgtttgattaattttttgtttaagaattttgagttttggtagtttggtaatttagttgagtttcggtaattatagttttaaatatggttttttagttttagtattgttaatattttgggttttataattttttattgtggggagttattttgtgtttaaatattgtaggatgtttagtagtatttttggtttttatttattagattatagtaggatattcgttttttattttatttttatttagttgtgattagtgaaaatgtttttagatattgttagtatgttttttggagggtagaattatttttagttaagaaagttttaagaaagtagtattattttttaattgaaataatttatatcgatgtgtgagtattttttttttataaattagttattttgttgattttttgttttttatttaatggataaaaaacgttagttatggtttttttattttaaaaatttttgttatttatattttatttttattgttattaatttcgtaatgtgtttgttattattttttttttggatttttgttatggttttttagatagttgttttcgtaatttattttatttattgttgttataaatttttttgaagtttttatattatattttttagtttgaaagttgagataattttatttttattaaaaattttagatgggtaggagtatataatataaaaaagtttttttatgtttaatgtttttatttttgtcgtttattattttatattttaaatagatatatatcgtgtatattttttttatatgaggtttattatttatttatgattttttttttattagtattttttcgttatttttagttttttttgttattggtttttttataatgttttttttttagtaaatttttgggtgtttagtatgttttaaatattgtgttaattgttgaatatagagaagttaagttttttttttttagtgtttagataattaggttttttttaaatttttaaatatatatataaaaaaatatttttttggattttattagatattagatatttattaaatagaatattttgttttatgttttgtgttatttttttataagttaaatttatttaaagaataatgaattttatttagttgttgttttttatttattttttattttttaggatattgtattttgatttttgtattttattattttatttaagtagtttttattgttttgttgggattttataaaatgttgtgtgggttagaatatattaaagtgtttgttgtttttgggttattagtttagtttttatttatttatttaaggtgttttgtggaattgattttatttatttttttaatttgattttaattttttaatatttgttttatgttgtagatatgttaaacgaattgaagtttttttgaaaatttttgtatgtattttatttttttttggttttttagtatatttttatttaaggtttaggttatgtttgatttttgaaattttatttagtaagtatagttagtattttttaaatgttgttatagtattgtatttttgttataattttattatgttttattgtagatgtgtgtttatttttttttgataaaatatattaataaaatttaatatttaaaaatgtatagtttttaaagtttaaaataatgagtttgttgttgttgttgttgttgttgtttgtttttaatgtatagattagtagtgttaattatattgatatttttttgtaattattattattattagtttttggaatttttttatttttttaatttgaaatttatttggttttttgttttattagtagttttagttatggatgaatggataagttttaagagttttgggagtttttaaaattattatttgtgaaggtttttttgaatagatttgttattttttgtatgagatagtatgtagtaaaaaaagtagaaattattttgagtatttaatatggaaagatttaatgagagaattcgtttatattggtgagagaaaagttaagacgtttagtagtttataattaaggtattttagtggttagtaatagtaggaagttattatgttaatgagaaggataaggagagaggaagtaattaagaggttggtttgattgcggaacgtggaagatttgtttgatgagggagtggtagttttagaggagattttattgaggtagaaagggaatgggggaaaaatatggttgtttttttttgttttttagttttttattagtgttttttatttattgagtttagttagtagtaggtcgatagaagagtttggggaatattgtttatatagagttaagttttatgttatatagtagagagcgatagaagggttaagaacgtgtttgaggttaaataggattaaaattgatatatttttaataggttaagagttgttggttttatttatttttatattattaaaatatagatatttaataaaatatttgtaaaagtatggttttgattatgatatttttttgtttatttaataatatatgtatttattgttgtttaaaattttttatgatttttatttattttgttttttttgttgtatttttaattgttattttttataaattttgtgttgtatttaaattggatatgttttttaaatatgattgtatatatattttttgttagtttttttgggatttttaattattttttagtatttatttgtatttttaaatattatataatttttaagtttagtagtggtttttttagtttttttttttttatgaagtgagttagttttatttttttattatttttgttttgtattatagttatttgtgtatatattttttatttttaagtaaattgtaattttatagatagaaattttgtttttgttatttgtggatttagtaatataagataatataaggtacggttttttaagaattatttgtatgtttaaagaatattaaattattaatttttttaggaaataataaaatatgtgaaggagatgtttttatatagcgtgttttattattttttgtttgttttaaatttttttttttatttttttttttttataagtaggaagaaaaaatattttttatatagttaggattttatttttttttttttttttcggttgttttttttttaatttatttagttatttattattatttttatttataataaaagtaggttgaagataatattatgttaagaaggaaatttaggtatatttttttatttatttagggatttttgttagtaagtttatataaaaaaatatattttttttatttttaagttgtttt

SEQ ID NO: 167 - DNA, 6208 bp, Artificial Sequence
  chemically treated genomic DNA (Homo sapiens)
ttataaaattattttttttttttgggtttttaggtttgttatgagagaggttgttatgaaggttttcgatattgtttggagatatttttttttatggtttttaggattaatattaggttttttgttatttttgaaaatttttgtagttagtttgaattttttttaaaaaaatgggttttttttttttattgtattgttaggttgtaaattttttgaatttttatgttttgtttcgtttttaaaatggaatgtttttaagagtatttaagttattttttgaattttttgttgtttagaaattttttatattagatattttaaattattttttttaagtttaaagttttataaatttttagggtaggggtaaaatgtttttagtatttttgttaaaatataagaggagttatttttttttagtttttaataagttttttatttttatttgagattattttagtttggatttcgttgtttatattattattcgtattttgtttaaagttatttaataagtttttaggatgttttaaatttttttatatttttttggttttttttgagttttttaaattgttttagtttttgtttgttgtttagttttaaagtcgtttttatatttttgggtatttttttagtagtattttattttattggtattaatttatggtattaagtttatttttacgttgttgataaagatatattcgaaattgggaataaaaataggtttaattggatttatagttttatatggttatgaggttttagaattatggcgggaggtataaggtattttttatatggtggtagtaagagaaaaattagaaagaagtaaaagtagaaatttttgataaattttattagatttcgtgaatttatttattattacgagaatagtatgggaaagattggtttttatgatttaattatttttttttggattttttttataatatgtgggtattttgggagataaaatttaatttgaggtttgggtggggttacggttaaattatattatatagtttttattgtttatatgaaaatatataaatttattagaaaagtaaattttgttttttttagatatagggttttattttgttatttaggttgaagtgtagtggtgtaattatagtaattattgtagttttaaattttttggtttaagcgatttttttgttttagatttttgagaagttggaattataggtgtatgttattatatttagttaattaaaaaaatgttttttgtagaaatagggttttgttatgttgtttaggttggttttaaatttttggttttaagtaatttttttgttttggttttttaaagtattgagattataggtatgagttgttgtatttggttagaagtaaatattttattgatatttagttttgatataaagtttttatgtgggattttttattgtgaataaatttttatttgtttttattgtgaataaattttatgtgggattttttattgtgtatttgaagaggtatttgattttatttgaaattttatatgagtattttattttaaagttgaaataattggtttaaaataatttggtttttatattttttatatatttttatatttttaaaaattttattgaggatataatagagtttttgtttatattagagttttttatttttgatattattgatattttggattaaataattatttgttgcggaggttgttttatgtattatatttagtagtatttttggttttgatttatttagatgttagtagtatttttttaattaaaattattagttgggtatggtggtttatgtttgtaattttaatattttgggaggttgaggtgggaggattgtttgagtttaggagtttaaggttgtagtaagttatgattatgttattgtattttagtttgggtaatagagtaagatttttatttttaaaaaaaaaattaaaaaaaaaaagttttttagatattgttaaatgttaaatgttttgcgaagggtaaaaattatttttggttgagaattagtggtttatattgtttatatttattaatatttagtatattagaaatgaaaattaaagaattttaaattttttatgaatttatttgaaaataaaaatttttttataatatattaatatatttttattaaaaaattattttttttaaattaaaaaaagaaatttagtaagaagggtgttaatgatttatattttttgtaaatttttttaatgtttggtttaacgtgaaattagatagtggttttttttttttgtttttgtatttaatttagtgatatgttgtttttgttgaagtatatgaagaaaatttaggttaatttagatatgtagtaggaaaagggagtatattttaatatatattgattttatgtttaaaatatatttaattttttagttagttatagatatttttttttgatgttagattatatttgataagttatgtagttttttaatgttagttgtaatatagattttgaaattttattaatgatttttttatattgttaattaaaatttattattatttagttttattcgttattatttttgtatttattaatatagtaaaataggtaaatattatattaatgttattataaaaatagatttgttgaggatttattgaagggttttgggatttgtatggtttatggagtataatttgagaattattgttttaaaggatgaatagagtttgataaaagtggtaagatttattatttatttaatatttggaatatatgaatttataaaagtaatattatagaggatagtttgtttttttaggatatttttttaaaagtttatttaaaatgtagttgatttatataatgtaaaggtttttttggtaatttttttaaataatttaggtgggaaaatttatgtgataagttttttaaattgaattattaaatatttaatttaaaagttgtataataattaaagttaaatttgttttttaagtttggttagtgagtttatttaaatattataatgtaaagtattgaggaatattacgtatgatagggaagaattaaaaggttttgataatagatttttttatttaaaatgtttaaagtaatgattatagaatttgaagtagagtggataaaaacgaagaagaaatgtttgaatttttgaaagaattaggtatatattgttatttaggaagttatggtgttaattataaatttttagtttgaataaaaatatgtaggtggtaaaaaaattaggtaggtagaatatattaggttttttgttttattagtggagggtaaggtatttaaaatatagtagtattataataataaaggtggaaaaaagtttgggagtttttttattaaaatgttaatagtggttattttcggatggtagtatttttggggttttttttttttatttatttattttttaatttttttagaagaaatagtatatatacgtaatataaataaaataatattttatgtaattttttatattataaaaattaaagtaatagattattaaaaagtagaggatttaatataagttttatatttaagtgacgtgttaataatggtagttttggtgagtttaagagtagaaattaagatgagaaggaagattcggttttttttttatcgaaaagagatatgatagattggaaaatgtttcgtggtttaatcgtaaagaaaaataaggaatgaatatgaataatttatgatagattaattggagtgtgaaagggaaaaaaaaagttgaagtagggaagggaattcgatttttcggttaatagtgaagtagaagaaaacgcggtaaattgagtttttaagatttagtttattttagtttatatagaagatttttaagaaaaagaaagattgtttattggtttgagaaattattttagatttatgataaggaaggttatttgttcgtaaaatttagttatattggacgggtaagtatttttatagaagagaaaacgtttgtgagtttatacgatcggttgtttattttaataatttgtataggtattagtttttttcgtcggtcgttatttttcgtcgattttcgaatttaggaaacgttttattttttttttttttattggtttttgagaaagtaagtcgtgttcgtttcgtttttacgggttaattgtgcgttattattggttattggtagtcgttttttacggttttttagttaatagaatatgtcgaggcgtagattagtgttcggcgtggcgtatacggttttcgttttcgtgggcgggatagtagtggggggttgggttgaggagggcgtggtttgtgattgatagtcgtcgttttttttttcggttattttttttattagaagttttcgtttgggcgtttgcgttttcgttttcggtttaaagttcgtcgttcgttggaggttattggttggtttttgcgtatagcggatcgattttttaggtgcggagtttatttttgtcgcggttgttttttttgggatttacggcgttcggtagttaggcgtagagttcgaggagggggtagcgtagagcggattcgacgcggcgtcgtcgggtatttttttcgtaggcggtgggtgagttttgggagttgagtttgcggttcggttttgcgtagtttatttgttttttcgttttcgtatacgcgtgagattttagtatagtgtcggagcgtattagcgcgaggtggtcgagatcgcggaggaggataggttttcgttttgcggcgtcggtacggtagaggatattgtggtattggtacggtagagaatattgtggtatcggcggggtcggtagttttagggtgggtatttttagttttttggggagtgggcgagggtttaaggttattttttttttacgtttttattttcgtgtttttaggtcgggaggacggcggcgcgtaattttgaattattcgtgtgaagagggttgcggttttttcggttttaaatgaaggggcggttttcggatttttgtttgttttagagtcgagtcgcgtcgatgtttttatattttgcgttttttttttcgggattttaatatttcgtttttttttatcgattaggtgattttttgttttgagttagattagagaagaattcggtgttcgtgcgggacgatgtttgagtaggagagatagattatagttagagaaggggttagtcggaaagtgagttttgttttttcgcgttcgcgtagcgtgtttatttttattaggaggattttttttttcgcgttcggcgtttattcgtttttagggggtgcgtagggaaggtcgagttagattttagttttagggatgttttggcgtgggagaaaaggattttttagaaaaagtgtgtcgttaattgatgtttgggagtaatggaaaatttcgtattttaaaatttatttttatgtttttaaggggtttgatgttggagagataaagtgagcgtcgagttgttgtgttagagttttaatggtttaaaacgatgaagttagttatttggagaagttatttagagtttggtgtttggattagatatggtatatcgaggttttggaatttttataattgttttaaatttattttaattgtataagtaatatattaagatagttttttaaaaatggaaatagtatagaaatattttgtataaaaagtagatttattttttagtttttttttatttacgtatatatgtttttattcggtaaatatttattgagaattttttatgttttaggtatatagtgttgagttgatatagtggttaataagatatgtatttatatgtaatatgtatatatttagagaaatttttaggttttatttgtatgaggtgttaaaatttttgttttatttaaatgagattattgtatgtgtattttttttttttagtttaacgatatattttagagattgttttattaattgtttaatttagtgtaatttttgtatagtttggacgtattatagtttatttatggttttttagtggtggacgttttgtttgttatttttttttttttttttttgtaagtgaatatttttgtatatgatttttaatgttgatattatttttttaggatagatatttaggtttggattgttggatagaatagtaggttgttttttttttatagatttttgaaattaatttattgacgttgttgggtgtttttta

SEQ ID NO: 168 - DNA, 6208 bp, Artificial Sequence
  chemically treated genomic DNA (Homo sapiens)
taaagggtatttagtaacgttagtgaattagttttagaaatttgtggaaaagaaatagtttattgttttgtttagtaatttaggtttaagtatttattttaaagaaatagtgttagtattaaaaattatgtataaagatgtttatttgtaagagagagagaaaaaaagtagtaaatagaacgtttattattaggaaattatgaataaattatgatgcgtttaaattgtgtagaggttgtattgaattagatagttagtgaaataatttttaagatatatcgttaaattgaaaaaagagaatgtatatatagtgattttatttaggtaaaataaaaattttaatattttatataaatgaaatttaaagatttttttgaatgtgtgtatattatatatagatatatgttttgttaattattgtattaatttaatattgtgtgtttgaaatatagaaagtttttaataaatatttgtcgaatgaagatatatgtacgtgaatagaaaaagattgaaaaatagatttgttttttgtgtaaaatatttttgtgttgtttttatttttaaaagattgttttaatgtattatttgtataattaaaatgaatttaaaatagttataaaagttttaggatttcgatatattatatttggtttaagtattaggttttgagtaatttttttaggtaattaattttatcgttttgagttattagggttttagtatagtaattcgacgtttattttatttttttagtattagattttttaaaagtataaagatgaattttgaggtgcggggttttttattgtttttaaatattagttgacggtatattttttttaaagggttttttttttttacgttaagatatttttggagttggggtttggttcggttttttttgcgtattttttgggggcgagtaagcgtcgaacgcggggaggaaaatttttttggtgggagtgagtacgttgcgcggacgcgggggaataaaatttatttttcgattggttttttttttggttgtgatttgttttttttgtttaggtatcgtttcgtacggatatcgaatttttttttgatttggtttagagtaaaaggttatttggtcggtggaggagagcggggtgttaaagtttcgggagaggaggcgtagagtgtgagggtatcggcgcggttcggttttaaagtaaataggggttcgggaatcgtttttttatttgggatcggggaagtcgtagttttttttatacggatgatttaaagttgcgcgtcgtcgttttttcgatttgggggtacggggatgagagcgtgaggggagagtggttttgggttttcgtttattttttagggggttgggagtgtttattttggaattgtcggtttcgtcggtgttatagtgttttttgtcgtgttagtgttataatgttttttgtcgtgtcggcgtcgtagggcggaggtttgttttttttcgcggtttcggttatttcgcgttggtgcgtttcgatattgtattgggattttacgcgtgtgcgggagcgggagggtaggtgagttgcgtagagtcgggtcgtagatttagtttttagggtttatttatcgtttgcggggaaggtgttcggcggcgtcgcgtcgggttcgttttgcgttgtttttttttcggattttgcgtttggttgtcggacgtcgtgggttttaaaggaagtaatcgcggtaagagtgaatttcgtatttggaaaatcgattcgttgtgcgtaaaggttagttaatggtttttaacgggcggcgggttttgggtcgggaacgggggcgtaggcgtttaggcgggggtttttagtgggggaggtggtcgagggagggagcgacggttgttaattataggttacgttttttttagtttaattttttattgttgtttcgtttacgggggcgggagtcgtgtgcgttacgtcgaatattagtttacgtttcggtatattttattggttggaaggtcgtgggaagcggttattagtaattaatagtaacgtataattggttcgtgggggcggggcgagtacggtttgtttttttaggagttaatagggaaaaggaaagtgaagcgttttttgagttcgggggtcggcggaagatggcggtcggcgaaaggagttggtgtttgtgtaagttgttgaggtgagtagtcggtcgtgtgggtttatagacgtttttttttttgtaggggtatttgttcgtttagtgtagttaaattttgcgggtaaatggttttttttgttatgaatttaaggtaattttttaggttaatgagtagttttttttttttttgggggttttttatatagattggaatagattaggttttaaagatttaatttatcgcgtttttttttgttttattgttggtcgaggggtcgagtttttttttttgttttagtttttttttttttttttatattttagttagtttgttataaattatttatatttattttttatttttttttacgattgagttacgagatattttttaatttattatgttttttttcggtaaagaagaaatcggatttttttttttattttagtttttatttttaaatttattaaaattgttattgttaatacgttatttaaatataaagtttatgttgaattttttgttttttgataatttgttattttaatttttatgatgtaagaagttatataaaatattattttatttgtattacgtgtatatgttgttttttttagaaaaattagaaaatagataagtaaaaggaaaaaattttaggaatgttattattcggagatagttattgttaatattttggtgaaaaaatttttaggtttttttttatttttgttgttgtagtattattgtattttaaatgttttgttttttattaataaaatagaaggtttagtatattttatttatttagtttttttattatttatatatttttgtttaggttgaaaatttataattaatattatagttttttgaatagtagtatatatttaatttttttaaaagtttaggtatttttttttcgtttttgtttattttattttaaattttgtaattattattttaaatattttgaatgagaaagtttgttattagagttttttggtttttttttgttatacgtaatattttttagtgttttatattataatgtttaaataaatttattaattagatttaaaggataggtttaattttagttattatgtagtttttaagttaaatgtttaatagtttagtttgaaaagtttgttatatgaatttttttatttaaattatttgaaggaattgttagaaaaatttttatattatatgggttagttgtattttaaataagtttttgaaagagtgttttgagaaagtaaattgttttttgtagtgttgtttttatgaatttatatattttaaatgttaaataaatgataaattttattatttttgttagattttgtttattttttaaggtagtggtttttaaattgtgttttatggattatgtaggttttaaggttttttaatggatttttaataaatttgtttttataataatattaatgtaatatttgtttattttattatgttgataagtgtaaaagtgatagcggataaaattaagtgatagtggattttaattaatagtgtgaaaaggttattgatagggttttagagtttgtattgtaattgatattaagaaattgtataatttgttaaatgtggtttagtattagagaagaatatttgtaattagttgaaaagttaaatatattttaaatataagattaatatatattaaaatatattttttttttttattatatgtttaagttagtttgaattttttttatatattttaataaaaataatatattattagattgaatgtagaaatagaaaggaggagttattatttggttttacgttaagttagatattaaaaagatttgtaaaaagtgtaaattattggtattttttttgttaaatttttttttttggtttggaaaagatagttttttaataaaaatatgttaatgtgttatgaaagaatttttatttttaaatgaatttataaaaagtttaaagttttttagtttttatttttaatatgttaaatattggtagatataagtagtgtaaattattggtttttaattaggggtgatttttgtttttcgtaagatatttggtatttggtaatatttggagggttttttttttttaattttttttttagagataagagttttgttttgttgtttaggttggagtgtagtggtatgattatagtttattatagttttgaatttttgggtttaagtaatttttttattttagttttttaaaatgttgggattataggtatgagttattatgtttaattgataattttgattgggagggtgttattggtatttaagtgggttaagattaaagatgttattaaatataatatataggataattttcgtaataaataattatttggtttaaaatgttagtagtgttaaggatgagaaattttgatgtaaataaaagttttattgtatttttagtaaaatttttaagagtataaaggtgtataaagaatataaagattaaattattttagattaattattttagttttgaaataaagtgtttatgtgggattttaaatagagttaaatatttttttaagtatatagtaggaaattttatatgagatttgtttataataggaataaatgaggatttgtttataataggaaattttatatgagaattttatgttaaaattaaatattaataaaatatttatttttggttaggtgtagtagtttatgtttgtaattttaatgttttggaaggttaaggtaggaggattatttgaggttaagagtttgagattagtttgggtaatatagtaaaattttatttttataaaaaatatttttttaattagttgggtgtggtggtatgtatttgtagttttagttttttaggagtttgaggtaggaggatcgtttgagttaaggagtttggggttgtagtgattgttatgattgtattattgtattttagtttgggtgatagagtgagattttgtatttaaaaaaagtaaaatttatttttttgatgaatttgtatgtttttatgtgggtagtgaaaattatgtgatatggtttggtcgtgattttatttaaattttaagttgaattttattttttagaatgtttatatgttgtgggagggatttagggggaggtaattgaattatgggggttaattttttttatgttattttcgtgatagtgagtaagtttacgagatttgatggggtttattaggggtttttgtttttgtttttttttgattttttttttgttgttattatgtaagaagtgttttatgtttttcgttatgattttgaggttttatagttatgtggaattgtaaatttaattaaatttatttttgtttttagtttcgagtatgtttttattagtagcgtgaaaatgaatttggtattataaattagtattagtagagtggggtgttgttgaagagatatttaaaaatgtggaagcgattttggaattgggtaataggtagaggttggaatagtttggagggtttagaagaagttaggaaaatgtgggaaagtttggaatattttagagatttgttgaatggttttgaataaaatgcggatagtgatatggataacgaaatttaggttgaggtggttttagatggagatgaagaatttgttgggaattggagaaaggtgattttttttatgttttagtaaaggtattagaggtattttgtttttgttttagagatttgtggaattttgaatttgaaagagatgatttagggtatttggtgtaagaaatttttaagtagtaaagaatttaagaagtgatttgggtgtttttaaaagtattttattttaaaagcggaatagagtataaaagtttagaaaatttgtagtttgataatgtagtagaaaagaaagatttatttttttaggagaaatttaagttggttgtagaaatttttaaaagtagtaaggagtttaatgttaattttgaagattatgggggaaaatgtttttaggtaatgtcggagatttttatggtagttttttttatggtaggtttggaggtttaggaggaaaaagtggttttgtgg

SEQ ID NO: 169 - DNA, 5312 bp, Artificial Sequence
  chemically treated genomic DNA (Homo sapiens)
cgttttgttttttgagttgatataaaggtgaatttttgtatttgtgggatttgtttgaggaggttattaggagttttgttaatagtttagaggtataattttatgtttttagattagggatttttaaatatttttttttatagtttgttaaggattattggaattttattgttggttggttgatagtgggatatttattggagtttttaatggtattttatttttatttagaatttttttagttgtgtttgttttaaatttttaggattaattttttttataggtaacgtagtattttattttttaggtgagattttaatatttataattagagaattgtttggttatatattgattaaaagtataaggataattttgggataataaaatgtatcgatgttttaaatagtgtagaatgaggatcggtgatgtttgcgggaaagttagatggttaattagattttatttgagtagtatttaatttttgttttttagtaggtatttgataaataaatatttgttatatgtattatatatatatggagttatttatttgtatttattggtattttttttaaattttttttataggattttttttattgttgtgaatgttgtttgttgaaagagatgtgtgtataaaatgttgtttttttattttaaagtggaattaattttatggtataatttatgttttagggttttttataggattaggttgaagtttaattttagataagattagattatatttttttttaatttttttttgggttttattttgttttttttattgtgtttttttcgagagtaattttttaatgaattatgtatttagattttgttttagggttttgtttttagggaatttgattaaagatattgtatgagtaaaagttaaaaattataaaatttatttatgtttatgatttggagataatgtaagtaaagaaataggaagagatgatatgaaattagagaaagggttaaggtgagtaagatgttttatttaagtgaaaaagaataggtataggtatttttaaattattttgtattaatttagtggagataaatttttttggttatgtagttggtaagaataatgttattttagtgtttggatttagagtaatttgtattaaagtttgggtattttttgttattggtattatagtttttgggatttggaaatgattattatgataaagattagtggaaaaaaagggattttaggtagaattgttgtagaattttgttgataaggtattggggtataatagaggtatttttgaagttacggtgattacggtgattttttttatgagaagtaattggataatgatattagtgtattatatatagatgattagttgtagattatatatttatatataattatattgtcgtttttaatttttaattaagtttatattataagatttatttttgtttttggaggaattagggtatagagtattttggtaatttattattgtgtaacgaattgtttttagttggtttatttatttgtttatgtatttgtagtttggggcgggtttagtaggaataatatttttttgttttatgattggggttttaattgggaagatttgaatggttgggggttggtttttttatagtatggtggttttagggtagttggatattttttatggtaagtgttttaagatattttaggaggaagttgtaagattttttatgatttagtataaagttttatttttgggattttagaaattttagtatattatttttattatagtttattagttaagtaaattattaaggttaggttagatttagagtggggtgggggtgggggtgggggtggggtcggggttaagggttagatttgatttttttatagaaggaatgtaagagaatttgtagttatttttaatttattatatagatatagaatgtgtaggggattttttgataaacgtagtaaaggaaaaagaagatagtaggtaagattttgtttttttgtttatttgtttttagagatagggttttgatttgttgtttaggttggagtgtagtggtttaaatatagtttattgtagttttaaatttttgggttttgtgatttttttgttttagttttttaagtagttgggattatatatgtacgttattatatttgattaattttttaaaaaattttttgtagagataaggttttattatgttgtttaggttggttttaaatttttggttttaggtgatttttttattttggttttttaaagtattgggattataggtatgagttattgtatttagcgtgtttgttttttaaggataaaataatttgagtatgtttgaaagttaaggaaaaagaattagagaagagagtagattaaggaagtaagaaagaatgtttgttgtagtaagattttaaggttttagagtagtaatatttagtttagggattgttgttttttagatgtatattttttttgttatttttgaatgttggtaaaattatgtgaaattttatagtgtgggtttagttttgttgtggggagggaagggaaggaaagggttggtttatttttggtttggaagattagggggagtaatgttttttatagttagggtatggtttatgttagtttttttatttgatggggttttgttagagggtagggttatgtttttaattttaaaattttatatggtaaaaatataatttgtaaattagaatgttagtgttagggtttaggtcgaataatagtttttttgtaggaatggggagtatgtgtggatgtagagttgggggtaaggtttttgtgtaatttagttttattaggtttgaagaagatgtagtgaggatagttaggatttgagtatgagagtgggatttgggtatgagtgtggaaatttattttagaattttaaaattttatattttgaggtaaagttgagaggttttataggtttatgagggtttttttttgttttttagggattgtaaggtgtttagattttgaggtaggtgttataggaatattttttatagtataagtattatgtcggataatgttttgtttatttattattgagtaataaatttttttaaaatttagaggtttaaaataatataaattataatttatgaaaaattataaataatttattatttaagggttaaatgataaatgagttattttttaggattttggataagttatagttaggaaagatttgttattgttgtaggtaatatggaatagtttagacggttggaataatttaatttagatagtttttttatttaatgattgattttttagttaggatggttttattagttgagcggtttagttttttttttttaagtttaagtggtttttgtatatggtttttttttagtaaggtggttaacggggtgtagtttatgattattaatagtttaaaattaaggttgttaggtttttttttttttttgagatagagtttcgttttgttttttaggttggagtgtagtggcgcgattacgattttttgtaatttttgttttttggatttaagcgatttttttgagtagttgggattataggtgtgtgttattacgttcggttaatttttgtattttttgtagagatagggttttattacgtcgattagggtggtttcgaatttttgatttcgtgatttgttcgtttcggttttttaaggtgttgggattatagacgtgagttatcgtgttcggttaaggttgttaggttttttttaagtttagagttagaaataagatattgttatttttattaattttttttattggtgaaattgagttatggttttttatggttttaattatgatttagtttagattttagggttaaggattataaaaggttatattgatggaagatatgttttattgagggatattagagtaataattattagataagaaggggtaggtttgtgtgagcgttattttttaattttatattgtttattttttagagaagatggttggagggtaaattgtggggagtaaggtaattttaaatttttatagaattaaaggtagggggtttggttagttatagtttatttgttattaagaggtttggttgtgtgtttttatttagtttattaggtatttattgagtatagtttatatgttaggttttttattttttgatatagggttttgtgttgtttaggttggagtgtagtgttgcgattgcggtttattgtagttttgatttttttagatttaagcgatttttttgttttagtttttggagtagttggggatataggcgcgtattattatgttcggttaatttttgtatttttagtagagatagtgttttattttgttggttaggttggtttcggattttagagattaagtgattcgtttgttttagttttttaaagtgttgggattataggcgtaagttttcgcgttcggtttatgttaggttttatatgtgtttttttttgatttttgtgttatagaggttcgaatgaagtttggtttttatagtatcgtatttagtatttcgttgcgatgtagttttttgtatttttttcgttcggtagttggagttagggtagagtgtcgggtttttaggagggtaatatttaacgtagtcggtttttaggtatttagtggggttgtaatttcgtcgtcggggacgaaaggcgaagggggaaaattagagttttcgtcggtcgggatagcgtagtcgggttttagttcgttttacggtttacgttagaagatcgttttcggcgtcgcggacgtcggagattattgtttgcgttttcgtacgtacgtatttacgtattcgcgtacgcgcgcgtcggtttcgtttatcgtttcgttgtggtttttttggatcgtacgagttatcgttcgtatagtttcgtttcgtacggttaggcgaagcggagtcggtcgtgcggtgtgtgtgtatgtgttcgcggggcgtcgttttagtttcgggaagatggtggttgtagcggcggtaattgaggtaaggttgaggaggaggacggcggcgacggtagcgttcgcgggtaggagcggcgggtcgtattgggattgggacgtgattagggttgggaggtcggggttgggggtcgggttgcgtttttcgcggttgttgtttttatcgttgcggttacggttgttgttgttgttgttgttgttttcgtcgtcgttgttgttgttgttgttgttttgtgaggtcgaggtcgcggcggcggcggcggcggtgtcgggtttagtcgtagtcgaggttaaggaatgtgatcggttt

SEQ ID NO: 170 - DNA, 5312 bp, Artificial Sequence
  chemically treated genomic DNA (Homo sapiens)
gggtcggttatattttttggtttcggttgcggttgagttcgatatcgtcgtcgtcgtcgtcgcggtttcggttttatagggtagtagtagtagtagtagcggcggcgagagtaataatagtagtagtagtagtcgtggtcgtagcggtggagatagtagtcgcgggaggcgtagttcggtttttagtttcggttttttagttttggttacgttttagttttagtgcggttcgtcgtttttgttcgcgagcgttgtcgtcgtcgtcgtttttttttttagttttgttttagttgtcgtcgttgtagttattattttttcggggttgagacggcgtttcgcgaatatatatatatatatcgtacggtcggtttcgtttcgtttggtcgtgcggggcggggttgtgcggacggtggttcgtgcggtttaaaggggttatagcggggcggtgggcggggtcggcgcgcgcgtgcgcgagtacgtgggtgcgtgcgtgcgggggcgtagatagtggttttcggcgttcgcggcgtcggaggcgattttttgacgtggatcgtagaacgagttgaaattcggttgcgttgtttcggtcggcgaaagttttagtttttttttttcgtttttcgttttcggcggcggggttgtagttttattggatgtttaggagtcgattgcgttgagtgttgtttttttagagattcggtattttgttttaattttagttgtcggacggaaagggtataggaggttgtatcgtagcgaggtgttgggtgcggtattgtagaagttaggttttattcgagtttttgtaatataagagttaagaaagaatatatgtagaatttggtataggtcgggcgcggaggtttacgtttgtaattttagtattttgggaaattgaggtaggcggattatttgatttttgggattcgagattagtttggttaatagggtgagatattgtttttattaaaaatataaaaattagtcgagtatggtggtgcgcgtttgtatttttagttattttagaggttgaggtaggaggatcgtttgagtttggagaggttaaggttgtagtgagtcgtagtcgtagtattgtattttagtttgggtaatataagattttgtgttaaaaaatgaagaatttggtatgtaggttgtgtttagtaaatgtttaataaattgaatgaagatatatagttaggttttttgataatagatggattgtagttgattagattttttatttttaattttgtaaaagtttggagttattttgttttttataatttgttttttaattattttttttgaagagtgggtaatatagaattaggaaatggcgtttatatagatttgtttttttttgtttggtagttgttattttggtgttttttaatgagatatgttttttattaatgtagttttttatggtttttgattttggaatttgggttgggttatgattgagattatgagaaattatgatttaattttattaatagaagaagttggtaggagtagtaatgttttgtttttagttttgagtttaaaaaagatttggtagttttggtcgggtacggtggtttacgtttgtaattttagtattttgggaggtcgaggcgggtagattacgaggttagaagttcgagattattttgatcgacgtggtgaaattttgtttttataaaaaatataaaaattagtcgggcgtggtggtatatatttgtaattttagttatttaggagagtcgtttgaatttaggaggtagaggttgtagagagtcgtgatcgcgttattgtattttagtttgggggatagagcgagattttgttttaaaaaaaaaaaaagatttggtagttttgattttgagttgttggtggttatgagttgtatttcgttagttattttgttggagagaaattatgtgtagagattatttggatttggagagggagagttgggtcgtttagttggtggagttattttagttaagggattagttattgagtgaagaagttatttgggttgggttattttaatcgtttgggttgttttatgttatttataatagtaataggttttttttaattgtgatttatttaaaattttaagaaataatttatttattatttaatttttaagtgatgaattatttataattttttataaattatgatttatgttattttaagtttttaagttttagagaggtttgttatttagtaatagataagtagaatattgttcgatataatgtttgtgttatgaggaatatttttatggtatttattttagaatttgggtattttatagtttttgggaaataaagaaaaatttttatagatttgtggagttttttagttttattttagagtatggaattttaaggttttaagatggatttttatatttatatttaggttttatttttatatttaggttttgattgtttttattgtattttttttaagtttggtgaagttgaattgtataaaagttttatttttagttttatatttatatatattttttatttttataggaaaattattgttcggtttaggttttagtattgatattttggtttgtaggttatgtttttgttatgtaggattttgaaattgaagatatggttttattttttggtaggattttattagatggggaggttggtataggttatgttttagttgtaggagatattgttttttttaattttttaggttagaagtgaattagtttttttttttttttttttttttatagtaagattgaatttatattgtgaagttttatatgattttattaatatttagggataatagaaaaggtgtgtatttgaagaatagtaatttttagattagatattgttattttgaagttttagaattttgttgtagtaaatatttttttttatttttttaatttatttttttttttggttttttttttttagtttttaaatatgtttaaattattttgtttttaaaaaataaatacgttgggtgtagtggtttatgtttgtaattttagtgttttgggaggttaaggtgggaggattatttgaggttaggagtttgagattagtttggataatatagtgagattttgtttttataaaaaattttttaaaaaattagttagatgtggtggcgtgtatgtgtagttttagttatttgggaggttggggtagggggattatagagtttaggagtttgaggttgtagtaagttatgtttggattattgtattttagtttgggtaatagattaagattttgtttttaaaaataaataaataaagaaataaaattttatttgttatttttttttttttttattgcgtttattaaaaagttttttatatattttatgtttgtgtgatagattaaagatggttgtaaatttttttatattttttttatggagagattaggtttaatttttggtttcggttttatttttatttttatttttattttattttgaatttagtttggttttagtgatttgtttgattgatagattatggtggaagtgatgtattgggatttttgaggttttagaaatgggattttatgttaggttataagaagttttgtagtttttttttgaagtgttttggaatatttgttataaaagatgtttagttattttgagattattatgttgtgaggaagttagtttttagttatttaagtttttttagttggggttttaattatgaagtaggggggtgttgtttttgttgaattcgttttaaattgtagatatataagtaaataaatgagttaattggggatagttcgttatataataataaattattagaatattttgtattttggtttttttaaggataagaataagttttgtgatgtggatttgattaagaattaagaacgatagtataattgtatataaatgtataatttataattagttatttatatgtaatatattagtattattgtttagttgttttttatgaaggaggttatcgtagttatcgtagttttagaagtgtttttgttgtattttagtgttttattagtaagattttgtagtagttttgtttgaaatttttttttttttattggtttttgttatggtggttatttttaggttttagaaattgtaatgttagtggtaaagaatatttaggttttgatataaattattttaagtttagatattaaaataatattgtttttgttaattgtatgattaaaagggtttgtttttattaggttagtgtaggatggtttgaaggtgtttatgtttatttttttttatttaagtaaggtattttatttattttggttttttttttgattttatgttatttttttttgtttttttgtttgtattgtttttaagttatggatatagatggattttataatttttggtttttatttatgtagtgtttttggttagattttttagaagtagaattttgaaataggatttgagtgtataatttattggaagattgttttcggaagaaatatagtgaaggaagtaagatagagtttaggagggggttgagaaaagatgtggtttggttttatttagagttgagttttagtttgattttatggagagttttagagtatgaattgtattatagaattgattttattttgaggtaagggagtagtattttgtatatatattttttttagtagataatatttatagtagtaagaaggattttataaaggaaatttgggaggggtattaatagatataaatagatagttttatgtatgtgtaatatatataataaatgtttgtttattaaatatttattagaaagtaaagattgaatattgtttaagtaagatttgattgattatttgattttttcgtaaatattatcggtttttattttgtattgtttgaaatatcgatatattttattgttttaaagttatttttatatttttagttaatgtgtgattaagtaattttttaattataggtgttaaaattttatttagaaggtaaggtattacgttgtttgtgaaagaggttgattttgaaggtttggaataaatataattgagagggttttaggtaggaataaagtgttattgaaagttttaatggatattttattgttaattaattagtaataagattttaatagtttttggtagattgtaagagaaagtgtttaggagtttttgatttgggagtataaagttatatttttgagttgttggtagagtttttggtggtttttttagataagttttataagtataggagtttatttttatgttagtttaagggataagacg

SEQ ID NO: 171 - DNA, 6020 bp, Artificial Sequence
  chemically treated genomic DNA (Homo sapiens)
atatatatatatatatatatatatatatttatagagatagtgttttattatgttttatatatatatatatatatatatatatatatatgtatatatttatagagattgtgttttattgtgttatttaggatggttttgatttattggggttaagtaatttttttattttagttttttaaagtgttgggaatataggggtgagtcgttatggttggttggttttttttgtttgtttgtttgtttttttagagatagggttttattatgttgtttaggatggttttgaatttttgggtttaagtaatttttttattttagttttttgagtagttggaattataggtttatattattgtgtttagttatttagtgttttgatgttataaatgatgtcgtagtgaataattttgtgtatattttattttgtttttgtaaagtatatttgttggataaatttttagaagttaaattgttgggttaaataatatatgtattttaaaattttataaatattgtttaagaattatgattttgatataaaataggggttttgaagttgtttgtttgtttatttatttatttatttttagatggagttttattttgttgtttaggttggagtgtagtggtataattttaagttattgtaatttttgttttttgggtttaagcgatgttttttttttagttttttaagtagttgggattataggtatatattattacgtttagttaatttttttgtgtgtgtatttttggtagagataggtttttattatgttggttaggttgattttgaatttttgagtttaagtgatttatttattttggttttttaaagtgttgggattataggtttgagttattgagtttagttaaagttgtatattaaaaattatggagtaattatttttttagttgatttgtttttttttaggtattgtattttttattttttttaaaataaataagtatatttataagttacgtatttatggttaagagttagagaaaggtttaggttgttttttgtggtaatttgaagaaaaatgtgaagatgtgtattagtaaattttttttaaaatagttgatgggaattcgttgataattattattgaaagcgatatatttatatgtatattagtaaaattttgtcggttattttttattaataaaggaatttttttttttttttttttttttttttgagatggagagatggagttttgtttttgttgtttaggttggagtgtagtggtgtaatttcggtttattgtaattttcgttttttgggtttaattaatttttttgttttagtttttttagtagttgggattataggtatttattattatattcggttaattttttatatttttagtagagatggggttttattatgttggttaggttggttttgaatttttgattttaggtgatttatttgtttcggttatttaaagtgttgggattataggtatgagttatcgcgtttggttttttttttttttttttttaagtaaaaaaaaaattttttttagagagggagttttattattttttttagtttggttttgaattattgaatttaatttattttttttttttggttttttaaagttaagagattataggtatgagttattatgttcggtttaggtatttttttatgttttataaatatagtgagttgttatttataatgtatttataagttgttatttataataatatttataaatgttgtttattttgaaaatgttgtgattattgttgggtatggtggtttacgtttgtaatttaagtattttgggaggttatggtgggaggatagtttgagttttggattttgagatatgagtttgggtaatatcgagatttattttttaaaaaaataaaataaaaagataaaattagtcgggttgtggtggtttaggtttgtagttgtagttatttgggaggttgaggtgggaggattatttgagtttgggaggtcgaggttgtagtgatttatgattacgttattatgttttagtttgggaggttaagtgaggttttgttttaaaataaaattaaaatttaaaaaatttatgattgtttggtatggtggtttatggttgtaattttagtatttttgtaggtcgaggcgggtggattatttgaggttaggagtttaagattagtttggttaatatggtgaaatttcgtttttattaaaaatatgaaaattagttagtcgtggtggtgggtgtttgtaattttagttattagggaggttgaggtaggaaaatcgtttgaatttgggaggtagtggttgtagtgagtcgagattatgttattgcgttttagtttgtagtttgggttataagagcgagattttattttaaaaataaaataaaataaaataaaataaaaataaattgtgattatagttttattattaagttttttttgtgagatttgttatttaaagttgtttagtgttgagaagttttttagtaatagttagtttttattttaataattttaatttatttaaaaataatgtgaggtaggagaatagggtttggaggtagggaatttaaggttgagtaaagttgattttttagaattgaattaaaaggaaaattttaattttttatatttaagtaataaaaagattattttttttgtaaattttttttttttttcgtttggtagatggaaaattgaaagtatttttgattggttgtagaaagtagatgtttgtatagtagtgtaattttgtaattttattttagtttttgattggttgttgtttataattaattagatgtttgtatagggtgtgatttttgtaattttattttagtttttgattgcgggttattattttatttatatagggtgtatattaagtaattaatggaaaatttttagagagtatttaaattttagaaaattttgtaatgggggttttgagtttttgtgttttggtagtttttgtagttttgtggagtgtatttttatttttaacgtgtttttgtttttgttgttttattttttttttgttttgtgtattttgtttaattttttgttcgaaacgttaataatttggtaatatgttgattatttattattttttttatagtgaagttagttgaatagtaagtatatttttgtgttgttttgtgatggagtatattatttaaatttattgtatttattaaggagaaaaaaatgatttttgtaaattgtatgttgaaatgatatttaatgtgtataagataaaattagtatagtaggtatagaggtttggtttttataattgttaattgaatttaaatatttgaaagatataattgtaatgtgtataggcgtttgttgattaaaaagttgtttgaggttaggcgcggtggtttatttttgtaattttagtattttgggaggtcgaggttggaggatggtttgagtttagatgtttgagattagtttgggtaatagatagatttattttatttatattaatatataaatatataattagttgggtttgatggtacgcgtttgtagttttagttgtttgagaggttgaggtgggaggattgtttgagtttaggaggtcgaggttgtagtgaattgcgttacgttattgtattttagtttgggtgatagagttagattttgttttaggaaaaaaaaaaaaaaaaagttgtttgagtttattagatttttaaagtgttttatttaaaaaaggttttttttttgttattttagtagaaagtagtaattttgttatttaatttcgataggagtttttgtatattttaagaaaaataaatagaatgaattaaagtatgtatggtagaataaatttggaaataaatttcgaagcgattagattttagaggatttgtttgtgattagtagagattattaatgtaaaattaaattatagattataaaagcgggaaaggtatttatagattatttagttaagttttttttgtaatgagaaggaagtagatttaaattgattggtttgtgagttaaatattatattaaattggggaaatggttcgtgtgtgtgtgtgtgtgtgtgtgtgtgtgtgtgtgtattttaagagatattttatttaatatggaaagaattttatgtagcgtttaagttggttttatgtcgtttgtatatatatatatatatataagtatattatatatatatatatttttaagtatgttggtgtgttaaatattatgtataaaatatttaggaaagtaaataatttgatgatagtttagtatataggaaagaaaatatttatataggatggttatatagattagtggttaagagtgtttggtgaatttcggttttattattgtgggattttgtgttttggtttttttatttggaaaatgtaggtttgtttattttagagagtgtaaagattaaatgagataattcggataaaggattagtgtagtgtcgagtatatagtaaatttttaataaatgtaggttgttgttattatttcgttaatatgttaaagaaaaaagaggttggattaaaagagtatttttaaaataaagttaaattatgttattagtatttttaggttaattgggattaaattggattttttgcgaaaaggtggaggggattaaatgacgtcgatcgttttagtaataggtttttaaagaaggtgaattttcgtagttaataagattttgtgttttggaggaggtagttaatggttgacggaaagagaaagagggaggacgcgttaatttttttgtttgagtttcggtttaataaaatggcggcggtagcggtgtcgttttgttttcgcggtttttgcggcggtggtagtggtagcggtttttgagttgtggggaggttttagtagtagttatagtgacgattaagattttagtgtatttttatcgtaatcgggcgcgggggagcgtagatcggcgtttagtaattatagaagtcgataaggcgtttaagcgaaaatatgatcgttgagtttatgaggtaaaacgtaatttcgttttatgggttttagcggtttgggtttaggtatcgtttgagtcgggtgtttgggaaggcgttcgtttggtgggttaggtttgtgtgttgtttagtcgaaagaggtatcgttttttttttaggtgagaagggtttcggggtatcggcgtaaggtttcgacgggggtgggggtggggatggggtggggggaggtggggggggcgcggtttagggtatggggcgttttttgtaattttttttaaacggtgacgtttggtcgggtttttttgtttattttttggtgtttgtgggattgagatttcgaagtcggaggcggtttttggtatttcggttatttttgttaatttttgggtttagaaattgcgtggggaagaagcggggggagggtgagaagagggggaggggtgggcgggcgcgaggatgtgagattttaggacgatttagaggcgtttaggttgttggagatgggaagtattcgggttttgcgggattttttttttgtagttttaggagataagtttttttttgattgggttgtggtgtagttttaggtatttaggtattttttttattttatattttgaaggatatttttgggtttatttttaggcgaggggggatttaatatagggttttgtttttagaggattttagtatattattttttgtgatgtttagttttaatgggattttaagtgtttttttattttttgggtaaatttcgaggagtaattaggttttatttttatttatttatttattttatgaaggatgaagggtaggttaacgtgggttgatgcgaagtaagatttattgtaagggaaaatgtttggtaggtttttttttaattaattaagtacgtttattaggttgaagttgtttttttgtgtgtttttgatttgttttttgacgggtttgaaaatttgggtagttaatatgaaatgtatatatttttatttaggtggttggttggcgttttagtttg

SEQ ID NO: 172 - DNA, 6020 bp, Artificial Sequence
  chemically treated genomic DNA (Homo sapiens)
taaattgaaacgttagttagttatttgggtaaaagtgtatatattttatattgattatttaaatttttagattcgttaagaggtaaattagaagtatatagaaaaatagttttaatttaataaacgtgtttgattggttaagaggaggtttgttaggtatttttttttgtaataaattttatttcgtattagtttacgttaatttgttttttattttttatggaataaataagtaaataaagatagggtttaattatttttcgaaatttgtttagaaagtggggaaatatttgaggttttattaaggttggatattataaaaagtagtatattagggttttttggaagtaaaattttgtgttaagttttttttcgtttagaaataaatttaaggatattttttaggatatggagtagaaaagatatttaaatatttggaattgtattataatttaattaaaaaaaggtttgttttttggggttgtagagaaaaaatttcgtagggttcgggtgttttttatttttagtaatttaaacgtttttaagtcgttttgggattttatattttcgcgttcgtttatttttttttttttttttatttttttttcgttttttttttacgtagtttttaggtttaaagattagtaaaaatgatcgggatattaaagatcgttttcgatttcgaggttttaattttataggtattaaagaataaatagaggagttcgattaagcgttatcgtttaggggagattgtaagaagcgttttatattttaggtcgcgttttttttatttttttttattttatttttatttttattttcgtcggagttttgcgtcgatatttcgaaattttttttatttaaagagaaaacgatgtttttttcggttaagtaatatataggtttaatttattaagcgaacgtttttttaaatattcgatttagacggtgtttgggtttagatcgttggggtttatgagacggggttgcgttttattttatgggtttagcggttatgttttcgtttgaacgttttgtcggtttttgtgattgttgggcgtcgatttgcgttttttcgcgttcggttacgatagaaatgtattggagttttagtcgttattgtagttgttgttggaatttttttatagtttaaaggtcgttattattgttatcgtcgtaggagtcgcggaaataaagcgatatcgttgtcgtcgttattttgttgggtcgaggtttaggtaggagaattggcgcgtttttttttttttttttttcgttagttattggttattttttttaaagtatagagttttattggttacggaaatttattttttttgggggtttgttgttaaggcggtcgacgttatttgattttttttattttttcgtagggggtttaatttagttttaattgatttgaaagtgttagtgatatagtttgattttattttgaaaatgtttttttggtttaattttttttttttttgatatattaacgaagtaataatagtaatttatatttattgagagtttattatatgttcggtattatattaattttttattcgggttattttatttaatttttatattttttgaggtagataaatttatattttttagatgaggaaattaagatataaagttttatagtagtggagtcgagatttattagatatttttaattattaatttgtatggttattttatgtaagtatttttttttttatatgttaggttattattaagttatttgtttttttagatgttttatatataatatttggtatattaatatgtttggaaatgtatatgtgtataatatatttatatatatgtatatgtgtgtagacgatataagattaatttgaacgttgtataaaattttttttatattgaataaagtgttttttagaatatatatatatatatatatatatatatatatatatacgggttatttttttaatttgatgtgatgtttagtttataaattaattaatttagatttgttttttttttattatagaggaagtttggttggatgatttgtaaatgtttttttcgtttttatgatttataatttgattttatattggtaatttttgttaattataaataagttttttaaaatttaatcgtttcgaaatttatttttaaatttattttgttatgtatgttttagtttattttatttattttttttgaaatatgtaagagtttttgtcggggttaggtgatagggttgttgttttttattgggatagtaagaggggagttttttttgaatgaaatattttgaaaatttgataggtttaggtaatttttttttttttttttttttgagatagggtttagttttgttatttaggttggagtgtagtggcgtgacgtagtttattgtagtttcgattttttaggtttaagtaatttttttattttagttttttaagtagttgggattgtaggcgcgtgttattaagtttagttaattatgtatttatgtattggtatagatgaggtaggtttgtttgttgtttaggttggttttaaatatttaagtttaagttattttttaatttcgattttttaaagtgttggagttataggggtgagttatcgcgtttggttttaggtaattttttaattaatagacgtttgtatatattgtaattatattttttaaatgtttgagtttagttggtaattatagaaattagatttttgtatttgttatattgattttgttttgtatatattaaatattattttaatatataatttataggagttatttttttttttttggtaaatgtagtgaatttgaatgatgtattttattataaggtagtatagaaatgtgtttgttgtttaattgattttattatgagaaaaatagtaaatagttaatatgttattaggttattggcgtttcgaataaggaattggataaaatgtataaagtaaggaaagaatgaagtaataaaagtagagatacgttgaaaatgaaagtatattttataagattgtaggagttgttagagtataggggtttaagatttttattatagaattttttgggatttaaatattttttagaggttttttattggttatttggtgtatattttatgtaaataaagtagtggttcgtaattagaggttaaagtgaagttataagggttatattttatgtaagtatttaattggttgtggatagtaattaattagaggttaaagtgaagttataaagttatattgttatataaatatttgttttttgtaattaattagagatatttttagttttttatttgttaagcggaaaaggaagaggatttgtaaagggagtagtttttttgttatttaggtgtggaaagttggggttttttttttgatttagttttaggaagttaattttatttagttttaggttttttgtttttaaattttatttttttgttttatattatttttaaatgaattgaaattattaaggtagaaattagttgttgttgagagattttttaatattaaatagttttaaatgataagttttataaaagaaatttaataataaaattataattataatttgtttttgttttgttttgttttgttttgtttttgagatggagtttcgtttttgtagtttaggttgtaggttggagcgtagtggtatgatttcggtttattgtaattattattttttaggtttaagcgatttttttgttttagtttttttagtagttgggattataggtatttattattacgattaattaatttttatatttttagtagagacggggttttattatgttagttaagttggttttgaatttttgattttaggtaatttattcgtttcggtttgtaaaagtgttgggattatagttatgagttattatgttaagtaattatagattttttaaattttaattttgttttgagatagggttttatttggttttttaggttggagtataatggcgtgattatgggttattgtagtttcgattttttaagtttaagtgatttttttattttagttttttaagtagttataattgtaggtttaagttattatagttcggttaattttatttttttgttttatttttttagagagtaggtttcgatgttgtttaggtttatgttttaaagtttagagtttaaattatttttttattataattttttaaagtgtttgaattataggcgtgagttattatgtttagtaataattatagtatttttaaaatgaataatatttgtgaatattgttgtgaataataatttgtgaatatattgtgaataataatttattatatttgtgaagtataagagaatatttgagtcgaatatggtggtttatgtttgtaattttttaattttggaaggttaagaagggaagatgggttaaatttagtagtttaagattaaattgggaaaaatagtgaggttttttttttaaaaaaaattttttttttatttaaaaaaaaaagaaaaagaggttaggcgcggtggtttatgtttgtaattttagtattttgggtggtcgaggtaggtggattatttgaggttaggagtttaagattagtttggttaatatggtgaaattttatttttattaaaaatataaaaaattagtcgggtgtggtggtgggtgtttgtaattttagttattggggaggttgaggtaggagaattggttgaatttaggaggcggaggttgtagtgaatcgagattgtattattgtattttagtttgggtaataagagtaagattttatttttttattttaaaaaaaaaagaaagaaagaaaaagaatttttttgttagtaaaggatggtcgataaagttttattgatatatatataggtgtatcgtttttagtgatgattattaacgggtttttattaattattttagaagaagtttattggtatatatttttatatttttttttaaattgttatagaaggtaatttagatttttttttgatttttgattataaatgcgtaatttgtgaatgtgtttatttgttttggaaggaataagagatatagtatttgaaagagagtaaattagttgagaaaatagttattttataatttttaatatatagttttggttgggtttagtggtttaagtttgtaattttagtattttgggaggttaaagtgagtggattatttgagtttaggagtttaagattagtttggttaatatggtgaaagtttgtttttattaaaaatatatatataaaaaaattagttgggcgtagtggtgtgtgtttgtaattttagttatttgggaggttgaggagggagtatcgtttgagtttaggagatagaggttgtagtgatttgagattatgttattgtattttagtttgggtaatagagtgagattttatttgaaaataaataaataaataagtaaataaatagttttaaaatttttattttatgttagaattataatttttgagtaatatttatgaaattttaaaatatatatattatttaatttagtaatttaatttttaggaatttatttaatagatatattttatagggataaaatgagatgtatataagattatttattgcggtattatttgtaatattaaaatattggatagttgggtatagtggtgtgggtttgtagttttaattatttaggaggttgaggtaggaggattgtttaagtttagaagtttaaggttattttgagtaatatagtgagattttatttttgaaaaaataaataaataaataaaaaaagttagttagttatggcggtttatttttgtatttttagtattttgggaggttgaggtgggaggattgtttgattttagtaggttaagattattttgggtaatatagtaagatatagtttttataaatatatatatatatatgtgtatatatatatatatatatatgaaatatagtaagatattgtttttataaatatatatatatatatatatatatatat

SEQ ID NO: 173 - DNA, 6497 bp, Artificial Sequence
  chemically treated genomic DNA (Homo sapiens)
ggtttacgtttataattttagttttttgggagttcgaggtaggtagattatgaggttaggagatcgagattattttggttaatacggtgaaatttcgtttttattaaaaatataaaaaattagtcgggcgcggtggcgggtatttgtagttttagttattcgggaggttgaggtaggagaatggtatgaatttaggaggcggagtttgtagtgagcggagattatattattgtattttagtttgggcgatagagtaagatttcgttttagaaaaaaaaaaaaaaagaaaaggataagtgtttatttatgttaaatgttgttagattatgtgaaataaggatatagatattattattatatttttcgtttttttttttttttttttttttttgagacggagttttgttttgttgtttaggttggagtgtagtggtacgattttggtttattgtaattttcgttttttgggtttaggcgatttttttgttttagtttttcgagtagttgggattataggtaggtgttattacgttcggttaatttttttatttttagtagagacgaggttttattatgttggttaggttggtttcgaatatttgatttcgtgatttatcggtttcggttttttaaagtgttgggattataggtgtaagttattgcgtttagtcgattatattttttaatatggaagtagtttaatattttgataataggagttttaatgggttggtttgagtagaagtttaggtggagggagttgaagaataaatgttgatttttggataaatggtaggtggagtgagattttatttttaaaaataaaaataaaaataaaaataaaaataaagggtagatggattataaatgaaaaattaagatgattattaattttaaggaatataaaaagttgtttatagatagaaagattattataatatattacgtggtttagtttagagggtagaattgtaatttaatttgtaatattgatttattataacgttattgtatttagaaaatggtggatgaagggtatatattaggggagggggaaggaattggtgaaggagttgattttttttttttggaaggatgaatgaattaggattatgagttgagatgtaggagataaaaggatcgagaagatgtaaaaagtagattgggaaaggaaatttgtaagggacgtgtagaagggtgtgtagtgtttggggggtttatgtgatatatggggtgatgtgttggaaatgtagttagttagtataggatagagattttttttagttagttaaggtttcgagaaggtaggttttgggagaaaggggtttcggtgtgggaggtcggttttagaatgaagattttggtagatagatttggttagtatagaggttttggttgttttatggtttgggttttttagttagtttggttttattcgtttttagttgttgatttaattttttgtagtgaagaaggggtaaggtgttgggttaaggcgttttagttaggtttttagtttttttttttagttagttttataatttatagagttttagcggggtaacggttttagattaagtttgtttttaggttaggagtagaatgaaaatgttttttttagattaatttaggaagttgttttttttggaaaaattttttagtttttaataagaataatggtattggttaggtatggtggtttatgtttgtaattttagtattttgggaggttgagtggggtggattatttgaggttaggagtttgagattagtttggttaatatggtgaaattttgtttttattaaaaatataaaaattagttggacgtggagatgggcgtttgtaattttagttttttaggaggttgaggtagaagaatcgtttgaatttgggaggtagaggttgtagtgagttaagatcgcgttattgtattttagtttgggtaataagagtaaaattttattttaaataaaataaaataaagaataatggtattattaatgtaatattattgtttattaattttataatgttgtagtttttttttttttttttttgagacggagtttcgttttgtcgtttaggttggagtgtagtggcgcgattttggtttattgtaagttttgttttttaggtttatgttatttttttgttttagttttttgagtagttgggattataggcgttcgttattatattcggttaatttttttttttttttggatttttagtagagacggggttttattatgttagttaggatggtttagattttttgattttatgattcgtttgtttcggttttttaaagtgttgggattataggtatgagttatcgtatttggttatatgtaggtatttttttaaagttatttttttttttgaaatagtgttttatttttatttaagttggagtgtagtggtttaggtatggtttattgtagtttgggtttaagtaatttttttattttagtttttcgagtagttgggattataggtatgtattattatatttgtttaatttttaaattatttgtagtgataaggtttatgttgtttaggttggtttcgaatttttgggtttaagtgatttttttgtttttgttttttaaagtgttgggattataggtgtgagttatcgtgtttagttttaaagttgttgttttttttttttaatttaaaatgtatttataggtcgggcgcggcggtttatatttgtaattttagtattttgggaggttaaggtaggaggattataaggttaggtttaagattagtttggttaatatggtaaaattttatttttagtaaaaatataaaaaaattagttaggcgtggtggtaggcgtttgtaattttagttatttgggaggtcgaggtaagagaattatttgaatttcggagttggaagttgtagtgagttgagattacgttattgtattttagtttgggtgatagaacgggattttgttttaaaaaaaaagtatttatttatttatttaaaattagagatggggtcgagtacggtggtttatgtttgtaattttagtattttgggaggtcgaggcgggtggattatttgaagttaggagtttaagattagattggttaatatggtgaaattttatttttattaaaaatataaaaattaatttggcgtggtgacgcgtgtttgtaattttagttatttgggaggttaaggtaggaggatcgtttgaattcgggaggtggaggttgtattgagtcgagattgtgttattgtattttagtttgggttgatagagtgagattttgttttaaaaaaaaaaaaaaaaaatagagatggggttttgttatgttgtcgagattggttttaattttttgtttgggttttttaagtagttgggattataggtataagttgttatgtttggttttaaagtttttgtataataaattatttatttttgtttttatattgattttaggaggtgggtattatgattttttttattttatattggtagaaagtaaggtatagagaagtttagtgagttgtttaagttatgaagtgtcgagtaatagaggttagattttgagttaagttattgggagttagtgtttttgtaataataattgtttagtgttgttttttaaagggtttttgtagtttttgaggggttatttttgaaaagatcgacgttatggtttgagtataggaggttttttttgggttgttggtttttttattgtttttgttggagatggggttgttgtgttttttggaattttttcgtagtatttttatgtattttggagaggaggttaagagtttgtgggaattgcgagagttggggattgcgtatagtttgagaggtagggggtatcgggtttgaattttagattagcggggtattttggtggtttagggagagaggttatgttttttttagatttgttattttgggattagggattaaaagtggtttttttaggttgggtttatttaggtatggttttttttgtatttttttttaggtttagatattttttattttcggtttttttattttaggtttgagatgtatttgttttggttgttatatattaaggttttggtgggggtaggaattgggataaattgttgttaggttttttggggtttttttcgtttttgaattttatttggtatggagttttttttttttatagtagttttttatatttatgtttttatttgggagggggtgacgggttatgtgttaatgtgtttttaaggtttttagttttagggtttgagtttttatgttttgttttatgggggtgcgggggtgttatgttttgtattttttttagtaatttgttatttttttattttgtgagaataagttttttttattttgtgttttttgattttacgacggcggttgttttgtttacgaggtagggatttttatttttggtgtagtttttgtttttattattttgggtttgtgttgtttttggttttttattttgttgttatagggttaattttttttatatatttggttgttttttgttttatagtttttaggttagggtttgtttttgtttttaatacgtagtttttcggttttttttattttttttttggattttacgttatttttgggtaattagaaagtttagagatggtttttaggtgattttttagtttgtttttttttttgaatttagagcgttgtagttatagtagaggtaattgttgttatttcgcggtttatgatagtttggcggttcgtattttttttttatgattttttgtatagataggtttacgtgtgtttttagatgtttgaattattgttgacggttggggatttggcggtcgtgggtttttggggagttattggggagggggtggcggtcgcgtttcgtttttacgggaatatttgcggatataaataggtagttagtagaggtagtagtatagagttattaagtagtgttgtatacggggtttatttgtgtgtattaggatgtttgatattatgttgttcgtttgttttttcggtttattggttttttttttcgcgtgttatttttagaattgttcgaggggcggtaagagggttatgttcgatttggagttgagataggtattttttattgtgggttattttagggttgttatagcgggtagtgttgatattttgggttaggggttaggaaagagggaagttatgggtggtggtagtttttaggggaagttcgggggaggaagagggaggtatggtatggttgggtagaggagttaatggggtgggttagaggggattaggttttggaggaggttgggagaggttgaaggcgtttttggttattgtcgttatttagatagggatgtagggaaatgagggatgttttttcggtgattgggtttggggttggatagggagaacggggtattatggttttttttgtgtttatggcgtttttgtatttggattggttggggtagtagaggttttattttatttagtattggaggttttttttatttagttttagttttttagttataggcgtttaggtttttatatagaagatggttattggtttgagcgcgtttgagtggggtattttgtggggaagttttgttgggaatttggtttaattttatagtgttggacgttttttttatttttagtagagttgaaggaaatttaattacgatgtgtatgtaattttgtttaggtttaatgatgagtttttgagtaaattagattatattaggtttagttaaaagtttaatgcgttatttattgcgttagagaatcggttgttgagtagatgagagtggtcgttcggtaattttcgtagttttttttttttttgttaggtttttttagggttttgaggtatttgggtgttcgtgttcgtttttaggttttaggtttttgttatttatttgataggttataggtggttgagtaggggttagggttttagttgaggtcgataagtttggcgggggttaggggtaaggtaagagaggagataggaaatgggaagggtcggggttttggatgggtagggttttttcgtatggtgtagtggggaagggggtgggttcgggtttaagtcgtagtagggcgaggaggaaggaggaagggtttggagtggtggagggtggggtagttgtaatagtggcgtttattagcgatgatttcgaggttcgaggaagggttttttacgttgtagtttacgggagattcgtttttagttgagggtgaggacgttgagggttgttatcgagaggttatttaagaaattaaggtgtcgagtagatttggacgtttcgttcgtgatcgcggtcgaggtttagtggcgttcgagcgtgtttgtagtcgtagtttcggtgtttcgttcgtatttcgagttttggattttagtattttcgtttcgttgcgtttttttttaatttttcgattttcggttttttttttttcgtttatttcgttcgttttcgtagt

SEQ ID NO: 174 - DNA, 6497 bp, Artificial Sequence
  chemically treated genomic DNA (Homo sapiens)
attgcggggacgggcggggtgagcgggaggaggggagtcgggagtcgaggggttggaggggaacgtagcgaggcggggatgttggggtttagggttcggagtgcgggcgggatatcggggttgcggttgtaggtacgttcgggcgttattgggtttcgatcgcggttacgggcggggcgtttagatttgttcggtattttggttttttggatgatttttcggtgatagtttttagcgtttttatttttagttagggacgggtttttcgtggattatagcgtggggaattttttttcgagtttcggggttatcgttggtgggcgttattgttgtagttgttttattttttattattttagattttttttttttttttttcgttttgttgcggtttgagttcgggtttatttttttttttattatattatgcggagaggttttatttatttagaatttcggttttttttattttttgtttttttttttgttttgtttttggttttcgttaagtttgtcggttttagttggagttttgatttttgtttagttatttatgatttattaggtgggtggtaggggtttgagatttagaggcgagtacggatatttaggtgttttaggattttaaaggagtttagtaggaggaagagaggttgcgggggttgtcgagcggttatttttatttgtttaatagtcggttttttggcgtaatggatagcgtattagatttttagttgagtttggtgtggtttaatttgtttaagggtttattattgagtttggatagaattgtatgtatatcgtgattggattttttttagttttgttggaaatggaggaaacgtttagtattatagaattaggttaggtttttagtagaatttttttataggatgttttatttaagcgcgtttagattagtggttattttttgtgtgggggtttgggcgtttgtggttgggaggttggggttggatgaggaaagtttttaatgttaggtaggatggagtttttgttgttttagttagtttagatgtaagaacgttatgggtataggggaggttatgatgtttcgttttttttatttagttttaagtttagttatcggggaagtattttttatttttttgtatttttgtttggatggcgatagtgattaggagcgtttttagttttttttagttttttttaaagtttggttttttttggtttattttattggtttttttgtttagttatgttatgtttttttttttttttttcgaattttttttaaaggttattattatttatgattttttttttttttagtttttgatttagggtgttagtattgttcgttatggtagttttgagatggtttatagtgggaagtatttgttttagttttaggtcggatatggtttttttgtcgtttttcgggtagttttggaagtagtacgcggaggagaaggttagtaggtcgaggaagtaggcgggtagtatggtgttaggtattttggtgtatataggtggatttcgtatgtagtattgtttggtggttttgtgttgttgtttttgttggttgtttatttatgttcgtaggtgttttcgtggaggcgagacgcggtcgttattttttttttagtggttttttaggagtttacggtcgttaggtttttagtcgttagtagtgatttaggtatttggggatatacgtgggtttgtttgtgtaggggattataggggaggggtacgggtcgttaggttgttatgggtcgcggaatgatagtaattgtttttattgtgattgtagcgttttggatttagggagagggatagattggggggttatttggagattatttttgagttttttgattatttagaaatggcgtagggtttaagaagagggtaagaggaatcgaggggttgcgtgttaggggtagggataggttttggtttaggagttgtggggtaggggatagttaggtgtgtggggagggttagttttgtgataataagataagggattaagaatagtataagtttagagtggtgaggataggggttgtattagagatgagaatttttgtttcgtggataaggtagtcgtcgtcgtggagttaagggatatagaatgagaggggtttgtttttatagggtaggggggtggtaggttgttggggaaagtgtaagatatgatattttcgtatttttatagagtagggtatggggatttaggttttgaaattgggggttttggggatatattggtatatgattcgttatttttttttaggtagaaatatgagtgtggagagttattatggggagaaagaattttatgttaagtaaggtttaaaggcggggggagttttaggaaatttgataatagtttgttttaatttttatttttattaggattttagtatgtggtaattagggtaggtatattttaggtttggggtgggagagtcgggggtggggggtgtttgggtttgggggaaggtgtaggaggagttatatttaaatggatttagtttgagaaagttatttttggtttttaattttaaggtggtaggtttaaagaggatatggtttttttttttgggttattagaatgtttcgttggtttggggtttaggttcggtattttttgttttttaagttgtgcgtagtttttagttttcgtagtttttataggtttttggttttttttttagggtgtatagaggtgttgcgaggaaattttaggggatatagtagttttatttttagtaagggtagtgagggggttagtaatttaggaggggttttttatatttaggttatggcgtcggtttttttaggaatgattttttagggattgtaaggattttttgagaggtaatattgggtagttgttattgtaggaatattggtttttaatagtttggtttagggtttggtttttgttgttcgatattttatggtttgggtagtttattggatttttttgtgttttattttttgttagtgtgaagtaaggaaaattatggtatttattttttagggttaatgtgaggatagaaataaataatttattatataaaagttttagagttaggtatggtagtttatgtttgtaattttagttatttgggagatttagataggaggttgagattagtttcggtaatatagtaagattttatttttattttttttttttttttttgagatagagttttattttgttaatttaggttggagtgtagtggtataatttcggtttagtataatttttatttttcgggtttaagcgatttttttgttttagttttttaagtagttgggattataggtacgcgttattacgttaggttaatttttgtatttttagtagaaatggggttttattatattggttagtttggttttgaatttttggttttaagtgatttattcgtttcggttttttaaagtgttgggattataggtatgagttatcgtgttcggttttatttttaattttaaataaataaataaatattttttttttgagatagagtttcgttttgttatttagattggagtgtagtggcgtgattttagtttattgtagtttttaatttcggggtttaagtgatttttttgtttcggttttttaagtagttgggattataggcgtttattattacgtttggttaatttttttgtatttttattaaagatggggttttgttatgttggttaggttggttttgaatttgattttgtgatttttttgttttggttttttaaagtgttgggattataagtgtgagtcgtcgcgttcggtttataaatatattttaaattgaaaaaaaaaaataatagttttaaggttgggtacggtggtttatatttgtaattttagtattttgagaggtaaaggtagaaggattatttgagtttaggagttcgagattagtttggataatatagattttattattatagataatttaaaaattgggtaggtgtggtggtgtatgtttgtggttttagttattcgggaggttgaggtggaagaattgtttgagtttaggttgtagtgagttatatttgagttattgtattttagtttgggtgagagtgagatattgttttaaaagaaaaagtagttttagaaaagtgtttgtatgtggttaggtgcggtggtttatgtttgtaattttagtattttgggaggtcgaggtaggcggattatgaggttaggagatttagattattttggttaatatggtgaaatttcgtttttattaaaaatttaaaaaaaaaaaaaaattagtcgggtgtgatggcgggcgtttgtagttttagttatttaggaggttgaggtaggagaatggtatggatttgggaggtagagtttgtagtgagttaagatcgcgttattgtattttagtttgggcgatagagcgagatttcgttttaaaaaaaagaaaaagggggttgtagtattgtaaagttaatgaatagtagtattgtattagtaatgttattattttttgttttgttttgtttgagatggagttttgtttttgttgtttaggttggagtgtagtgacgcgattttggtttattgtaatttttgttttttaggtttaagcgatttttttgttttagttttttgagaagttgggattataggcgtttatttttacgtttagttaatttttgtatttttagtagagatagggttttattatgttggttaggttggttttaaatttttggttttaggtgatttattttatttagttttttaaagtgttgggattataggtatgaattattatgtttggttaatgttattatttttgttaagagttaggagatttttttagagagagtagttttttggattagtttaggaggaatatttttattttatttttggtttggaaataagtttggtttgaggtcgttgtttcgttgagattttgtgggttgtgaggttagttgaggagagaggttggaggtttggttaaggcgttttggtttagtattttattttttttttattgtagggggttgagttaataattgaaaacggatgaggttagattgattgaagggtttaagttatgggatagttaggatttttgtgttgattagatttgtttattaggatttttattttaagatcggttttttatatcgaggttttttttttttaggatttattttttcggaattttggttgattgggaaaagtttttattttgtgttgattggttgtatttttaatatattattttatatgttatatggattttttagatattgtatatttttttatacgttttttataggtttttttttttaatttattttttatattttttcggtttttttattttttatattttagtttatgattttgatttatttatttttttaaaagaaaggagttagtttttttattagtttttttttttttttttgatgtatattttttatttattattttttaaatataatgacgttatgatagattagtattataagttagattgtaattttgttttttgagttaagttacgtagtatattatgatgatttttttatttgtgaataattttttgtattttttggagttagtggttattttggttttttatttgtggtttatttgttttttgtttttgtttttgtttttgtttttgtttttagagatggggttttattttatttgttatttatttagaagttaatatttattttttaattttttttatttgggtttttgtttaaattagtttattgaaatttttgttgttaaggtgttaaattatttttatattgaaaaatgtggtcggttgggcgtaatggtttatatttgtaattttagtattttgggaggtcgaggtcggtggattacgaggttaggtgttcgagattagtttggttagtatagtaaaatttcgtttttattaaaaatagaaaaattagtcgggcgtggtggtatttgtttgtaattttagttattcgggaggttgaggtaggaaaatcgtttgaatttaggaggcggaggttgtagtgagttaagatcgtgttattgtattttagtttgggtaatagagtaagatttcgttttaaaaaaaaaaaaaaaaaaaaaaaaacgaaaaatgtggtggtgatgtttatgtttttattttatatgatttagtagtatttgatatgggtgaatatttatttttttttttttttttttttttttgagacggagttttgttttgtcgtttaggttggagtgtagtggtgtgattttcgtttattgtaagtttcgttttttgggtttatgttatttttttgttttagtttttcgagtagttgggattataggtgttcgttatcgcgttcggttaattttttgtatttttagtagagacggggttttatcgtgttagttaggatggtttcgattttttgattttatgatttgtttgtttcggatttttaaagggttgggattataggcgtgagtt

SEQ ID NO: 175 - DNA, 8246 bp, Artificial Sequence
  chemically treated genomic DNA (Homo sapiens)
atatagtttatagtaaatattattttaaagattatatgaaataatgaatataaaatattttgtttatgaagtaagaatttagttaatgtgtaatttagggtttttgggtttttgggtatgtattgtgaaaaagtatttatttataataataatttgagttcgtgttgttttaaaaagttttaggaagaagtttagttttagtaaaataaaaaattggttatatgtagagatgtttgattggagatgaattttggtaaattttttttattattatattaaaaattttattcgaggaggagtttatttgttattttttaaatatgttagtatttggaagtatgatttgtatttgtgttgtttttattttatttttatatatagtgattgagttaattagtttaataaaagttttgtttttagtattgttaggggagatattgttttgggaattttttttggtgttttttttatttgttgtataaaattttgttaaattttttttggtgttgtgattattggattattatgcgttatgttattgattttatttattgtataggtaataaatgttagtaaatgtttatattatttattattattgttattagtgttattgttattattatttttattatgattgttttgtatttggtttattaaagaggaaattaaaaatatgtaataattagtgtagattttataggattttttagtttttgtgaatttaaagtatttgagataggttttaattaatttagaaagtttatttttgttaaggttaaggatatttttatgatataatcgaataaagttttgatgatatgtttttaaggtggttagggtatagtttggttttatatattttagggagatataagatattaattaatataagtaagatgtatattggtttaatttggaaatgtgggataattcgaagcgggaggttttaggttataggtagataagagataaatggttgtgtttttttgagtttttagttttttattgaatagataatttatatgtgaagagggtagaggaatagttatttatgttttagtttggtttagtgaatttgtatttttatttaaataatagggtagaagaagtaattaaatatgtaaagaaatataaaaagtggtttaatatttaaagataggtttattttggagaataaatttgagaggggtttttggttaattttagttaggagtattttttgttatagattaagagtattaattggtttaagggtgagagaatttattatcggcgtggaatgtttttgtataacggagaagttagttgtagggttggaatgtatttggttggaggggaggttattttggggttgatatgtttttggttagggaggggtttggaatgtttttggtaagagatgttatttgtggtttatggttattttggttttagttattaggttgatgttttttggatttaggtggtttttgattaaggtgaattttaaaatggtaggatggtgatgtttttgttttgttattttgttttgtgatatgtttattattattttatggggaaagtaaaaaaatggggagtttttatggtaaaataattttggaaaatattgatgaataaggttaagtaagttttttttttgaagttttttaggttttttttatgtataaattattaggagagggtgggatgtatatatagtatttttttaatatatttaattataaaattttttttattgtatatatgtaaattgggaatattttgttttaattggaagggaaaatgttaatggtaaaatagttggtaatttggaggatttatatgtatgaaaaaaagaaaatgttttgaatatcgataaaatgttagaaatttaaataattatttatataatttttgtagtaattgtattgtgtttaattattaagattttatagtgaagaatttgaaattcgaagatgaaaataaagttttattgttagtaagtgaaggagatagttgtttttatgaattgaagtattttttaaatatttggaattatgaagtgaaaggaaagaagattggtaaatgaaagagaatgattattttaggatatgtatgtataatttttttattttttttattattttatttttaaaatttgttaattgaagtttataaagagtaagagggaaaaggtaagttttaataatataaaaagtatagagaaaatgtaaattgttttaagaaaaagtataaggtgttatataaaatattgtttgttgtgtttttttttttatattttaagattataattattttattttttatggggtaatttaatagtaggtttagtgaggtatatgagtagtgttttatatgtaatagttttgtttttttttgtatataaaattagttaaattaagttaaaaatatgtttaaaattatatggattaaataaagggattggttttataatttgtaatgaatattttttttttttgttttttaggttttatggtatttagtataattagcgagagatagatagatggatgatagatagatagatagatagatagatagatagatagatagatagatagatgattgattgatatatgatatatagaatggttagatgtatatatataaatatatatttatgtattaagtatatatatatttgatatatatggataattggtattgttgttattgaataataatattttttaattgtatttattaatataatttgagaggttatttttataatttggataattggatatagttttataattggattagattgtttgatatagatgattttttgagaggttattattttattttttggaataagaatttttatagagatattggtgagtttgtattgtagatttttttttttgaaaaaaatttaaaagtttaagtgtgtagggttaagagttataaaattattaggttgtggttaataaattatttttgtaatatttagatattaggtttagttaatatttttttttattaggagtattaatagtgtaatttgtgatttaaaagaaagtgaattttttgagttagtgattattatttaattgtttgaaggattttttttagataggtggtttggaaattttttatttattattttttatttttgaattattttaattttttgttttttggatattttggagaaaatgaattaatataatatagtttttagtttttagagtattttttttatatagaatattgttttatttgattttttcgatgattttaataataggaaaggtaggtttttttatttttatttataagacgtatagatttaggattatttagttataggaagtaggattttagattttaagtttagtattttaacgtgataattttggtaattttgtatgaacggattggatagtaaagtggaattattattgagaattgtaatgaataaaattttttgtattttttgtttacgttttatagagggtgatatttttttgaggtaattaaatttatattacggttataatattgaaacgttttgattaataaagttatgtttttgtatttatatagtagataattgtagaaacggtttttttttttttttgtaaaattgtttgaaaatagtttttttttgttgttcgtcgaggtatatttttattaacgttaaaatagagttgagggagatcgtatttttgtttttttttcgttttgtagaggggttttagttgtttagagtaacggattattaggtaggtggttgtttttttttttttttagggttttttttttttttttgagattgttttttttttatttttgagtataggagtcgggcgggttttttgttttttgttttggatagtattgtttggatggtcgttgttcggtagttgttttttgtttatttaaaaagatgtttttacgatttagtagtaattagacggtttttacggattattgcggttaaattttcgttattttcgttgtgggaattaggtttttttcgtagaaaattttaggaatttagagaaaattttttaagtttttagtttttatagagaaaattaggagatattttttttaaatttcgttgtgaatataggtatagtagttattggggttgtaaagtgatgagtgcgtttttttcgtcgtaaatatagggtaataaatagtatgtattaaagacgttattaggaagagatagttttttaagttacgagcggggagaaatgtttgtttcgggaaaatttgtttggggaataaaatttgttagattgttgtacgggtgagttcggtgagaaggaagaaattcggattggaggaggtgaggtcgagagttaggtttaggtgtaggagttagatgcgtggacgtcggtgcgtggattggaggtttttaggtatcgcgtttagcgtgtttgttgaagttaaatgtatggttaaggaggttagcgaggaaggttagtgagggaagtttgtggaaacggttacgagtttagaaaaggtatgattcgtttagttgtttaagtttttggaagggaaaagcgggaaagcgttacgattttatttattgtgaggaggaatttgcgagttttttagttttattttttttatagtgatgtagaggataaatatcgacgtagggagaggaaaaaataaaattttagggagcggggagtaggtaattagtagtttttcggtaatagggcgggagggagcgcgttttaaggaaataagtatcgtataaatatttgagttgggaatttagtgttttcggaagttcggagtttattttttcgatttcgtcgaagttgaaaaaaggtagagtagggagaggggttagtttattttgttgagagttgtttagtgggtaggcgggacgttgtttcgggagacgtttattggagggatcgtagagttcggtaagttgcgagcgcgttaaagattttgcgtttcggacgaggagtttaagtttttcgagacggggagggagcggttcgcgagggttggagtttcgaagagggtcgagtaggagttgtatggatagtatgcgttttttcgtcggtttcgacgcggggttttcgggtaattttagtttatggtggtttttggttatcggcgttggtaatataagtcgggaggtcgaagttttcggggagggtaacggtttatcgagggacgtgcgtaacgaggagttggttaaattggagatcgtcgtgttggcggtgattttcgcggtggtcgtgttgggtaatagtagcgtattgttggttttgtatcggacgtcgcgtaagacgtttcgtatgtatttttttattcgatattttagtttggtcgatttggtcgtggtatttttttaggtgttgtcgtaaatgtgttgggatattatttatcgttttcgcggtttcgattggttgtgtcgcgtggtgaagtatttgtaggtgttcggtatgtttgcgtcggtttatatgttggtagttatgatagtcgatcgttatatcgcggtgtgttattcgtttaagattttgtaatagttcgcgcgtcgttcgcgttttatgatcgcggtcgtttgggtgttgagtttcgtgttgagtacgtcgtagtatttcgttttttttatgatcgaggtgaataatgttattaaggttcgcgattgttgggttatttttatttagttttggggttttcgtgtttacgtgatttggatgacgggcggtatttttgtggcgttcgtggttattttgggtatttgttacggttttatttgttataatatttggtgtaacgttcgcgggaagacggcgtcgcgttagagtaagggtgtagagtaagcgggtgtggttttttaaaaggggtttttgttcgtattttgtgttagtagcgtgaagtttatttttcgggttaagattcgtacggtgaagatgatttttgtgatcgtgacggtttatatcgtttgttgggcgtttttttttattatttagatgtggtttgtttgggattttatgttcgtttggatcggtacgtgtcgggaaaatagaggaaagtgtagggataggagtgtgtgtgtgtgtgtgtgtgtgtgtgtgagagagagagagagagagagagagagaaaaaaatgagaatttagtaattttttttatagtattttttagggtagtagtttttaaatttttatgtgtatataagagtcgtattttggaggaatattgtttaaaaaaaaaaaaagtatatttttggattttttatgtagatattttaattaagaatgtttggaatggggtttaggattttgtatttgtagtgtgtaatgattttaagattataattttagaaattgtgttttagagttagttaagtaattataaagtcgaagaatgatttttgttaaattattagttattgtattaatattattttaggtttattggatttagggaaatatttttattgttataattgttttttgttggattgtgaaaagtattataattaattttaaaaatgtgtagaaatgttttaggggtaaggatagaaatagatatatatttttaaagaaagttggagaaaaattttttagaaggtgagtaattttaatttggtatttagttaataatgtttttttttcgttataatttatttttttttaataatgattaatagtttttttttggtattttaaagtagaattattgataaattaaatttattagattaatttattagttttttattatttatttgattatacggttttatatttttttatttaatttttatagtagtttattggaaatgttttttgtatttattattgtgtttgattttaatttttttttaaattagaaaaattaattttatagtgatttgtaaaaaaaattatttaattttgtattttgaaaatatttttttttagtaaagataaaaatttaaattaaataaattttagtgtttgtcggaatttaaattaaataaatttaatggtatagttgttattagaatgtttttggtaataggaaataggtatttgggagtagttgttttttttttgttttttggaattggagtaggggaggtatgtaatatgttttggaagttatatttgtaaataaaatattttagtatgaatttaatttaaatatttttattgattataatattagcgataatgaaaaatataatataaatattttatttttggtttgttattttttattttgtttgattttagaagtttttttatattgtttattaaataaagaaatttagtttaattattgttttagtagaatttatatttaagtaataaaaattttaattgtgtatagatatgttggtaatttttattttttgtgaatattattttatttatggtttttgattatttttgatagtagtattttagtattaagtatgattaaataataatttgtaattgttttttggtataataagagtgagaagatttaagtttatatttaataattaaggaaaagttagtgtttattgattatttttatttttagaaaaggtatattattagtattgtagttttattgtgaaaggttataatatttatgtagtttattagtgttaattattataaaatattttagaattttgttggaattttttaattttattgttttttttaatataatttgtttgaattataattatagatggttttttaaatttttaattaaagaaaaataattaaagtttatattatttagggattttttttgtatggtttttatattataagaatatttaaaattattaaatttgatttttaatgtaatatttttttttgagttattaggataaatataatttggtatatatggttatttaaaattattttaaaattttattataattgtagttattttgtaattgttgtgttattagtatatgttagttcgagtatagaagatagagattttttaaattaattatttaatagttttaatttcgtaaaatttttatttaattttatttaaatattttgatagtgttttaaaaatatttgaattaattttaaggtattttgtttataaaaatattttatagttaagtaatttttaaatattttttatttttttgattgataaataaaatagtttattttttatgataatttagaagtttatgtttttttaattagttaatagaaaaatgagtttatttatggtttatttatattatatgatttttttttatattttttatgtaga

SEQ ID NO: 176 - DNA, 8246 bp, Artificial Sequence
  chemically treated genomic DNA (Homo sapiens)
tttgtatgaaaaatataaagggaaattatgtaatgtaagtgaattatggataaatttatttttttattaattaattaagaaggtataaatttttggattattatagaaaatgaattattttgtttattaattagggaaatggggagtgtttgaaaattgtttgattataaaatatttttgtaagtaagatgttttaaaattaatttaagtatttttaaaatattattaaaatatttaaatagaattgagtgggaattttacgaggttaagattattaagtaattgatttaaaaaatttttattttttatattcgaattagtatgtgttaatgatatagtagttatagaatggttataattgtaatgaaattttaagataattttaaataattatgtatattaaattgtatttattttaataatttaggaaaaaatattgtattagggattaagtttagtagttttaaatatttttataatatgaaaattatatagaagaagtttttggatgatataagttttagttgtttttttttggttagaaatttggaaaattatttgtggttgtggtttaaataaattatattaagaagaatagtagaattaggaaattttaataggattttaaaatattttatgataattagtattggtaaattgtataaatattataattttttatagtggagttatagtgttgataatatattttttttaaaaataagaataattaataaatattgatttttttttgattattaaatataaatttggatttttttatttttgttatgttagaaaataattataggttattatttaattatatttagtgttaagatgttgttattaaaggtgattaggagttatgggtaagatggtatttataaagaatgaaaattattaatatatttatgtataattgaagtttttattatttgagtgtaaattttgttaaagtaataattagattgaatttttttatttgatggataatatgaagaggtttttaagattaagtaagataagaaatagtaaattaaaaataaagtgtttatattgtattttttattatcgttagtattatagttagtaagaatatttaagttaaatttatattgaaatgttttatttgtaaatataatttttaaagtatattatatattttttttattttaattttaaaaagtaaaaggagaatagttatttttagatatttattttttgttattagaaatattttggtaataattgtattattgaatttatttggtttgagtttcgataagtattggaatttatttagtttgagtttttgtttttattagaagaaaatatttttaagatgtaaaattaaataattttttttgtaagttattgtgaagttagtttttttagtttgggaaggaattaaaattaaatataatagtaggtgtagagaatatttttagtaaattattgtaagagttgggtggagagatgtagagtcgtgtggttaaatgagtggtgaaagattaatgaattagtttaatgaatttagtttattaataattttgttttgaaatattaagaaaaaattattaattattgttagaaaaaaatagattataacgagaaaggaatattattagttaaatgttaaattggaattatttattttttaaagaatttttttttagttttttttagaaatatatatttgtttttatttttgtttttgaggtatttttatatatttttaaaattaattgtaatattttttataatttaataaaaagtagttgtgatagtaaaaatatttttttgaatttaatagatttgaaatggtgttaatatagtagttagtgatttagtaaaagttatttttcggttttgtagttgtttggttgattttaggatatagtttttggaattgtggttttaggattattgtatattataaatgtagagttttgagttttattttagatatttttaattagaatgtttgtatggggaatttaggaatatgttttttttttttttaaatagtgtttttttaaggtgcgatttttatgtatatatagaagtttaaaaattattgttttagaagatattatgaagaaaattgttagatttttattttttttttttttttttttttttttttttttttatatatatatatatatatatatatatatttttatttttgtatttttttttattttttcggtacgtatcggtttagacggatatgggattttagatagattatatttggatgatgaagaaaggcgtttagtagacgatgtaagtcgttacgattataaaagttatttttatcgtgcggattttggttcgggaaatggattttacgttgttgatatagggtgcgagtaggaattttttttggaaggttatattcgtttgttttgtatttttgttttggcgcgacgtcgttttttcgcggacgttgtattagatgttgtagtagatgaagtcgtagtaggtatttaagatgattacgggcgttataaagatgtcgttcgttatttaggttacgtaggtacgagaattttagggttggatgaaggtggtttagtagtcgcgggttttggtgatattgtttatttcgattatggagaagacgaagtattgcggcgtgtttagtacgaagtttagtatttaggcggtcgcgattatgaggcgcgagcggcgcgcgggttgttgtagagttttgagcgggtggtatatcgcgatgtagcggtcggttgttatgattattagtatgtaggtcgacgtaaatatgtcgaatatttgtaggtgttttattacgcggtatagttagtcggggtcgcggaagcggtaggtgatgttttagtatatttgcggtagtatttggaagaatgttacggttaggtcggttaggttgaggtgtcggatgaagaggtgtatgcgggacgttttgcgcggcgttcggtgtagagttagtagtacgttgttgttgtttagtacggttatcgcgaaagttatcgttagtacggcgatttttagtttggttagtttttcgttgcgtacgtttttcggtgggtcgttgtttttttcgagggtttcggtttttcggtttgtgttgttagcgtcggtggttagaggttattatgggttggagttgttcgagggtttcgcgtcgggatcggcggagagacgtatgttgtttatgtagtttttattcggtttttttcggagttttagttttcgcgggtcgtttttttttcgtttcggaggatttgggtttttcgttcgaagcgtagggtttttggcgcgttcgtagtttgtcgggttttgcgatttttttagtgggcgtttttcggagtagcgtttcgtttgtttattgagtagtttttagtagggtgagttggtttttttttttgttttgtttttttttaatttcggcgaggtcgggaaggtgagtttcgagttttcggaagtattgggtttttaatttaagtatttatgcggtgtttgtttttttgggacgcgttttttttcgttttattgtcggaagattgttggttgtttatttttcgttttttggagttttatttttttttttttttacgtcggtgtttgttttttgtattattgtggagggggtggagttgggagattcgtagatttttttttatagtaggtgggatcgtggcgttttttcgttttttttttttaaaaatttggataattggacgagttatgttttttttgggttcgtagtcgtttttataagttttttttattagtttttttcgttagtttttttaattatgtatttgattttaataggtacgttaagcgcggtatttggaaatttttagtttacgtatcggcgtttacgtatttagtttttgtatttgaatttggttttcgattttattttttttagttcgggtttttttttttttatcgagtttattcgtgtagtagtttggtaaattttattttttaggtaaattttttcggggtaaatattttttttcgttcgtgatttaaagagttatttttttttagtaacgtttttgatgtatgttatttattattttatgtttgcgacgggaagaacgtatttattattttgtagttttagtggttgttgtgtttgtatttatagcggggtttggggggagtgttttttggttttttttatggagattagggatttaaggagttttttttagatttttggggttttttgcgggaaaagtttgatttttatagcggggatggcggaaatttggtcgtagtggttcgtggggatcgtttggttattattgagtcgtggggatatttttttgggtggataaagagtagttgtcggatagcggttatttaggtagtgttgtttagggtaagggatagaaaattcgttcggtttttgtgtttaggagtaagaaagaggtaattttaaagagaggaaagaggttttgggaaggaggggaaataattatttatttagtaattcgttattttgaatagttggagtttttttgtagggcgggagggaggtagaaatgcgattttttttagttttgttttaacgttggtgaagatatgtttcgacggatagtaagggggagttgtttttaggtaattttataaggaagaaaggaagtcgtttttgtagttatttgttgtgtagatgtaggagtatgattttgttggttagaacgttttagtattgtggtcgtggtataaatttaattgttttagaaaaatattattttttgtgaaacgtaggtaaaaaatgtaaaagattttatttattgtagtttttagtaataattttattttattatttagttcgtttatgtagagttattaaggttgttacgttgagatgttggatttgaaatttggagttttgttttttgtggttagataattttgggtttgtgcgttttataaatggaaatgaaaggatttgttttttttgttgttgaggttatcgggaagattaagtaagataatgttttgtatgggggaaatgttttaaaaattgaaagttgtgttgtgttggtttattttttttaagatatttaggaggtagaagattgaaatggtttagggatggaaggtaataggtaaaaggtttttagattatttgtttggaaaaaattttttaagtaattaggtaatagttattgatttagagaatttatttttttttaagttataaattatattattagtgtttttgatgagaaagaatgttgattgaatttagtgtttgggtattgtaaaagtggtttgttggttatagtttagtaattttgtggtttttggttttatatatttgagtttttaggttttttttaggagaggaaatttgtaatataggtttattaatatttttgtggaggtttttattttaggagatagggtggtggttttttaggaaattatttgtgttagataatttgatttaattataaaattatatttaattatttaaattataaaaataattttttaagttatgttggtggatatagttggaagatattattgtttagtgataatagtattaattatttatatatattaaatgtatatatgtttgatatatagatgtatgtttatatgtatgtatttggttattttatgtattatgtgttaattaattatttatttatttgtttatttatttatttatttatttatttatttatttattatttatttatttgtttttcgttggttgtgttggatgttatggggtttggaaagtaggaaaaaaaaatgtttattgtagattgtagaattagtttttttgtttaatttatatagttttaaatatgtttttgatttaatttaattggttttatatataaaggaaagtaggattattatatatgaggtattatttatatgttttattggatttgttattaaattattttatagagagtaaaataattgtggttttaaaatatgaaaaagaaaatataatagataatattttatgtggtattttgtgtttttttttagagtaatttatattttttttgtattttttgtattattaagatttatttttttttttttattttttgtagattttagttaataaattttaggggtgaaataatgaaaaaaataaggaagttgtgtatatatattttggaataattatttttttttatttattaattttttttttttttattttataattttagatatttgagaagtattttagtttatggaagtagttattttttttatttattagtagtaagattttgtttttattttcgagttttaaattttttattgtaaaattttggtgattaaatataatgtagttgttgtaaagattatataaatggttgtttaaatttttggtattttatcggtgtttaaaatatttttttttttttatatatgtaaattttttaaattattagttattttattattaatatttttttttttaattaaagtaaaatatttttaatttatatatgtgtaatgagaagagttttatggttaaatatgttggagaagtgttgtgtatgtattttatttttttttggtgatttatatataaaaaggatttgagaaattttagaaaagaaatttatttaattttgtttattaatgttttttaaggttattttattatggaaattttttatttttttattttttttatggaatggtgatgaatatgttataagataaggtgatagagtaggagtattattattttgttattttaaagtttattttgattaaaaattatttaaatttaaagggtattagtttaatggttaaggttagaatgattatgagttataaataatattttttattagaaatattttaaatttttttttgattagagatatattagttttaagataattttttttttaattagatatattttaattttgtaattgattttttcgttatatagaaatattttacgtcggtgataagtttttttatttttaaattaattaatatttttagtttgtaatagagaatgtttttgattgaaattggttagaagttttttttaggtttattttttaaaataaatttgtttttgaatgttgagttattttttgtgtttttttgtatatttgattgttttttttgttttattgtttaagtaaaaatgtagatttattgagttagattaaggtataagtgattatttttttattttttttatatgtaagttatttatttagtgaaagattaaagatttaaaagaatataattatttgttttttatttatttatgatttgaaatttttcgtttcgagttgttttatatttttagattgaattaatgtatattttatttatattaattgatgttttatgtttttttaaaatgtataaaattaagttgtattttgattattttggggatatgttattaggattttgttcggttgtgttatgggagtgtttttaattttggtaaaaataaattttttaaattgattgagatttgttttagatattttgggtttataaagattaggaaattttgtaggatttgtattggttattatatatttttggttttttttttggtaaattaagtatagggtaattatagtaggagtagtaataataatgatattagtgataataataatagataatatgaatatttattgatatttgttatttatataataggtaaagttaatggtatagcgtatgatagtttaatgattataatattaagaaggatttagtaagattttatgtaataagtaaggaggatattagggagagtttttaaagtagtgttttttttaataatgttgaaaatagggtttttattgggttagttagtttagttattgtatgtagaggtggaataaaggtagtatagatgtagattatgtttttaaatattggtatgtttagaaaatgataaataagttttttttcgggtggagtttttagtatgataatgaggagagtttgttaaagtttatttttagttaggtatttttgtatatgattagttttttgttttgttggggttgagtttttttttggaattttttgagataatacgaatttaagttgttgttatgaatgggtatttttttataatgtatatttaaaaatttaggagttttgggttatatattgattaagtttttattttatgagtaaagtgttttatatttattattttatataatttttaaaataatatttattataaattgtat

SEQ ID NO: 177 - DNA, 5621 bp, Artificial Sequence
  chemically treated genomic DNA (Homo sapiens)
gttaatatgatgaaattttgtttttattaaaaatataaaaattggtcgggtgtggtggtttatgtttgtaattttagtattttgggaggtcgaggtaggtggattatttgaggtcgggaattcgagattagtttgattaatatgaagaaatttcgtttttattaaaagtataaaattagttgggtatggtggcgtttgtttgtaattttagttatttgggaggttgaggtaagagaattttttgaatttgggaggcgaaggttgtagtgagttaagatttcgttattgtattgtagtttgggtaataagagtgaaatttcgatttaaaaaaaaaaagaaaaaaaagaaaaaaatttaatatttatttgtgataaaagtttttagtatatcgggtgatagagtgagagattatgttttttttttattaaaaaaaatataaaaaaaaaaaagaagttatataaaatattatgtatttttttatttatttatttatttttattattatttttttttgagacggagttttgttgtgttatttaggttggagtgtaatggtaagatttcggtttattgaaattttcgtttttcgggtttaagcgattttttagttttagtttttgagtagttgggattataggtttgcgttattacgttcggttaatttttgaaaatattatatattttatgattttatttatataaaattttagaaaaggaaaatttatagtgatagattagtggttgttaggtttttaggtaggggaagaagtttgattgtaaaaggttacgagggaattttttggaatgtcgaaaatatttattttatgttatgattgtggttgtggttatacgattgtatatatttgttaaattttattgaatagtataattataattaatgaattttattgtatgttaattatattttaataaagtcgaaaaaaaaaaaagttattttggaggagagaaattattgtttgcggagggttattttagggtggtgagtgtatgagtattgaagatattcggagtagttgttgtaataatttgggggaggaacgtgtaggtagagagagtaagaggaagttagattgggaaatttcgaggtagttatttaaatagtttattaatagtaattgtagtcggtcgtttttggggaggaaagcgggaggggttattgtttttaaaaaagaaaaaaaaaaaaaatttttgtagttttgttagggagtcgttttttgtttgatttttatatgatgatttggaggttatttatgggtacggtttttaagtttttaacgtttattttttttttatttttcgttttttattttagtatttgttggagattttggtttttttttttatttcgcgaggtttttaatttatttagttttatgggttgttttttcgtagttataaataggttttgtttagtttttttagttattatttatttaggtgaatggatataattagatgattattcgtaggttgtttttttgttattattggtatacgtatatatttttatatacgtatatatttttatatacgtatatatttttatatacgcgtatatttttatatataatttttttaacgttatatatatatatattatatatttttatatataattatttacgttatatatatattatatatttttatatgtatatttttatatattatatattatatatattttatatatacgtttatttttatatacgtatatttttatatatatttttatatatttttatatttttatatacgtatatttttatatatatttttatatttatataagtatatttgagtttttattaaatttgtttttgttttttttaattttattttttaattcgttgtttttttttattttttgggttttaggtattttttttcgggttatagtttttgtgagggtcgtttttgttgataggtatttggtttcgttttttttattgtttataggttttattatttgtatatgtattttttttatataatcgggggttttttttttttcgtttttggttgttttttttttgttttttattttttataaattttttagggttttttaaatgttttttttatttgtttgttttttttagtttcgttgtttagtgttaagtgggtcgtattattttttttttgggtgataggtatagtttttattagtttttttgtttttatttttttttgtagaagtttatgtgtttttggggtagagtttaggtttttttatttttgtagttatagtgttaggttagcggtatttgtagtttggtgaatggaaggttttgattatggggaatcggtagatagagagggataaatagtgtttttttaatttgttttttgtttttttttgtttagatattaggttggaagattaggagttatattttggtatttatagagttttttttgtaagttttagagggattagtgggaggtgtgtatataggggttgcgttggtaggagtgggggtttggtatatttttaggtagatgttttgttcgttaacgtttaagggtaggggtttgagtgatttatgtgggtttagcgtgaattagtatagtttgtttttttttttatgggagttgttgtttagttttattttttttggttttcgaggggtggttgtttagggttttttttttggtatagttttatgtagtgtttgtttatgtggtttttagttttttttcggggttttggttgagtagaatggtattggattttgatttggttttttgtattttagaggagatcgttatgcgggttttttttttagatttttttttagtttaataataggaagcgaggagtttaggggggtagagattgttacgggtttggttatattgttaggggaggttttaatttgttgttgagattcggtattgtatagtttcgtttaggtagagaaattgataaggagatggttgtttgtttattttaaaaggttagtatggatttttcgttttagtcggttttagacggagggaataaaggtttttttaaggttttgttagtttttatttttgtttattttattatcgtagttttttttaattattaagttttattgtatagaaggggaagttgaggtgttaagagttggcgtggtttgtttaaggttatattattgggtaggggttaagtaggggttggagttttgtttttttattttttagttagggtttttaaattttttgttagttgagggaagttattttttattttattgatttgggtggtattaggaaggttttttttatgtttttagattagtgatagtatgcggttattggggatagtatgaggatgtgtatgcgttgaggagatgtagttgaagcgttaggtttggggtgttagtattttgtagtttgtttttaaggggttttgtaaaaatatggtaaagatgcggggtgtgatgtgtatttgtgtgtgttgcgggtgtgtgcgtgtgtggtgttggttgtgcgtatgtggtgtgtatggttgtgtggtgggtatatgtgtgggtgtgtggcgtatgggagtgtgtgatgtgtgtatgtgtgtggtgtgtaatatatgtgtgtatggtgtggtgtgtgtgtggtgtggcgtatgggtgtgtggtgggtgtatgtgtgtgtggcgtgtggttgtgtgtatgtatgtatgtggtgtggtgtgtgcgttgtttttggaaaatgtttattttgtgtttttattattttaatagggtcgggaggggttagggtgttgttaggttttttgggtaggaagaggaggttttggtcgcgggtcggatttgggtttggttcgtgaggttgttttggtttttggttttataggtaatagagaagatagataaataggaagaaagtagttgttttgggttgggttgggttgggttggtttcggttgagttaagttaggtttgggtgcggggggagtggaaagagaattattgggatgggggttggagggggtgtggggataggggaaggagagaggtgttgggggagggaggaggagggtttaggtatagggaaggtgcgtttatatttatggtatgtttaagaatatgagcgagcgtttttgtgttgtgtgtttgtggttgtgtggttgtattatgtgaggttgtgtgtggtgggagggagttcgtgagtatacggaggtttttagtttttttttttaggataggtagttgtaggtggggtaggaggaagagggtgggggtgtttttggattttataggggttcgtgaagtttggtttggtttttgttttattttttttttttttgtttttcgttttcggttaattgggttttaattggggaggaggaggggtttgcgtgggtttgggaggggtttagcgaaagtgtttttattttttttttgtttgggtttagcgaggagtaggaggattttaatttgggaagggggcgtgaagtttttatgaaaaagtagcgtagttttgggttagatttatcgttttttggttttagtttttttatttataaaatgggaatgttgaattaagtgattttttagagtattgttaatttagataatttaattaggggggcgtggtagggtgagggtgggcgtggaggttatggtagtgggaggagggagttttgggtcgggattagggaggttttggggaaaggaagggaaataggaggttaggggaggtttgggggaaagggggagggggaggaagtttttttttggttaggttatttttagaggttgggttgggttagggtagggtagtcgatggagagtagatttgagtatttagttatttttacgttatcgtttagttgtttaggagtttagttaggtaaggggttgcgtttgtttgtttttttgtttagtttttagttttcggatggtggtttttttcggtttcggttggggtaggggagttttgcgtgtttgtttggggtgtttatttttaaattcgggatttatgggttgtttgggggattttgggttttgtgtattcgtttgtttgattattttttttaattttttttgtttaggattggttatattgttatcgatacgtgtatatacgttaataggtatttgttatgttggtatttttataagggttttagtttagagattttgggttattgaatttgttttttaggtagaggttgagttcgtatattatttttaggtttttagaatatttgttttagttttattatgtttatggcgtttattattttcggtaaggtttgtttttttatgagttcggtgggtagagtgggtttgacgatttagggaagtttttttttttaaagattttttttatttttatttttgggtgtgtttttttaggttgttaatgagtggggaggggagtatagttttattttttcgttagggttggggttggggttggggttggggttgtttttttttttggattgtatgagtttggggtgtgtattttttataatatggtttttttggagttttttttgttaggagttaggaagtgggtgttcggatgggggtacgggaggtaggtttgagtttttttgtatagtattttttttaattaggtttttttttcgatttttttttagt

SEQ ID NO: 178 - DNA, 5621 bp, Artificial Sequence
  chemically treated genomic DNA (Homo sapiens)
gttgggaaggagtcgggaagagggtttggttagagagggtgttgtgtagggggatttaggtttgtttttcgtgtttttattcggatatttattttttggtttttagtagaggggattttaggaaagttatgttatgagggatatatattttaggtttatgtagtttagaaggaagggtagttttagttttagttttagttttagttttggcggggaagtggggttgtgtttttttttttatttattggtagtttggagagatatatttagaggtgagggtgaaggaggtttttagaaagaggggtttttttgaatcgttaaatttattttgtttatcggatttatggaggggtaagttttatcggaagtggtggacgttatgagtatggtggggttggggtaggtgttttgagggtttggaggtgatgtgcggatttagtttttgtttgaggagtaagtttaatggtttagggtttttggattggagtttttatagagatgttagtatggtagatgtttgttggcgtgtgtgtacgtgtcggtggtagtatggttagttttgggtagggaagattgagagggatggttagatagacggatgtatagaatttaggattttttaggtagtttatgagtttcgggtttgggagtgggtattttagatagatacgtagaatttttttgttttaatcgaggtcgagagaggttattattcgagggttggggattgggtaggggggtaggtaggcgtagttttttatttggttgggtttttgggtagttgggcggtggcgtgaaggtggttgggtgtttagatttgttttttatcggttgttttgttttggtttagtttagtttttgggagtgatttggttaggaggggatttttttttttttttttttttttttaggttttttttggttttttgtttttttttttttttttagggtttttttggtttcggtttaggattttttttttttattgttatagtttttacgtttatttttattttattacgtttttttggttggattgtttgggttggtagtgttttgggaggttatttagtttagtatttttattttataagtggggaaattgaggttagagagcggtgggtttggtttaggattgcgttgtttttttatgggagttttacgttttttttttaagttggggtttttttgtttttcgttgggtttaggtaaggaaggggtgaaaatattttcgttgggttttttttaggtttacgtaggtttttttttttttttagttagggtttagttggtcggagacgagggataggaaagggaggagtggggtaggggttaagttaggttttacgaatttttgtgagatttagggatatttttatttttttttttttgttttatttgtaattatttgttttaggaagaggggttggggattttcgtgtgtttacgggtttttttttattatatataattttatatgatatagttatatagttataaatatataatatagagacgttcgtttatgtttttgaatatattatgagtatggacgtattttttttgtatttgagtttttttttttttttttttaatattttttttttttttttgtttttatattttttttagtttttattttagtagttttttttttatttttttcgtatttaggtttggtttggtttagtcgaggttagtttagtttagtttagtttaaggtagttgttttttttttgtttgtttgttttttttgttgtttgtgaagttagagattaaaatagttttacggattaggtttaagttcggttcgcggttaaggttttttttttttgtttagagagtttggtagtattttggtttttttcggttttgttagggtggtgggaatatagggtgggtattttttagagatagcgtatatattatattatatatatatatgtatatagttatacgttatatatatatgtatttattatatatttatacgttatattatatatatattatattatgtatatatatattatatattatatatatgtatatattatatatttttatacgttatatatttatatatgtatttattatatagttatatatattatatacgtatagttaatattatatacgtatatattcgtagtatatataggtgtatattatatttcgtatttttgttatgtttttgtagagttttttgggggtaggttgtagagtgttggtattttaggtttgacgttttagttgtatttttttagcgtatgtatatttttatgttgtttttaataatcgtatgttgttattaatttaggagtatagaaaaggtttttttaatgttatttagattagtggaataggagatggttttttttaattggtagagaatttggggattttggttggggaataggaaagtaaggttttagtttttgtttggtttttgtttagtagtgtgattttgaataggttacgttagtttttggtattttagtttttttttttgtgtaatgggatttgatgattgagggagattacggtggtaagatgggtaggggtggggattggtagggttttgggaaagtttttgtttttttcgtttaaagtcggttagggcgaggaatttatgttaattttttggggtgagtagataattatttttttattagtttttttgtttgaacgaggttgtgtagtgtcggattttagtagtaggttgggattttttttagtaatgtggttaggttcgtggtaatttttgtttttttggatttttcgttttttgttgttaaattagggaagaatttggaggaagggttcgtatggcggttttttttgggatgtaagaagttagattaggatttagtgttattttgtttagttaggatttcggggaggaattgggagttatatgggtaggtattatatggaattgtgttaggagagaggttttgggtagttatttttcgggggttaagaaagatggggttgggtagtagtttttatgggaagaagggtagattgtgttgatttacgttaggtttatatgagttatttaagtttttgtttttgggcgttaacgggtagggtatttatttgggggtgtgttaggtttttatttttgttagcgtagtttttgtgtgtatattttttattggtttttttaagatttgtagaaagggttttgtgagtgttaaggtgtggtttttgattttttagtttagtgtttgggtagaagaggataggaggtagattggggggatattgtttgtttttttttatttatcggttttttatgattagaattttttatttattaaattgtaagtgtcgttggtttagtattgtggttgtagagatggaaggatttgggttttgttttaggagtatatgggtttttgtagagaagagtggaggtagggaggttggtggaagttgtgtttgttatttaggagagaaatggtgcgatttatttaatattgggtagcggggttagagggagtaggtaggtggaaaaggtatttaaagggttttgaaggatttgtaaggggtggaagataaagaggaggtagttaaggacgaggagaaagaggttttcgattgtgtgggaggggtgtatgtgtagatggtggagtttgtgggtagtgggaaggacggagttaagtgtttgttaataggaacggtttttatagggattgtgattcgaaggagaatatttagagtttaggagatagggaggaataacgggttggaggatgggattgaaggggataaaaataaatttaataaaaatttaagtgtatttgtgtgaatgtgagggtgtgtgtgagggtgtgcgtgtgtgagggtgtgagagtgtgtgagggtgtgtgtgagagtgtgcgtatgtgagggtgggcgtgtgtgtggggtgtgtgtggtgtgtggtgtgtgagggtgtgtatgtgagggtgtgtggtgtgtgtgtggcgtgggtggttgtgtgtgagggtgtgtggtgtgtgtgtgtgtggcgttgggggggttgtgtgtgagggtgtgcgcgtgtgtgagggtgtgtgcgtgtgtgagggtgtgtgcgtgtgtgagggtgtgtgcgtgtgttaatgatgataggaagatagtttgcggatgattatttaattgtgtttatttatttaagtgaataataattgggaaagttggatagagtttgtttatagttgcggaaaggtagtttatggaattggatagattaagagtttcgcggagtggaagggagggttagggtttttagtaggtgttggggtgaggggcggggggtagaaggagggtgagcgttgagggtttgagggtcgtatttatagatggtttttaggttattatgtgagagttaggtaggaggcggttttttggtaaaattgtagagatttttttttttttttttttttaaaggtagtggtttttttcgtttttttttttagaggcggtcgattgtagttgttgttagtgggttgtttgggtaattgtttcggggttttttagtttgatttttttttgttttttttgtttgtacgttttttttttagattattgtagtagttgtttcgggtgtttttagtgtttatgtatttattattttggaatggtttttcgtaggtaatgattttttttttttagaatgatttttttttttttcggttttattgaggtatgattagtatatagtaaaatttattaattgtaattgtattgtttagtaagatttgataaatgtatatagtcgtgtaattataattataattatgatatagaataaatattttcgatattttagaaagttttttcgtggttttttgtagttaagtttttttttttatttgaaagtttagtaattattgatttattattatagattttttttttttagaattttatataaatagaattatagagtatgtagtatttttaaaaattagtcgggcgtggtggcgtaagtttgtaattttagttatttagaggttgaggttggagaatcgtttgaattcgggaggcggaggttttagtgagtcgagattttgttattgtattttagtttgggtgatatagtaagatttcgttttaaaaaaaaataataataaaaataaataaataaataaaagagtatatagtattttgtgtaattttttttttttttttatattttttttggtggggaggaggtatagttttttattttgttattcggtatattgaaagtttttattataagtgagtattgaattttttttttttttttttttttttttttgagtcggagttttatttttgttgtttaggttgtagtgtaatggcgagattttggtttattgtaattttcgttttttaggtttaagagatttttttgttttagttttttaagtagttgggattataggtaagcgttattatgtttagttaattttgtatttttagtagagacggggtttttttatgttggttaggttggtttcgaattttcgattttaggtgatttatttgtttcggttttttaaagtgttgggattataggtatgagttattatattcggttaatttttgtgtttttagtagagatagggttttattatgttaat

SEQ ID NO: 179 - DNA, 9015 bp, Artificial Sequence
  chemically treated genomic DNA (Homo sapiens)
ttttgaatgtttttggaagtgtgtgagttgagggagttgatagttttggatatttgtttttgttatatgttagggaattttagttgtatttagttttttttttagttatatgttttgttttttatttttttttagttttttttagtatttattttttgttttttttatttattatttcgggttttttggaggatagtaggatttagaagtagtagtagagatagtaggatagatattatttttattattgtgtttgtttggaaggttttgggtaggaggtataggtattattttgggttttggggttatgtttaggggaggtgaatttataggttaatgggagtattaggtcgggttttttttttgatagtaagaaagaagtatgtataagttaggttgggtagaggttgtgattagtgagtttatatataggatatgtaaatttagagttgagatagttgatttttggattgaggatttgtgtgtgtttggggcggaaggatgttagtgtgtgggaggtgtgtgtgatgggtggtaggtgtttgggatgtgtcgtttttttagtttattatgatattttttggggttatttgggtgttgttagattatattttatttttgttttttggaaaaatttttaatatgtttaagatacggatatgggtagattttcgttggggtgggatttttatttttttatattcgattttgttagagttgtttggaggatatttttatttttattttttttttttttttttaggtgtttgtggaattttagttttttatgatggaagtagaaatagtcgtattttttttttgtagtttttttggtaatagaacgagtaggtgtgtatagggtttatgtttagtaagtcgaagttattgttttggatattaggttaagtgttagggaaataaagaggagggtatagtggataatgttttttggtggttttggtaggggttgtaattgttagttttcggggtagtggggttgtagtagttgcggggggcgttttgagttttagtttttcgggatgttgtagatttcgtgttgtggtttttgttgttttttgttggtagtttttgtatatttattgggtcggttgtaggtgtgattttgattgttgggtttttttggaattttgagtttgggttttttattttttttgtggattttgagagttaattaataaatacgtttattttttgtttaaggttagaattgtattacgtttttaataataaatatttttggcggatatagagattggtataaggattgtttttaggtagtatttatttagggaaatggagggttgggaagttgaggttggttattgggttagattggggttgcgtagtgaaaatataagagttttgggggattttggtaggtttggtgtgtagtgataattttaatagttggttgaggtatttgttatggtagattggtgtagggattagttttatagggtcggagggttttttttttcgtgtgtagagacgagagagtgtagaaataaagatataagataaagagataaaagaaaagatagttgggtttcggggattattattattaagacgtggagatcggtagtggtttcgaatgtttggttgcgttgttatttattggatataaagtaaaaggggtagggtaaagagtgtgagttatttttaatgataggtaaggttacgtgggttatgtgtttattggatagggggtttttttttgtttggtagttaaggtagagagaaagaggaagagagagagatagtttatgttattatttttgtttattagagatttagtatttttattaatttgttattgttatttaaaaggtagagttaggtgtataggatggaatatgaaggcggattaggagcgtgattattgaagtatagtattatagggagacggttaggtttttggataattgcgggcgggtttgattgatgttaggttttttataagaggtggaggagtagagttttttttaaatttttttaaggaaagggagattttttttttcggttagttaagtagcgggtgttttttttgatattgaggttatcgttagattatcgttcgttcggtaaggggcgtttttttagatattggcgttattgttagattaaggagtttttttggtggttttgtttgggtataatagaaggttcgtatttttgttttttggttattttttattatgtttttttagtttttatttttgtatggtttggttttttttaggttatgattatgtagcgaagattattataatattggaataaattataatattggaggattattataatattataatattggaataataaatttggaaaaaattaatgattaatgatattgatatataattatatttatgatttagatttagtataatttttgttgttttatatattttattatattggaataatttatgttttcggttttttggtttggtatttggatggtttgtcgtttatattttttttttttttattaattaggatcgttatcgttattattgtttgtcgttgatttcggatttgttttcggattttttggaggtatttgtaggttaaaaggagataacgtaagtatattaatattaataatgttagtgataataatgattttttaaggggtttgatttatttaaagggattaagattagataattgtttagttatgtttttaaaaatgtttgagttaggaatagtggataaatgagtttgtgaattttcgaaaatttgttttttaagttttgaaatatttaaggttaagttattattttaggtttttaaatgttttgagatatttttttagttatgttgatatttattataagtataaggtattatgtaataattagaagtattttaattattttgtaattgtatacggtgttttaaatttatattttttagttagattatattttggcggagattattaatttgattagttaatttttgattaatttgagtttgagaattttaaagtttggaggagtttttttgttatgttttaatttaatatattgaacggtttgaatagaattgtggatggtaattttagtagttgttgttgttgtagtaatcgtaattagttttgtaatgatggtaataagagtaaaaataaatttttttgtttttttgcggatatttttaagaattttattgattatgtgaatagagggggaagatttttatggacgatgtaaagaaattggtatttatattttttttttagtttttattaagagagtatttgtagtgggattaaaagtagtattaatgtacgtgaatagtttatagttattatattttatagtttgtgtattgggaatgataattatatttttaattaatagtatgtaagggggtttgatatagtttttgatgggtattattcgtttagatatgagggtgatgttgaatgtgggtgttttggtattagtgtgaaggagttgataggtagtgttttatatttttatttttgttatagttgtagttaatttttatagttgaggatgttttggggtaataaagggatgaattatttttggtttaggaggagtaatgtttgtatttatttatttaaataggtaaggggatatttattgttttagtttgtatgattgttatttattttttatataatttaataaataattaaattttgagtatgaggtatttttgttggagtaattttgttaataatgtttttttggagtttaattaataataatatttgcggttagattttggagtataacggttttaggagtattataattattttataaaattgaagttattataaaaggtttttttgtaggtttttttaattaaaagagaggttgggtatagttgtttatattagtaaatttagtattttgggagatcgaggcgggtagattacgaggttaggagtttaaaattagtttggttaatatggtgaaatttttgttttagttttttgagtgttgggattataggtatgtgttattacgcgtagttaatttttgtatttttttagtagagacgaggttttattatgttgtttaggttggtttcgagtatttgattttaatttgaggtgatttaattattttagttttttaaagtgttgggattataagtatgagttatcgtattcgggttttagttattttagaatagtatgttgttttgtattcggagggtttttttgtaaatagtttattaatattgagcgtgtttggaaagatttggtttttaaataattggtttcgtttgtgtaaaacgagttttgttgtatgtattaaaaattattttggttgggcgtggtggtttacgtttttaattttagtattttgggaggttcgttttgttgttagggaggttgtaaaaggaggatgcggttatttttgtttttattatggaaggttgggattttataggtatagaaaggaaggagggagagatgggaatgtgattgttttttagatatagtttttggtaggatcggatgtgggagagtgagggttttattttagttggggtttatttaggtttatgttttggatatgttgagagtttttttggaaggtagggatatagtgtggtttaaaaatatataaatgtttttattggtttaggggttgttataatagattggaagggtgatatattttaggcgtttgttatttattatacgtattttttatttattggtatttttttattttaggtatatataaagttttagtttagagattaattttggatttagttttgaatttgtatattttgtgtgtagatttattttttataatttttgtttagtttagtttgtgtattatttttttttttttattaggggaggagttcgttttggtatttttattggtttgtagatttattttttttgggtagggttttaggatttaggataatatttgtgttttttgtttagaattttttaagtagatataatggtaagaatggtgtttgttttgttgtttttgttgttgtttttgggttttgttgttttttaggagaattaagatggtgagtggggaaagtaagggatgggtgttggagaggattggaaggaggtgaggaataggatatgtggttgggagataggttggatgtagttgggatattttggtatacggtaggaatgggtgtttaaggttgttaatttttttagtttatatatttttaggagtatttagggagtttttgcgttggttcgaaataagatttttaggaatttgaatttaaaatttttagtttatagtgaaaataaagattttaaagattaagcgatttgtttggggtagatagttaggacggagtaggaattatatgtttggagttgtttttgtttttgtttttttttttttttcgatggttgggtatatttgtttgacgttgagggaaagagagagtagttttaaggggaaagtgggaaggtaggttggttggagggatggtgttagaaggaaattcgtgtttaaattttatatttagatattattgtagtgggtttggaaggcgagtggttggaagagaagagagtgggagtttcgggagattaagagttatttttaggataagggaaggaggttgtttgtggtatgagaatgtgtaggataaagatatggaagcgaatggttttttagttgtgtgagtttaaaatttatgatatttataaattgttagaaaaggtgttatatgtttgttatataataattattttggaatgttaatttgattttgtgttaaaatttgaattatttagggttttttagagaaatagaattaataggtggtatatatatatatatatatgtacgtatatatatatatatatattgtatatatatggatatatatatatataggaagagatttatatatatgtatataaaagagagagagagtagagatttattttaagaaattgatttatattattgggaggagtaataagttttaaatttttagagtcggttagtaggttggagatttagggaagagttgatgttttagttttgattttaagggtagattgtaggtagaatttttttttttttaggggatatttgaggtttttttttttaaggtttttaattgattggatgaagtttattattatggagagtaatttattttatttaaggtttattgatttttttgtaaattaaaaaaaaaattgtgggtgtatagtatgtgtatatatttatggggtatatgagaggttttgatttaggtatgtaatgtgaaataattatattattaaaaatgaggtatttatttttttaagtttttatcgtttgtgttatagataatttaattatatttttttggttattttagtttttaaaagtatttgattatttatttatttatttatttttgagatagagttttattttgttatttaggtaggagtgtagtggtatgatttcggtttattgtaattttcgttttttaggtttaagtaatttttttgttttagttttttgagtagttaggattataggtatttgttattatatttggttaatttttttgtatttttagtagagacgggttttattatgttggttaggttagttttgatattttgatttcgtgatttgttcgttttggttttttaaagtgtcgggattataggtgttagtaattgcgtttggttttttttttggttatttaaaagtgtataattaaattatgattattattattatttttgagatggatttttgttttgttatttaggttggagtgtagtggcgtgattttggtttattgtaaattttcgtttgttgggtttaagtaattattttgtttcgggtgtatattgttatatacggttaatttatgtatttttaatagagatagggttttattatgttggttagattggttttgattttttgattttaagtgatttatttattttagttttttagagtgttggaattataggtacgagttattatatttggttttagttaaattattattgattatagttattttgttgtgttattaaatagtaggttttatttatttttttttttttttttttttttgtgatagagttgtttaggttggaatgtagtggtgtaattttggtttattgtaatttttgtttttcgggtttaagcgatttttttgttttagttttttgagtcgttgggattataggtgtgtgttattacgttcggttaatttatgtatttttagtagagatggggttttattatgttggttaggttggtttcgaatttttgattttaagtgatttatttgttttagttttttaaagtgttggaattataggtatgagttattatatttggttttagttaaattattatttattggagttattttgttgtgttattaaatagttttttaattattttttttgtatttattaattatttttttaatttttttttaattttgttattattttttttagtttttggtaattatttttttattttttatgtttatgaatttaattgtagggtttattgatttaaaggttaattatatttagatatttaggagtaagaataattttagtaattgaattaggattttgttatatgatttttaatattattagtatttgtgtaaattgtattataaaataattatggaattattatggaaatgttttttttttttagattttattttgtattaaaatgtaaggtataatttcgggaattttgagttttattttagttttattttgtgttaatttagtttgggttattttttgaattttttggtaaatttttttttttattttttttaattatatgtatttgttaggttaagttagaagtgttaatttttttttttttgagatggagttttgttttgttatttaggttgaagtgtagtggtatgattttagtttattgtaagtttcgtttttcgggtttatgttatttttttgttttagttttttgagtagttgggattataggtattcgttattatgtttggttaattttttgaatttttagtagagacggggttttattatgttagttaggatggtttcgattttttgatttcgtgatttattcgtttcggttttttaaagtgttgggattataggcgtgagttattgagttcggacgaaatgttaatttgttttttttgagacggagttttattttgttatttaagttggagtgtagtggtatgattttggtttgttgtaatttttgtttttttggtttaagtgatttttttgttttagtttttagtatgattgggattataggttcgtattattatgtttagttaatttttgtattttttaatagagatggggttttattatgttggttaggttggtttttaatttttgattttaagtaatttgtttgttttggttttttaaagttttgggattataggtatgagttacggagtttagtttagaaatgttaatttttaacgtatgttagattttatgtatattgggtaaggttttatttttttatggggtgatttagggatttaggttaattgtatattgagatttttttatattattttgtggtttttaaagtcgttatttttagggatgagaaataaaagggataagttagttggtagggttttggataagaagaaagatattatttttgtttatatttttttttgataaaatttagttatatggttttaatatattttcgaggtggttgagtaatgttatttttttatgtgttaagtagaggaaataatgtagtgaagatataggatggtttttgaaatattattttaggtatgaaagtagagtatatttatttgagtgagtttttagtggtgtgaagttgatggtaggagaaagagttggggaagaaaaggttagtggtaggtttttttttttagttttatgtagttttatagtgggatttttgtatggattttaattattagaatttttttttttgtagg

SEQ ID NO: 180 - DNA, 9015 bp, Artificial Sequence
  chemically treated genomic DNA (Homo sapiens)
tttgtaaaagaaaagattttgatggttgaggtttatgtaagggttttattgtggggttgtatagggttaggaggggagatttgttattggtttttttttttttagtttttttttttgttattaattttatattattggaggtttatttaagtgaatatgttttatttttatgtttgagatgatattttagagattattttgtgtttttattatattattttttttgtttgatatataggaagataatattatttagttatttcgaagatatattgggattatgtgattgagttttgttaaaagagaatgtgagtagaagtgatgtttttttttttgtttaagattttattagttggtttgttttttttgttttttatttttagaggtgacgattttgaaggttataggataatatgaaagagttttaatatgtaattggtttggatttttgagttattttatggaggaatggaattttgtttagtgtgtatggaatttgatatgcgttagaaattaatatttttaggttgggtttcgtggtttatgtttgtaattttaggattttgggaggttaaggtaggtagattatttgagattaggagttgaagattagtttggttaatatggtgaaattttatttttattaaaaaatataaaaattagttgggtatggtggtgcgggtttgtaattttagttatgttggaggttgaggtaggaaaattatttgaattagagaggtagaggttgtaataagttaagattatgttattgtattttagtttggatgatagagtgagatttcgttttaaaaaaaataaattaatatttcgttcgggtttagtggtttacgtttgtaattttagtattttagggggtcgaggcgggtggattacgaggttaggagatcgagattattttggttaatatggtgaaatttcgtttttattaagaatttaaaaaattagttaagtatggtggcgggtgtttgtagttttagttatttaggaggttgaggtaggagaatggtatgaattcgggaggcggagtttgtagtgagttgagattatgttattgtattttagtttaggtgataaagtaaggttttattttaaaaaaaaaaaaattaatatttttagtttaatttgataaatatatatagttagaaagggtagaaaggagaatttattagaaaatttaagaaatgatttagattgaattagtatagggtaagattaggatggagtttagaattttcggggttgtattttgtattttggtataaggtgggatttgggagagagggatatttttataatagttttataattattttatgatataatttatataggtgttaatgatgttggaggttatatggtagaattttagtttaattattaaaattatttttgtttttgagtgtttaaatgtgattagtttttaaattagtagattttataattgaatttatggatatagagagtagaaggatggttattaaaggttgggaagggtagtggtagggttggggggaaattgggagggtggttaatgggtataaaaaaaatagttagaaaattatttgatagtataataaagtgattttagtgaataataatttaattggggttaggtgtggtggtttatgtttgtaattttaatattttgggaagttgaggtaggtgggttatttgaggttaggagttcgaaattagtttggttaatatggtgaaattttatttttattaaaaatatataaattagtcgggcgtggtggtatatatttgtagttttagcgatttagaaggttgaggtaggagaatcgtttaagttcgggaggtagaggttgtagtgagttaagattgtattattgtattttagtttgggtaattttgttataaaaaaaaaaaaaaaaagaagaatgaataagatttattatttgatagtataatagggtgattatagttaataataatttaattggggttaggtgtggtggttcgtgtttgtaattttagtattttgggaggttgaagtgagtggattatttgaggttaagaggttaagattagtttagttaatatggtgaaattttatttttattaaaaatatataagttagtcgtgtgtggtagtgtatattcgaggtaagataattgtttgaatttaataggcggaggtttgtagtaagttaagattacgttattgtattttagtttgggtgatagaataagaatttattttaaaaataataataataattataatttaattgtatatttttaaataattaaaagagaggttaggcgtagttgttgatatttgtaatttcggtattttgggagattaaggcgggtagattacgaggttaggatattaagattagtttggttaatatgatgaaattcgtttttattaaaaatataaaaaaattagttaggtgtggtggtaggtgtttgtagttttagttatttaggagattgaggtaggaaaattgtttgaatttgggaggcggaggttgtagtgagtcgagattatgttattgtatttttgtttgggtgatagagtgagattttgttttaaaaataaataaataaataaataattaaatatttttaaaaattaaaataattaaaaaagtataattggattgtttgtaatataaacgataaaagtttgaagggatggatattttatttttgatgatgtgattattttatattgtatgtttgaattaaaattttttatgtattttataaatatatatatatattatgtatttatagttttttttttaatttataaaaaaattagtagattttgagtaaagtggattattttttatagtggtgggttttatttaattagttgaaggttttaagagaaaaagttttagatgttttttaaagaggaaagaattttgtttatagtttgtttttggaattaagattaagatattaatttttttttgggtttttagtttgttggtcggttttgaagatttaggatttgttattttttttaatagtgtgagttaattttttaaaataaatttttatttttttttttttttgtatatatatatgtaaatttttttttatgtgtgtgtgtatttatgtgtatatagtgtatgtatgtatgtgtacgtatatatatatgtatatgtgtattatttattagttttgtttttttggagaattttgagtaatttagattttggtatagaattagattaatattttaaagtgattgttatataataaatatataatattttttttgataatttgtaaatgttatgaattttaaatttatataattgagaagttattcgtttttatgtttttattttgtatatttttatgttataaatagttttttttttttattttaggagtgatttttgatttttcggagtttttattttttttttttttagttattcgttttttagatttattgtagtggtgtttgagtgtgggatttgggtacgggtttttttttagtattatttttttagttaatttgtttttttattttttttttggggttgtttttttttttttttagcgttaggtaggtgtatttagttatcggaaggagggaaggaataggagtagaagtagttttaggtatatggtttttatttcgttttgattgtttattttaagtaggtcgtttggtttttggagtttttgtttttattgtaaattaggggttttagatttagatttttgaaggttttatttcgggttagcgtagaggttttttgaatgtttttggaagtgtgtgagttgagggagttgatagttttgggtatttatttttgtcgtatgttagggtattttagttgtatttagtttgttttttagttatatgttttgttttttatttttttttagttttttttagtatttattttttgttttttttatttattattttggtttttttgggggatagtaggatttagaagtagtagtagagatagtaggataggtattatttttattattgtgtttgtttggagggttttgggtaggaggtatagatattattttgggttttggggttttgtttaggggaggtgaatttataggttaatgggagtgttaggacgggttttttttttaatagagaaaaaaaaatgatatataagttaggttgggtagaggttatgaagaatgaatttatatataggatatgtaaatttagagttgagtttagagttgatttttggattgaggttttgtgtgtgtttggggtggaaggatgttagtgggtaggaggtgcgtgtgatgggtggtaagcgtttgggatgtgttatttttttagtttattgtgataatttttgggttagtaggggtatttgtgtgtttttggattatattgtatttttgttttttagaaaaatttttaatatgtttaagatatggatttgggtagattttagttggggtgggatttttatttttttatattcgattttgttagaggttgtgtttggaggatagttatatttttattttttttttttttttttttgtgtttgtggaattttagttttttatgatggaagtagaaatagtcgtattttttttttgtagtttttttggtaatagaacgagttttttaaaatgttgggattaaaggcgtgagttattacgtttagttaagataatttttaatgtatataataagattcgttttatatagacgaagttagttatttgaaaattaggtttttttaggtacgtttagtgttgatgggttatttgtagagagatttttcgaatataaagtaatatgttattttaaagtgattggggttcgggtgcggtgatttatgtttgtaattttagtattttgggaggttgaggtggttggattattttaggttgaggttaggtattcgagattagtttgggtaatatgatgaaatttcgtttttattgaaaaaatataagaattagttgcgcgtggtggtatatgtttataattttagtatttaggaagttgaggtaggggttttattatgttggttaagttggttttgaatttttgatttcgtgatttgttcgtttcggttttttaaagtgttgggtttattagtgtgagtaattgtgtttagttttttttttggttaaagaaatttataaagggattttttatagtgattttaattttatggaataattgtaatgtttttaaggtcgttgtgttttaaagtttagtcgtaggtattgttattgattgggttttaaaagggtattattggtaagattgttttagtaaaaatattttatgtttagagtttaattatttgttagattatgtagaggatggatggtagttatataggttgagataatgggtgtttttttatttatttaaatggatggatgtaggtattattttttttagattaaaaatgatttatttttttgttattttagaatatttttaattatgaaaattagttgtagttatgataggaataaggatatggaatattatttattaatttttttatattaatattaaaatatttatatttaatattatttttatatttgaacgggtgatatttattaggagttatgttaaatttttttatatgttgttggttggaaatataattattatttttaatatataaattatagaatgtgataattgtaagttgtttacgtgtattgatgttatttttaattttattataagtatttttttggtaagggttagggagggggtatggatattagtttttttatatcgtttatgggagttttttttttttatttatatagttaatgaagtttttaaaggtattcgtaaaagaataaagagatttatttttatttttattgttattattgtaggattaattgcggttattgtaatagtagtaattgttggagttgttatttataattttgtttaaatcgtttaatatgttgaattgaagtatggtagaaaaatttttttagattttggaatttttaggtttaaattgattaaaaattagttaattaaattaatgattttcgttaaagtgtaatttggttgggagatatgaatttggaatatcgtatgtaattatagagtgattggaatatttttgattattgtataatgttttatgtttataataaatattaatatagttgggaaaatgttttaagatatttaaaagtttgggatgataatttaattttggatattttaaaatttaaagagtaaattttcgaggatttataagtttatttatttattgtttttggtttagatatttttgaaggtataattaaataattatttgattttaatttttttaaatagattaaattttttggaggattattgttgttattggtattattaatattggtatgtttacgttgtttttttttagtttgtagatgtttttaaggagttcgaaaataaattcgaagttaacgataagtaatgatggcgatggcgattttagttaataaaaaggggggagatgtgggcggtaagttatttaggtgttaagttaagagatcgagggtatgagttgttttagtataataaaatatataaaataataagagttatattagatttagattatagatatgattatatattaatattattaattattagttttttttaaatttattattttaatattataatattataataattttttaatattataatttattttaatattataataattttcgttgtataattataatttaagaaaaattaggttatatagagataggagttgaggggatatagtgagaagtgattagaagataagagtgcgagttttttgttatgtttagatagggttattagaagggttttttggtttagtagtaacgttagtgtttgggaagacgttttttgtcgagcggacggtggtttagcggtagttttagtgttaaggaaaatattcgttatttagttgatcgggaaagggagtttttttttttttgggggagtttagagaagattttatttttttattttttgtggagggtttgatattagttaggttcgttcgtagttatttagaggtttaatcgtttttttgtgatgttgtgttttagtggttacgtttttagttcgtttttatgttttattttgtatatttggttttgttttttagataataatagtaaattagtgaaagtattaagtttttgataagtagaaataatggtataagttgtttttttttttttttttttttttttgttttggttgttaggtagggaagggttttttgtttagtggatatatgatttacgtgattttatttattattggagatgatttatattttttattttgttttttttgttttgtatttaataaataatagcgtagttagatattcggggttattatcggtttttacgttttggtggtagtggttttcggggtttagttgtttttttttttatttttttgttttgtgtttttatttttatattttttcgtttttgtatacggggagaaaaatttttcgattttgtggggttggtttttatattaatttattataatagatattttagttaattgttgaagttattattgtatattaggtttgttagaattttttaagatttttgtgtttttattgcgtagttttaatttggtttagtaattaattttagttttttagttttttatttttttgagtaaatattgtttggaaataatttttgtattaatttttgtattcgttaggagtatttgttattggaaacgtaatgtagttttgattttaagtagaaaataaacgtatttattggttagtttttagaatttatagaaaggatggagaatttaggtttagaattttagaggagtttaatagttaaaattatatttgtaatcggtttagtaaatatatagaagttgttagtagggggtagtagaggttatagtacgggatttataatatttcgggggattgaagtttaagacgtttttcgtagttattgtagttttattgtttcgggagttggtagttgtaatttttgttaagattattagaaaatattgtttattgtgtttttttttttgtttttttaatatttgatttgatatttaaggtagtagtttcgatttgttgagtataaattttgtgtatatttgttcgttttattgttagggaggttgtaaaaggaggatgcggttatttttgtttttattatggaaggttgggattttataggtatttaaaggaaagagggagagatgggaatgggaatgttttttagatagttttggtaggatcggatgtgggagagtgagggttttattttagcgggggtttatttatgttcgtgttttggatatgttgagagtttttttagaaggtagagatgaagtgtggtttgataatatttaagtgattttagagggtgttataatagattggaagggcgatatattttaggtatttgttatttattatatatattttttatatattggtattttttcgttttaggtatatataaatttttagtttagagattaattgttttagttttaaatttgtatattttgtgtgtagatttattgattataatttttgtttagtttggtttgtgtatattttttttttattgttaggggaggagttcggtttggtatttttattggtttgtagatttattttttttgggtatggttttaggatttaggataatatttgtgttttttgtttagaattttttaagtagatataatggtaagaatggtgtttgttttgttgtttttgttgttgtttttgggttttgttgttttttaggagattcgagatggtgagtggggaaagtaagggatgggtgttggagaggattggaaggaggtgaggaataggatatgtggttgggagaagggttggatgtagttgggattttttggtatatggtaggaataggtgtttaaggttgttaatttttttagtttatatatttttaggagtatttaggg

SEQ ID NO: 181 - DNA, 5384 bp, Artificial Sequence
  chemically treated genomic DNA (Homo sapiens)
gcggtggtttaggtttgtaattttagtattttgggaggtcgaggcgggcggattacgagggtaggagttcgagattagtttggataatatggtgaaatttcgtttttattaaaaatataaaaatttttagggtgtggtggtttatgtttgtaattttagttattcgggaggttgaggtaggagaatcgtttgaatttgggaagcggaggttgtagtgagtcgagatcgtgttattgtattttagtttgggtaataagagcgagattttgttttaaaataaataaataaataaataaataaagagtgatttttaggttgggtgtagtggtttaggtttataattttagtattttgggaggtagaggcgggaggattttttgaggttaggagttttagattagtttggttaatatggtgaaattttatttttattaaaaatataaaaattagtcggatatggtggtaggcgtttgtaattttagttagatgggaggttgaggtaggagaattgtttgaatttgggaggcggaggttgtagtgagtcgagatggtattattgttttttagtttgggcgatagaaggagattttattttaaaaaaaaaaaaaaaaataaataaatagtgattttagagggttggagttttgttagatattttagtttgtttataataggtattgttgttttcgggaagagggtcgtttgttataaatgcggaaatagttaaatggcgatgggaataggatgggaatttaatggtgttgttatttttggatggattcggaggtagtttagttttttgggataggattgtacggattgtttggggaggggtttttggtttttcggtttttgtaggggggttcggggaggttttgtgagtagttggttataggtgggttttattcgatgcgattttgtttttttttaatagttttggagaagggggacgttgtttgttgtggttgcggttgtttttttggtttgtgagaggcggggttagagtggtcgttgggaatttgggtgttgtaaggtgattataaatagttttttgggggaggaggaggaaaatgtaattgatttttaggagttttttgaggttaggagtgggagagtgtgtagggggatttttttggtagtttgggggtttaatagaagatttgggggagttttagggttttttttttttaggattattagtggtggagatggggtaggtttggttatggagggtacgttgtttggttgaggggtttgggtttgagtgtggggtttgggtttgagtgatgggagagtttcgagtaggtcggaggggttgagcgtattagacgttgtttaaaatttttatttaaaaatgattattattattattattattattttgagatggatttttgttttgtcgtttaggttggagtgtaatcgtgcgattttagtttattgtaattttttattttttgggtttaagtgattttttttttttagtttttcgagtagttgggattataggcgtttgttattacgacgggttaatttttgtatttttagtagaaagaggatttttttatgttggttaggttggtgttgattttttgattttagttgatttgttgttttagttttttaaagtattgggatgataggggagttacggagtttagtttttttttttttttttgggagacggagttgtattttgtcgtttaggttggagtgtagtggcgcgatttcggtttattgtaagttttatttttcgggtttacgttatttttttgttttagtttttcgagtagttgggatcgtaggcgtttaggattatgttcgggtaatttttttgtatttttagtagagacggtgttttatcgtgttagttaggatggttttgattttttgatttcgtgattcgttcgttttggttttttaaagtgttgggattataggcgtgagttatcgcgtttagttttttttttttttttttaatagagagagggttttattatgttgttaaggttggttttaaatttttgggtttaagtgatttttttatttcggttttttaaggtattgggattataggcgtgagttattacgttcggttttaaaaattttttagaatatgaattttattttatgtttagtattgttttgtttagaaggtagagtttatttttgttttagggtatattgacgtgtagatagcgagttcgttttgaggttatgcgattgggagggatagagttttcggttttcggtagaggggaaatggggtttggtttacgggagagttgaggtttacgtttggttaggatagggtggatggaggttggggttttcgtagggaagatggataggtaggattcggggtgggtagagagggagagttggtttggacggaggtagggatttgggggttgtgttatggattttgtgaggtggttgggttgtgaaatttagtggagatcggaattattattattattattatttttttgagatggagttttattgtttttcgggttggagtgtagtggtacgatttcggtttattgtaagtttcgttttttgggtttacgttatttttttgttttagttttttgagtagttgggattataggcgtttattattacgttcggttaattttttgtatttttagtagagatggggttttatcgtgttagttaggaaggttttgattttttgattttatgattcgttcgtttcggttttttaaagtgttgagattataggtgtgagttatcgttttcggtttggagattagatttgagttttgggattttatattttcgatgggtagcggattttaaggtatatcggtttcgtttttttggatttttttcgtattcgttttttggaggggtaaattgtttttagagggtttttataggtttagatataaattggtgtttttaagggtgtgggggatacggtaagttttagattttagttttattttggaaatgagtttttttgtaaaaaatggaggtgagtttggacgtagtagtttatatttgtgtttttagtattttgggaggtcgaggtaggtggattgtttgagtttaggagttttaaattagttcgagtaatatagtgagattttatttttataaaaaaatataaaaattagtcgggtatggtggtatgtgtttatggttttagttatttgggaggttgaggtaggaggattgttggaattcgggaatcggaggttgtagcgagttgagatcgtgttattgtattttattttgggtaatatagtgagattttatttttataaaatatataaaaattagtcgggtacggtggcgggtgtttgtggttttagttattcgggaggttgaggtaggaggattagttgaatttaggagattgaggttgtagtgagttgagatggtgtcgttgttttttagtttgggtaatagcgagattttaattttgaaaaaaataaaagaaggagatgaaatttatataatttaaaattagttattttgaacggtatagtgaagtggttttcggtgtatttatcgatttgtgtaattattattgttgtttagttttagaatattttattattttaaagaaggaagttttatttttatttattagttattattttttgttttttttcggtttttggtaattatagatttattttttgtttttgtagatttgtttgttttggatatttcgtttatttatttttatatagtttttaatttgtttttatttattttttttgagacggagtttttttgtgttatttaggttggagtgtagtggcgtaatttcggtttattgtaatttttattttttaggtttaagcgattattttgttttagttttttaagtagttgggattataggcgttcgttattacgtttagttaattttttttttttttttgaaatggagttttgtttttgtcgtttaggttggagtgtaatggtgcgatttcggttcgttgtaattttcgttttttaggtttaagtgatttttttgttttagttttttgagtagttgggattataggtatgtgttattacgtttagttaattttgtatttttagtagagatggggtttttttatgttggttaggttggttttgaacgtttaattttaggtgatttgtttgtttcggttttttagagtgttaggattataggtgtgagttatcgtatttagtttgttaattatattttaataaagttgttgaaaaagtttaaaaaaattatttaatcgggtatagtgttttatatttgtaattttagtattttgggaggtcgaggtgggtggattatttgaggtcgggagtttgagattagtttggttaatatagtgaaattttatttttattaaaaatataaaaaattagttaggcgtggtggtggataattgtaattttagttatttaggaggttgagataggagaattatttgagtttgggaggcggaggttgtagtgagtcgagattatattattgtattttagtttgggtaataagagcgaaatttcgttttaaaataataataataataataataataataattatttatatagacgcgtaggatttaacgtaggattgttagttttattgttttgagtttttcggtgttaggtttagcgggtagtgttggagttttagtggtttgggatggggagattgggattttgagttggtaatgtttttgggtgttggttgtatgttcgttatgtgttgggtttcgggatttattggtttttgatatttttatttgtttttgggggtgtggttattttttagagagggaaattgaggattagtgtagaatgtagggggagtttaggttggtttagggagtagttggcggtggaggttttgggtaatttttcgtgtttttattgagtggggttgtttttgggtttgggcggggacgttattaattgttaaggtttgtgtataagggtagtcgtcgttttagttatagatttgtttcgttatgattcggttgatagttttggttttgttggttggtttgttggcgttttcgagggtcggtgagtgtttttttgtgtcggtggttttttatttgtgttagggttcggttgttagggtagaatttagatttaaagtatagagaaggtaagcggtttggtttgggttatatagttagttcggtttggacgatttcgcgaaaggcgtgagggcggacggtgtgcgggatttaggggttttttgtttttttagggagtgggacgatgggggagggtgggttttttcgtagttttattgggtggatagagttgaggttgtagttttatacgttttttcggttattgtgtggatttttggggattttagagttgttttttttcgatttagg

SEQ ID NO: 182 - DNA, 5384 bp, Artificial Sequence
  chemically treated genomic DNA (Homo sapiens)
tttgggtcggggggagatagttttgagatttttaagaatttatatagtggtcgggagggcgtgtgaagttgtagttttagttttatttatttagtggggttgcggggggatttatttttttttatcgttttattttttaagaggatagggggtttttgagtttcgtatatcgttcgtttttacgtttttcgcgggatcgtttaggtcgggttggttgtgtgatttaggttaagtcgtttgttttttttgtgttttaagtttgagttttgttttggtagtcgggttttagtatagatgggggattatcggtatagagaggtatttatcggttttcgaggacgttagtagattagttagtagggttaggattgttagtcgggttatggcggggtaggtttgtggttaaggcggcggttgtttttatatataggttttggtagttggtggcgttttcgtttaggtttagggatagttttatttagtgggaatacgggaaattgtttaaggtttttatcgttaattgttttttgggttagtttgggttttttttatattttgtattgatttttagtttttttttttagaagatggttatatttttaggggtaggtgagggtgttaggaattagtggatttcggagtttagtatatggcgggtatgtagttagtatttaggaatattgttagtttagagttttagtttttttattttaagttattggggttttagtattgttcgttgggtttggtatcggggggtttagggtagtggagttggtagttttgcgttgagttttgcgcgtttgtatgggtgattattattattattattattattattattttgagacggagtttcgtttttgttgtttaggttggagtgtaatggtgtgatttcgatttattgtaattttcgttttttaggtttaagtgatttttttgttttagttttttgagtagttaggattatagttgtttattattacgtttggttaattttttgtatttttagtagagatggggttttattatattggttaggttggttttaaattttcgattttaggtgatttatttatttcggttttttaaaatgttgggattataggtgtgaaatattgtgttcgattgggtgatttttttaaatttttttaatagttttattgagatataattgataagttgggtgcggtggtttatatttgtaattttagtattttgggaggtcgaggtaggtagattatttgaggttgggcgtttaagattagtttgattaatatggagaaattttatttttattaaaaatataaaattaattgggcgtggtggtatatgtttgtaattttagttatttaggaggttgaggtaggagaattatttgaatttgggaggcggaggttgtagcgagtcgagatcgtattattgtattttagtttgggcgataagagtaaaattttattttaaaaaaaaaaaagaaattagttgggcgtggtggcgggcgtttatagttttagttatttgggaagttgagataggataatcgtttgaatttgggaggtggaggttgtagtgagtcgagattgcgttattgtattttagtttgggtgatatagagagatttcgttttaaaaaaaataaataaaaataaattaaaaattatataaaaataaatagacgaaatgtttagaataagtaaatttgtagaggtaggaagtggatttgtggttgttaggggtcgggggagggtagggggtgatggttgatggatggagatggggtttttttttttggggtgatggaatgttttgggattggatagtagtgatggttgtataagtcggtgaatgtatcgaaaattattttattgtatcgtttaaaatggttaattttaagttatgtaaattttattttttttttttgttttttttagagttgaggtttcgttgttgtttaggttggagggtagcggtattattttagtttattgtagttttaattttttgggtttaattgatttttttgttttagtttttcgagtagttgggattataggtattcgttatcgtgttcggttaatttttgtatattttgtagagatgggattttattatgttgtttagggtggagtgtagtggtacgattttagttcgttgtagttttcgattttcgggttttagtaatttttttgttttagttttttaggtagttgggattataggtatatgttattatgttcggttaatttttgtatttttttgtagaggtggagttttattatgttgttcgggttggtttgaaatttttaagtttaagtaatttatttgtttcggttttttaaagtgttgggagtataggtgtgagttattgcgtttaaatttatttttattttttataaaggggtttatttttaaggtgaaattgaggtttggagtttatcgtgttttttatatttttggggatattagtttgtgtttgggtttgtgggagttttttgagggtagtttgtttttttaaggggcggatacggggagagtttagggaggcggggtcggtgtgttttgaggttcgttgtttatcgggaatgtagggttttagggtttaaatttggtttttaggtcgggagcggtggtttatatttgtaattttagtattttgggaggtcgaggcgggcggattatgaggttaggagattaagatttttttggttaatacggtgaaattttatttttattaaagatataaaaaattagtcgggcgtggtggtgggcgtttgtagttttagttatttaggaggttgaggtaggagaatggcgtgaatttaggaggcggagtttgtagtgagtcgagatcgtgttattgtattttagttcgggagatagtgagattttattttaaaaaaataataataataataataatttcggtttttattgagttttatagtttagttattttatagggtttatggtatagtttttagatttttgttttcgtttaagttagttttttttttttgtttatttcggattttatttgtttattttttttgcggaggttttagtttttatttattttgttttggttaaacgtgggttttagttttttcgtgggttaggttttattttttttttgtcgggagtcggaagttttgttttttttagtcgtatgattttagggcgagttcgttgtttgtacgttagtgtgttttgagatagggatagattttgttttttagatagaatagtgttgagtatggagtggggtttatattttgaaaagtttttgaggtcgggcgtggtggtttacgtttgtaattttagtgttttgggaggtcgaggtgggaggattatttgagtttaggagtttgagattagttttggtaatatggtgagattttttttttattaaaaaaaaaaaaaaaaagttgggcgcggtggtttacgtttgtaattttagtattttgggaggttaagacgggcggattacgaggttaggagattaagattattttggttaatacggtgaaatatcgtttttattaaaaatataaaagaattattcgggtatagttttgggcgtttgcggttttagttattcgggaggttgaggtaggagaatggcgtgaattcgggaggtggagtttgtagtgagtcgagatcgcgttattgtattttagtttagacgatagagtgtaatttcgttttttaaaaaaaaaaaaaaaggttgggtttcgtggtttttttgttattttagtattttgggaggttgaggtagtagattagttgaggttaggagattaatattagtttgattaatatggggagattttttttttattaaaaatataaaaattagttcgtcgtggtggtaggcgtttataattttaattattcgggaggttgaggagggagaattatttgaatttaggaggtgggaggttgtagtgagttgaaatcgtacgattgtattttagtttgggcgatagagtaagagtttattttaaaataatagtaataataataataattatttttaaataaaagttttgagtagcgtttggtacgtttaattttttcggtttgttcggaatttttttattatttaagtttaggttttatatttaagtttaggttttttagttaagtaacgtgttttttatggttaggtttgttttatttttattattggtgattttagggggagaagattttgagatttttttagattttttgttggatttttaagttgttaggagggtttttttgtatatttttttatttttgattttagaaggtttttgaaaattaattgtattttttttttttttttttagagagttgtttgtggttattttgtaatatttagatttttaacggttattttggtttcgttttttataggttaggaaaatagtcgtagttatagtaggtaacgttttttttttttagggttgttggggaggaataggatcgtatcgaatgggatttatttgtgattaattgtttatagggttttttcgagtttttttgtaggaatcggggggttaaagatttttttttaggtagttcgtgtagttttgttttaggaagttgggttgttttcgagtttatttaaaggtagtaatattattgagtttttattttatttttatcgttatttaattgttttcgtatttatggtaggcgatttttttttcgggggtagtagtgtttgttatgagtaaattaaggtatttagtagggttttaattttttggagttattgtttgtttgtttttttttttttttttgagatagagtttttttttgtcgtttaggttggagggtaatggtgttatttcggtttattgtaattttcgttttttaggtttaagtaatttttttgttttagttttttatttggttgggattataggcgtttgttattatgttcggttaatttttatatttttagtagagatggggttttattatgttggttaggttggtttggaatttttggttttaagggattttttcgtttttgttttttaaagtgttgggattataggtttgagttattgtatttagtttggaagttattttttgtttgtttgtttgtttgtttgttttgagatagagtttcgtttttgttgtttaggttggagtgtagtggtacgatttcggtttattgtaattttcgttttttaggtttaagcgatttttttgttttagtttttcgagtagttgggattataggtatgagttattatattttaaaaatttttgtatttttagtagagacggggttttattatgttgtttaggttggtttcgaatttttgttttcgtgattcgttcgtttcgattttttaaagtgttgggattataggtttgagttatcgt

SEQ ID NO: 183 - DNA, 8889 bp, Artificial Sequence
  chemically treated genomic DNA (Homo sapiens)
tttggataagatttggaagaattttttggattattaggtagagatttttattgtttttttttatttttttttaggtaaagtttgtttttttgtgattagttgtttggagttgggggagaagtgatataaatatttttgtgattattattgggattgtgtagggttagacgtgaagttagtatagtattgggttttgtttaaggtttatggtaattatcgtttggttattatttatgtttatttaaggttttatggttttaaaattagtaggtggtaaagttagttaagtttatgtttttttttttagggtggtaagttttttttagtttggggtgaatttagagatgttttttaggaattggggtttagttagaaattttaggaatttatttggtattttattgtattgaggttgaattggtatttaagttataagataaagttttttttattttttttttttttttttataagttgaggagttttttgttatggttatttttattttaggtttgtggtgggtattgtttggttattgttgatgtatatttaaggtttaagggttttgtagtaagtttgtggtgaacgttgtttagtttgggatttattttttagggaagtaggtttttttttggtttagagtaggtttaggaatgttatttaagagttaaagtttggaattagggattttaagaggttatttggtattttaattttatagtggttaagttttttttattttttttatttttttttttaagtagaaggaatttttttttatagttattatagttgtaatgtgttgggttatattttaagtttgtacgtttttgagttttatttaaagtttatgatgagtattatttggttatttttgattatttagggttaaagggttttttagttagttggtgaggaattttgttaggattggtttttttttttaaggtagtaggtttttttttggtttagggtgtggttagaaatgttagtttggagttatggtttggaatgtgggttttaggattttgtttggtgttttattttattgtagttgagttggtatttaatgtaagataaatttatttttgttttttttttttttttttttaagtagaggaaagaagtttttttttgagttttgagttgttttgtttggggttgggagaggggtggtgtaagtaattttttggttattttagttagtgttttattaggttgtgtgttttttatatttattggttttgagtttagtatagtattaggatttatttaggaattgttatttttgtggtttagattgttttttaagtttatgtagaattttagagtattttagtttatggtggggaggtttattggaatttaggtttttattgttgggatgggtgatttgtttttagttagggttggtttaaatgatttttttatgggatttgggtgagttttttttagtgttgttttgtgttatgattgggtagtattgagttttaatgtaaagtttgaaaattattgtatttttttttttttagaagtatatattttttttttatgttaggtggtcgttgtcggcgaatgggggagagatagtatttagtaatttaagattgttttattttttttagttatttttttagtgatacgaagttaaaattaggtattgtgattatttatttgatttttggtttttatgaaggtgtttttttttgtgtggattattatttaatttggtgtttttgtagggagtaggattagtggaggcgtttatttagttattttgttttattttttttagttatgtttttttaaatatttataatcgatatataatatattatatttaaagtatataataagttttaaaatataattgaaattattatcgaattttagataattaatatatttattaattttaaagtttttttatgtttagatgattttttttttttttagaaattatttatttattttttgttatatagattatagtttgttttttttggagttttatataaatagaattatatagtatatgtttttttttgtttgattttttttatttattatgattattttatttatgttatatgtattaatagtttattttttgtttgttgatgatagtattttattgtatggatatatattttaatgggtttatttatttatttgttgatgtatgttggatcgtttttagtttttagttattataaataaaattgttataaatattaaatattaatgtttaagtttttgtatagatatatgtttttatttttttttgggtaaatattttgggtggagtggttggatattatggttagtgtatgtttaattttataaagagttgtcgaagtgttttttttttttttttttttttttgagatgaagttttgttttgttgtttaggttggagtgtagtggtgtaatttcggtttattgtaatttttgttttttaggtttaagtaatttttttgttttagttttttgagtagttggggttatagatgtttgttattatgtttagttaatttttgtatttttagtagagatagggttttattatgttggttaggttggttttaaatttttgattttaagtgatttgttcgttttgattttttaaagtgtttagattataggtgtgagttattatatttagttttaaattgtttatattattttatatttttattaggattgtatgagagttttagtttttttaaatttttgttaatatttattattttgaataaatgtttattgtaaaaaaattttaagagggttatataggggaaaaaaaggtcgttattaatttgttaattgtataattgggagataaagttattaaattgttatatttgtggttgggcgtggtaatatatgtttgtgattttagtattttaggaggttggggaaggaggattatttgagattaggagttcgagattagtttgggtaatatagtaagattttgtttttataaaaatattaaaaattaaaaaaaaaagaaattgttatgtttgtagattttttaaatttgttattttaggtaaatagtgtttttgtttttaaataaatagttgtatatataatttttttttttattatttaaaatatgttataaatggtaagtttaagaaaaatataggtatttttttttaaaggaaattgtaaaatcgatttttttttatttgtattgttttttattggtttttaaattggttttttaagtgagtaaattagaatttatttgtaatggattttaaatttagtgtttttttgtgatgtagtaaataagaaattagaggtaaaaatagttttgttttttgttaaatttttaaggtatttttttagtataatttaatattaatattttaggtttttagtgttttatatgagtttttaaaagggggaaaagggagggagtaagagtgttttaatttatatatttaggtataataattatttttatattttagttattgagagggttggtagaaaaattaggtaaataatattaataattatagcgtttattaaatattatagaatatttattatgtattaggtattgtgggaggtttttttttgtgtattattttattttattaggtttatggagagtattgtatttttttagtttaggtatggtttttataataaagattattaaaagtttaaaaatatgtaaaagaaatttagaagttatttgttgtgttttttggggaagttaggtaaatttttttaattgaaaattatggtgatttttaagatttttgtttttttttatcgttatggtttattttttttttttattgttttttttagaaaagatttgtggattttattattacgaaatggcggtattttatttatggttattttagagggtaggtttttttaatgggtttgtttgttatgtttaacgtttttggttgggtttaaggtagatgtagtttaaatttttattaaaattgtcgagttttttgttttttagtgtttaaaatattaatgttaatggaattaggttagagtttgaattttagttttttagtttttgttttttttgtttataaaatgaatgggggtaattttttttttttatagtttatttatatatttattaatttatttatttatttatttattcgtttattcggtttattgagtatttattatgtgttagtttttgttttagggtggaaattaagagaatgatgtatttagagggcgttggaagttttaaagttttagtagttattgtttttattattagtggtcgtttttttttttttttcgtttttcgataaattaatagaataaagaaaattatttaaatagtaaggatatagggaggaattttttggtatagaattttttaaatatttttttttgaagggatataagaagtaagaaaggtatttttttattaggattttttttgagttgtttttaggatgtttttgggattattttttttatttagagaatggagaaattttgtagggaatttttaagttgtagttataaatagaagttttttttttgttaggtagtatttaaagattttaattttttgggttttcgttttttcgaatgaaaaatgtaggttcgagtagttaattggcgggggtattattagtaagttatttagtatttttggggttagtttgtaaagcgagggggtagttttaatgtgtttttagtttgaagttttagaatgagcgttcggtgttttaagttggggcgcgtattttagatcggagggcgtcgatgtatagatagtaaatttatttagtttagtgtatgtttttttaaatattacgagattttaagaaaaggaaattgaaaacgggaaagtttttttttttaatttggtattgcgtcgttggtttggagataggtgacggtttttgcgggttttgttttgattggttgggtacgcgtttaatataagtggaggcgtcgcgttggcgggtatttttgaagttgatagtattcgggtcgagatgtttcgtttcgtggttttagttgtgttcgcgttattttttttttttggtttggaggttatttagcgtgagttttttttattttttcgttttggttttttttttttcgttttgtattttttgtggttttcgttgtgttttttcgtttcgtgattttttttttttaagttttttttggtggttcgtcgtggggttagtttagggttggatttcggggaagcggcggggtggtttgggagtggggaagggggtgcgtattcgggacgcgcgttatttgtttttttcggcggggagtaggggagatttttggtttacggcgacgggagggtcgggataaagtttagggcgtcgataagcgttagagcgtcgaggttgggggagggtttttttttcgttttttcgcggggtttttggtttttttagcgtagttggagtgggggacgggtaggttcgttttaaaggcgcggcgttgaggtttgtgaacgcgtggaggggcgtttggggtttgggggaggcgtcgttcgggtaagtttgtttgttgcggttttgttttttttagattggagagttgtggattttatttaggcgttcgttaagttcgtatgttttagtatttttgggtttatgtggggttatatcgtggggaggaaatagtacgcgacgtttgtagaatgtttggttgtgatataaagcggtttcgaataattaatttatttgtttttattatatgttatttttaaaaaattataagaattattcgttattgatatttttttgtgtgttaaggattttatgtgttttgcgttatttaattttgaaaatagttatttttcgttatagataattattatggttattttttgttttttatagatgaagaaattaaggtatcgagattttaagaaatttaattatataggggataaatggtagtaatcgagattgaagttaagtttaattagggtttttgcgggagcgtatgttttttggttgtaattcgtgtatttttttttaagaaaaacgtttgttttttgcgtgagattttttagagtaaattgggcggtatgggttttgtggttttttcgtatagagggttttttttttggttttttgtttggttgtttttaagatgtattgtgttttttattttcggttttgaaaatatgagggggttgggcgtggtagtttacgtttgtaattttagtatttagggaggtcgaggcgggaggatggtttgaggttcgtagttgagattagtttggttaatatggtgaagtttggtttttataaaaaataataataaaaattagtcgggtgtggtggttcgtgtttgtggttttagttgtttcggtggttgaggcgggaggattttttgagtttaggtttttgagttattatggcgttagtgtattttagcgtgggtaatagagcgagattttgttttttaaaaaagaaaaaaaaaaaagaaagagaaaagaaaagaaagaaagaagtgaaggtttgttagttaggggagttgtaaaattattaataaagataatttaagatggttattaagattgttgaggacgttagagattttgagtattttttaagtatttggtaatatattaagcgcgtttatttttttttttggtaaaatatgatcgaaagtagaatgttttgattatgagaaaattgtatttaatttgaatataatttatttataatataaaggataatgtatatattattattattattggtatttgttggttatgttagatgttattttaaaaaataataatttgatatttaaaaaaaaattttattttgaaaatttttaaagtaatatatgttatgtatagattatttttggaagatattataagaaatatgtaatgatgattgtttttgaaggtttatttttttcgtttgatttgtgtgtgggttttgtttttgttttattgtgggtataaattaattttttagttaagttttggaagtttaaataattttttaaaagttataaagttagtaattggttgagtttaaatttaaatttagtttgtttgatatttgttttttttttagaaaagattatagtgatgtttttataaaattttgtcgtttttttttaaatagagagttttaggtaggatgaatttgtgttttgatttttgaggtatttaatatgtttttattattagaagtttagatgtaaagagtttttttagtttttaatgttatgaaaaaaattaggtttttattagattttttaatttattttttgatggggttagtagtttttttttaatgatagggtgtttttagagagatatatttggttaaggtggtttggtatttttttttttttttatagttttttagataaggaggagtagttgttttttagtgattatgtattttgaatataagtgtatttaaaagaattttatatatatatatttagtgttaatttgtatatttagtagtattaatatttttttttatttttaatgaaaaatatagagtttataatattttttttttatttttttatggatggtttagttatgttttttattttggaaagtattgtttttgaaatattaggtaatatatttttaatttggttagtttatagtaattatttgtggatgttaattaaaacgtaaattttattgttatatgtattattttatttgattataatggaaagtatgttttgttttatttgttatagtttttatttatttttgttgtattttatcgggtttaatttaattatttaaggtatttgttagtttttgtatgtatttaggttttgtttttttgttttttagtttatgaaattaggtataaagttagagaggggtttggtatataaatttttagtagaaataaagaggttttgttgtttggtaagaatatattttgggttggttgggtacggtggttcgtgtttgtaattttaatattttgggaggttaaggtaggttgattatttgaagttgggagtttaagattagtttggttaatatggtgaaatttcgtttttattgaaaatataaaaattaattaggtatggtggtgtgtgtttgtagttttaggaattatttgaatttaggaggcggaggttgtagtgagttgagattttattattgtatattgtattttagtttgggtaatggaatgagattttattttaaaaaataaaaaaataaaaaaataaagaatatattttgggttgatttatttaggaattttagataataatatttgttacgtatagagtaattgttatgttttaggtattttattagatattttatatagtttagaaaattagatgggtgtagattaaggtaggagtaggaattaaaaagaaaggtataaatataagaaaaaaaatggaaggggtggaaatagagtataataatatgagtaatttgatgggggttattatgaattgagaaatgaattttgaaaagtattttggggttaaattatgtagatttttgagtgatgtgttaaggaatgttatgagtgttgagagggtattagaagtttttgagagtttttagagaaaggtttttaaaaatgtagcgtaatttttagtgatagaagatattgttagaaatttgttagaaaaaaaataaaaaaggtatgtatagaggaattatgagggaaagatattaagttacggtttattttttaaaatggaggtggtttgttgggaaggtggaagtttatttggttagagtggaaatggaattgggagaaatcgatgattaaatgtaaatatttggtgtttgatatagtttgatattaagttagttttaagtgaaatattttggtaatattaatgtgttttttttcgatattttttagg

SEQ ID NO: 184 - DNA, 8889 bp, Artificial Sequence
  chemically treated genomic DNA (Homo sapiens)
tttgaggaatatcgggaaaagatatattaatattgttagggtattttatttggggttaatttggtgttaagttatattaggtattaagtgtttatatttggttatcgattttttttaattttatttttattttggttaaatgagtttttatttttttaataagttatttttattttgaagaataaatcgtgatttggtattttttttttataatttttttatatatgttttttttgttttttttttagtagatttttagtagtattttttgttattggagattgcgttgtatttttaagagtttttttttggaggtttttaaggatttttgatgtttttttagtatttatagtattttttaatatattatttaagagtttatatgatttggttttaagatattttttaaagtttattttttagtttataatagtttttattaaattatttatgttattgtattttgtttttattttttttatttttttttttatgtttatgtttttttttttggtttttgtttttgttttgatttatatttatttgattttttaaattgtatgaagtgtttagtagagtgtttgggatatagtaattgttttatacgtggtagatgttattatttgaggtttttaagtggattaatttaaggtatgttttttatttttttatttttttattttttgggatggaattttattttattgtttaggttggagtgtagtgtgtagtggtgagattttagtttattgtaattttcgttttttgggtttaagtgatttttgggattataggtatatattattatgtttggttaatttttgtatttttagtagagacgggattttattatgttggttaggttggttttgaatttttaattttaagtgattagtttgttttggttttttaaagtgttgggattataggtacgagttatcgtgtttagttaatttaaggtatgtttttattaaataataaaatttttttatttttgttgagggtttatatgttagatttttttttgattttgtatttaattttatgagttaaaaaataaagaaataaaatttaaatgtatataagagttggtaaatattttaaatggttgagttggattcgataaaatataatagggataggtgaggattatggtaaatgggatagaatatattttttattatgattaaatggagtaatgtatgtgatagtgggatttgcgttttaattagtatttataggtgattgttgtaaattagttaggttgggaatatattgtttaatgttttagaaatagtattttttaaaatgagaggtatgattagattatttatggggaagtgggaagaaaatattataaattttatattttttattgaaaatgaagagaagtgttagtgttattaaatatatagattgatattaaatatatgtgtataaaatttttttaaatatatttatatttagggtatatgattattaaaaggtagttatttttttttgtttgggaggttgtggggagaaggaggagtattaggttattttgattagatatatttttttagaaatattttattattaaggaaaggttattagttttattaagaggtggattggggaatttaatgaagatttgattttttttataatattaaaagttaagagagttttttgtatttgagtttttaataataagaatatattaaatgttttagggattagagtatagatttattttgtttggaattttttgtttgagggaaggcggtaagattttgtgagagtattattgtaattttttttaagaagaggataagtattagataggttgggtttgaatttgggtttaattagttattggttttatgatttttggagagttatttaagtttttaaaatttaattgaaaaattaatttatgtttatagtaaaataaaaataaaatttatatataggttagacgaggaaaatagatttttagaggtaattattattatatgttttttgtggtattttttagaaatggtttatgtatggtatgtattattttggaaatttttaaaataagatttttttttaaatattagattgttattttttaaaatgatatttaatataattagtaaatattagtaatggtggtgatatatatattattttttatgttgtaaataaattgtatttaaattaaatgtaatttttttatgattaaaatattttgttttcgattatgttttgttagaggaaaaggtgagcgcgtttagtgtattgttaggtatttagaaagtgtttaagatttttggcgtttttaatagttttggtaattattttggattatttttattaatggttttataatttttttgattgataaatttttatttttttttttttttttttttttttttttttttttttttttttttttgagagatagggtttcgttttgttgtttacgttggagtgtattggcgttatgatagtttaaaagtttaagtttaagagattttttcgttttagttatcggagtagttgggattataggtacgagttattatattcggttaatttttgttattattttttgtagagattaggttttattatgttggttaggttggttttaattacggattttaagttattttttcgtttcggtttttttaagtgttgggattataggcgtaagttattacgtttaatttttttatgtttttaaaatcgaaagtaagaggtatagtatattttggaaataattaggtaaagagttaaagaggaagttttttgtacgaaaagattatagggtttatgtcgtttagtttgttttggagaattttacgtagaaggtaggcgttttttttaaaaaaaaatgtacgaattatagttaaaaggtatgcgttttcgtaaaagttttggttaggtttgattttaatttcgattgttgttatttattttttgtgtaattaagttttttaaaatttcggtgttttagtttttttatttgtgagaggtagaagataattatagtagttatttatggcggaagataattgtttttaaaattaaatgacgtaaagtatataaagtttttggtatatagaaagatgttaataacgggtagtttttataattttttaaaagtgatatgtgatgggaataaataagttaattattcgaaatcgttttgtattatagttaagtattttataaacgtcgcgtgttgttttttttttacggtgtggttttatatagatttagaggtgttaggatatgcgaatttagcgggcgtttagatgaagtttatagttttttagtttaagggaagtagagtcgtagtagataggtttattcgggcgacgttttttttagattttaagcgtttttttacgcgtttataaattttagcgtcgcgtttttgggacgagtttattcgttttttattttagttgcgttgggggagttagaggtttcgcgaaagagcggaagagaaatttttttttaatttcggcgttttgacgtttatcgacgttttaaattttgtttcgattttttcgtcgtcgtaggttaaaggttttttttgtttttcgtcgaaaggggtaagtagcgcgcgtttcgggtgcgtatttttttttttatttttaggttatttcgtcgttttttcgagatttagttttggattagttttacggcgggttattaaggagaatttggagaagggaagttacggagcgagagagtatagcgagggttatagagggtgtagagcgggagaggaaggattagagcgggagggtaggagagatttacgttggatagtttttaggttagaaagagagagtagcgcgagtatagttaaggttacggagcgagatatttcggttcgaatgttgttagttttaggaatgttcgttagcgcgacgtttttatttatattaaacgcgtgtttagttaattaggataaggttcgtagggatcgttatttgtttttaagttagcgacgtagtgttaggttagagagagggattttttcgtttttagttttttttttttagagtttcgtgatgtttaagaaggtatgtattagattgggtgagtttgttgtttgtatatcggcgtttttcgatttggggtgcgcgttttagtttgggatatcgggcgtttattttaggattttaggttggaggtatattaaggttgttttttcgttttgtagattggttttagagatgttaagtgatttgttaatggtgttttcgttagttaattgttcggatttgtattttttattcgagaaaacggaaatttagaagattaagatttttgaatgttatttagtagaaggagaatttttgtttataattatagtttgggaattttttgtagggtttttttattttttgggtaagaaaaatagttttaaaagtattttgaggatagtttagagaaggttttagtgaaagagtattttttttgttttttgtatttttttaggaaaaagtgtttggaaagttttgtgttaagaagtttttttttatgtttttgttgtttaggtaattttttttgttttgttgatttgtcggggggcgggggggagaaaaaaacgattattaatagtaaaagtagtaattgttagggttttagagtttttagcgttttttaggtatattatttttttagtttttattttagaataggggttggtatatagtaggtatttagtaaatcgaatgaacgaatggatggatgaatgaatgaattagtgaatatataaataaattgtaggaggaaagaattatttttatttattttatggataggggaaataaaggttaagagattagaatttaaattttggtttgattttattgatattaatattttagatattggaagataaagggttcggtaattttagtgagagtttggattgtatttgttttggatttagttaaggacgttaaatatgataggtagatttattaagaaaatttattttttaaagtgattataaataaggtgtcgttatttcgtggtggtggagtttatagattttttttaagaggaatagtgagaagaggaagtggattatggcgatggggaggggtagagattttggaagttattatggtttttagttgaaaggatttgtttagtttttttaaggagtataataaataatttttaggttttttttatatatttttaggtttttgataatttttattgtggaggttatgtttaaattaagaaaatgtaatattttttatggatttaatgaaatgagataatgtataagagagagttttttataatgtttggtatatagtaagtgttttgtagtgtttaataagcgttataattattaatattatttatttagtttttttattagtttttttaataattaaaatatgagaataattgttatgtttaaatgtatgagttaagatatttttgttttttttttttttttttttttaaaaatttatataaggtattaaaggtttgaaatgttagtgttgagttgtattagaaaagtgttttagaagtttagtaagggatagggttatttttgtttttagttttttgtttattatattatagagaaatattaaatttaaaatttattatagatagattttgatttatttatttggaaaattaatttaaaaattaataaaaaatagtatagatagaaaaaagtcgattttatagttttttttgggggggaatatttgtattttttttggatttattatttatgatatgttttgaatagtgagggggaaaattatgtatataattatttgtttaaaaataagagtattgtttgtttaggatggtaaatttgggaagtttataaatatgataattttttttttttttaatttttaatatttttgtggagatagagttttgttgtgttgtttaggttggtttcgaatttttggttttaagtgattttttttttttagttttttaaagtgttaggattataagtatgtgttattacgtttagttataaatatgatagtttaatagttttattttttagttgtgtaattaatagattaatagcggttttttttttttttatataatttttttaaaatttttttataatgaatatttatttaaagtagtaaatgttggtaagaatttagaagaattggaatttttatataattttggtaggaatataaaatggtataaataatttggggttggatgtggtggtttatatttgtaatttgagtattttgggaggttaaggcgggtagattatttgagattaggagtttgagattagtttggttaatatggtgaaattttgtttttattaaaaatataaaaattagttaggtatggtggtaggtatttgtaattttaattatttaggaggttgaggtaggagaattgtttgaatttgggaggtagaggttgtaatgagtcgagattgtattattgtattttagtttgggtaatagagtaagattttattttaaaaagaaaaaagaaaaaggaaaatatttcgatagttttttataaagttaaatatatattggttataatatttagttattttatttaaggtatttgtttaagagaaaatgaaagtatatgtttatataaagatttggatattaatgtttaatgtttatagtagttttatttgtgatagttgaaaattagaaacgatttaatatatattaataggtaaatgaataaatttattggagtatatatttatataatgaaatattattattaataaataaggaataaattgttgatatatgtaatatggatgaaataattatggtaaataaaagaagttagatagaaaagaatatatattatatgattttgtttatataaaattttagaaaaggtaaattataatttatatgatagaaagtagatgagtggtttttagagggaaaggagattatttaaatatgaggaaattttagggttgatggatatgttaattatttagagttcgatgatgattttagttatattttagaatttattgtatattttaagtgtaatatattgtatgtcgattataaatatttaaaaggatatagttaggggaggtggagtaagatggttgaatagacgtttttattaattttgttttttgtaggaatattaaattgaataatgatttatataaaaaaaagtatttttataagaattaaaaattaggtgagtgattatagtatttggttttaatttcgtattattgaaagagtaattgaagagggtaagatagttttgaattgttaaatgttattttttttttattcgtcggtagcggttatttggtatggagagagaatgtgtgtttttgggagaggaagagtgtagtgatttttagattttgtattggaatttagtgttgtttagttatagtataaagtaatattgggaagaatttatttaggttttatggagggattatttagattagttttagttagaggtaaattatttattttagtagtgggaatttgagttttagtaagtttttttattatgggttgaagtgttttgaggttttatataaatttgaaaggtagtttaggttataaggatggtaatttttgggtaagttttggtgttgtgttgggtttagagttagtgaatgtggggggtatataatttagtgagatattagttgggatggttaagggattgtttgtattattttttttttaattttaggtagggtagtttaaagtttagagagagattttttttttttgtttgagaagaggagagggaagaataaagatgagtttgttttgtattggatattagtttagttgtagtaggatagggtattaggtaaagttttgaggtttatattttaggttatagttttaagttgatatttttagttatattttgggttagaagggaatttgttgttttgaagggaaggattagttttggtaggattttttattagttgattaaagagttttttggttttgaataattagaagtagttaggtagtatttattatgggttttgggtgagatttagagacgtgtaggtttaaggtgtgatttagtatattatagttgtggtggttatggggagaaattttttttgtttgagaaaagaagtggaaagagtaaaggggatttggttattgtggggttagaatattaagtggttttttaaggtttttgattttaggttttggtttttagatagtatttttggatttgttttgggttagaggggagtttgtttttttgaagggtgagttttaggttgggtagcgtttattataagtttattgtagagtttttgggttttgagtatatattagtagtagttagatagtatttattataggtttggggtggaagtggttatggtaagagattttttagtttgtggaaaggggagggaaaagtgggaaggattttgttttgtggtttgggtgttagtttagttttagtgtaatagagtattaggtagatttttaaggtttttgattaggttttagtttttggaaggtatttttggatttattttaggttgggggaaatttgttattttaaagagagggatataagtttggttggttttgttatttgttgattttagagttatagggttttgagtgaatataggtagtagttaggcggtggttattataggttttgggtaagatttagtattatgttggttttacgtttgattttgtatagttttagtggtggttataggggtgtttgtgttattttttttttaattttaggtagttgattatagaaagatagattttgtttgggggaaaataagggaagataataagagtttttgtttggtaatttagagaatttttttagattttatttaag

SEQ ID NO: 185 - DNA, 6904 bp, Artificial Sequence
  chemically treated genomic DNA (Homo sapiens)
tttcggttttttaaagtgttgggattataggtatgagttatcgtattcggtttgttatatattttaataagtttttataattattttttatgataaatatatagaagtgaaatttttagagtaaagggtaaaattatttttaaggttttttatatatatagttaaatggttttttagaattttgaattttttgaagataggtatattttattttgtttatttatttatttatttatttgtttagagttagttttgttttgttgtttaggttggagtatagtggtgttattttagtttattgtaatttttgttttttgggtttaagcgatttttttgttttagttttttaagtaggtgggattataagcgtatgtaaatacgtttagttaatttttgtatttttagtggagatggggttttattatgttggttaggtttatttttaatttttgattttaagtgagtttttgttttggttttttaaagtgttgggattataggtgtgagttattgtgtttagttttaggtgttttattaattttgtatttataattaggtaatttatttgatttaatgtgtggtgtttaaaatgtttttaaaatatagttttatattaaattataatattattttaaagatttatgttattatgttttttatataatattggaaataatttaattatttaattagaaaaagaatggttcgtttatggtgtaagtaaatggtagaatattataattttattaaaaagtgtaaagtttttaaagaatatttaaaagaatagggagatgtttatgatataatattaagtggaaaaggaaaatttatatatatatattataattttattttttttaaaaagttatatgtatatatattacgtatgtagaagtagaggaaagaaattggaagaaattagtattttaaaggtggttatttttagtagtaagaatttaggtaaattttatttttttttgtttatatttatgtattttttaagtttttataatgaatttatattttttttataataaaaaaggttatttaaaattagtaatgttattaattaagaaggtaaattattttattatatttttattagtttaggtattataatttttttttttaatttgatttaatttaaaaggaggaagatggtatttggtattttataaaaagttattttaatataggaagagagatattgataatttttttggtttttcgatagttaattatatttgatttttataattttgtagaggattttattagttgaatagtttatagaggtaggtattaaagatattagttagtttttgtttaaaattgggatatagttatttaaaataaattaaggatttttaaatttattttggtgggagggaataaatatttaggatttttaattttataaataaaaataaaaaaggtatattttaaaataaataataggaaaattaaattttatagatttggttagtttaaaatagtagttattaattatataaggttatttaaattatttaaattgaataaaatttaaattttatttttttagttatattagttatattttaagtgtttaatagttatatgttgttaatagttattgtattgaatatatagatatagagtatttttattatggtaaaaagttttatttagatggaagttgttataatagataataatttagttaattgtatttaattatacgttaatgaaaatttgtaattaaattaagagtgtttagaaaatagtatgaaaatttgaaggaatggaagattattttttttttagttaaatttgttagaggtagaaattgtgtgtgtaatttatatttttttttgttttaaaattcgtaaggttttttgtttgattatattttggagagaaaaatagatttaataaaaataaggtggaaaatatatatacggtaaaagaaattttttatagttttaaatttatatgtttatttttttttttttttaaagtagtaggtataatggtttttggattttgtatttttttttttaaaaataggtatttttaaggtttagtttttaagtttttgtttttatttgtttttgtattttatattttagagtttttaattattttttttttttttaatgtatattatttttgtttttagttttaaaagtgttgagtttgtatatttagttgttttagggagattttttatttgtatagtttattaatttaattttaataattttaaatttttgaattttattttatttttgaaataagtaataatggtttattaattttttatttttttaggttgaaaatttttttattaattttattttttttttttttgttgtttttttatgtatagttattttgttagttgattttagaatttatttttaaattgattttttggttttttattattatggtttgggtttttattgttttaaatttaaatgggtttttttatttttggttgttttttattttatattatttattaagatggttgggaaaagttttttttttttatagaattttgtagattattttatttgttttttttagtgaggaaggaaaaataggtattattattttatagatgattataatttatatttattgagtattattttattttagatatagtggtatataggttatattaattattttatttaatttttatattgtaaggtgggtattatttttgttttatagatggggaaagagaggtttagtgatatttaggtttatatggttaataagttatggatttggaaaaaataaggtagttttatatttatagtttatgtgtttaaatatagtattttatgtttttatttaataggagtggaaaataagtgattttattaaggttataattagaaggtagtgatagtgtattagaatattggttttagatgtttagtttagttttttttagtaggttattttttaagtagtttaatatattaatttaatttgattagtttagtaagttattgattttgagtatagtttagtttttttttttagattattatttttttagtataatatgttaatttttatgtatatgtttttagacgtgtgattagtatttttttttattagattaatttttagttttttttttatatttgattgtaaatttttttttttaaaggatatatttttatatgttttttttttattagattgtaagtattttttttgtagggatgtttatagtttttgtattaggttttattttatttattttttgagacggagttttatattgttattcgggttagagtgttacggtgtggtttttgtttattgtaattttcgttttttaggtttaagcgatttttttgttttagttttttgagtagttgggattataggcgtttgttattatgtttagttaagtttttgtatttttagtagagatagggtttcgttatgttggttaggttagttttaaatgtttgatttcgtgatttattcgttttagttttttaaagtgttgggattatatgtatgagttattgcgtttagtcgaattaggttttatttttataggtgttaaaattaggttttgttagtattttgtcgagtagttgttgtttattttatttttgtaggatttttttttatttttttgatttgatttttatattttattagtttagtatttaatcgagaaatttttttgttaatggattttgttttattgtttattttaggggaaaatattaaatgtattggtagttattgtaatatatttattttagaaggggtaggtagagaggaaggaatatagaggaagaaaagaggagtttaaggggaagggtgaaaaatagtggtttataaagaagggtatttttaattagaaattttgggttttataaattatttttttatttttcgttatattgtttcgattttgatatattaggtagtttttaagtgggttggggtagaaaataatttgagaattattgagttgagttggaatttttttagaattagagattagttaggttgagagtttttttaagaggtatatgaaatgggttagtgttaagtgaaattagttgattgtagatttaatgttattttttaaatcggggatggtggtttaatttgaggggttagggttttgagttttgtgttattgagatttaggacgaaggtatagatatgttgatttaggatattaagttgagttttgatgtggattggggatgatagatggaagaagggtaagggattaggtaggatgaggtgggaagggtgtatggtttagggttgggtgaggtgagaggattaaggcgagagcgagtggacgggtaatgggtattaaaacgggttgggtgttggtagggtaaggtagtgatggggttaggggttttttggtttgtggcgttaggaatgatttgggtaatagggatgaaggggagaaggtgagatagagagggacgacgtgtaaggggtttaggattcgaaatgaagtggaagaatatgggttcggggttgggggtgggcggggtcgggtgtgttagaggttttgagtttatttatgtatgattaaatgtttatcgtgttaatgtagttagttaggttgggcgcggagttttgggtttcgttttttcgaagagtcggtttattttgagtagtcgcgaagaaatttaaatattagagtaaaattagaaacggaagtagagttattttcgtttcgattttcggttttttcgtgcgtacgtaatatgttttttggcgtttttcgatttttttttcggatttttagtcgggtttttcggggatggagagtaaaaggatttggtgttttcggagagagtttgtagggggcggggtgttggtagaaggagtgggaggggttttattgtagtaaggcggggttttagttgagtgggtggggtttggaggtaattaacgcggtatagggcgagggcggggcgttaggtcggggcggggttgggaagtagtcgggcggggttgtgagacgtcgcgtttagtttttatcgttgggcggttaataagtgcgggtttggtttagcgcgggggggtagggagatcgcgaggcgatcgggagcggttgggttttcgcgtgcgcgcgttcggttagtcgggagtcgcgttagtcggagttttcgtttagcgtggttcgtttttttttcggcgtttatttgttcggagtattgttagcgggtatgatcgatttacgtagggcggcgcgtcggcgttcgtaggtcgcggatgaagaagaaaattcggcgtcgttcgattcggagcgaggagttgattcggagcgaggagttgattttgagtgaggaagcgatttggagtgaagaggcgatttagagtgaggaggcgatttagggcgaagagatgaatcggagttaggaggtgattcgggacgaggagtcgattcggagcgaggaggtgattagggaggaaatggcggtagttgggtttatcgtgattgttatttatagtgagtgtcgggcgttaggtgggttttatgtaggtttcgaaagttcggcggggtttgtgggtttagttacgtgttttttagaagcgtgtgattttgcgtttgttttggcgttcggaagcgtgggttattggttgtgttcgtggaattgttttttgtttcgggtttgtgtttgtatatttttttatgtggtcggtgtattttgtttttggttatttgtgcgattttgggtgtttgagttttttcgtgttttacgtcgtgggtttggttgtgtttgtgtgttcgcgtagttattgtgttttttgtgttaggtatatattgggttatgtgtttacgattgtttcgtgtgtgataagttagaatttcgtgtatgtcggggtgtttttcgtgtgttgagtgtttttttcgtgtgcgtcgtttgagttggtcgtgggtttaagtttgtattttgggtatttttgggtttgtttattgttggagttgatatattattaaatgaagttagtatatcggagagttgagtttatgaggtttttttagaattagttaggggaggtttaagggtttgggaatttggagatttggattttagattttgcggttttgagtgattttgggatggacggtttttttttaagaattcggttttttttttgtgaagtagatttggtaattttggtttttgttgattttacggagttgttgggggaattaaattttggtgtaatgtattgtatataggttttttttttgttgttcgtatttttggaaaagaattggcgttttttttttagaaagaaaggttttgttgttcgtatgtatttgtttgtttatttagtataaattatggatgtatttaagtgtgtttagtgggagagatttggaggaaaatagttatttgtttattatagtaagcgagacgagattaatataatatagggtatagggtagttaagttataggaagtagatggtttgtgatgaaaaaggtgggtttgggaattagttagatttgatattaatttttgattttaatagttgagtttttataggtagtttttaatttgtttgaagttatagtttgtttatttgtgaaataagaagtaataggtagatttatttcgtggggtttatttgaggattaaattagattatgtatgaaatgtttaaaatgttagtagatattatttatattgttagttattataatagaggaaatagagatatttgaggaggttattagaggaaagttgggtggtatgggggtaggttttgtggagtaggtggtatatgagttgggttttgaaggttgggtaaataaatgtgataaagtgttattttatattggtgtatgtgaaagaattatattcgttaaatgtttttttttttttttagg

SEQ ID NO: 186 - DNA, 6904 bp, Artificial Sequence
  chemically treated genomic DNA (Homo sapiens)
tttggggagaaagaaaagtatttgacgaatatgatttttttatatatattaatataggatgatattttattatatttatttatttagtttttaaggtttagtttatatgttatttattttatagagtttgtttttatgttatttagtttttttttggtgatttttttaagtatttttgttttttttattataataattaataatatgaatgatatttgttaatattttaagtattttatgtataatttaatttaatttttagataaattttacgaagtagatttatttattattttttattttatagatgagtaaattgtgattttaggtaagttaaggattgtttatggagatttaattgttggaattagaagttgatattagatttagttgatttttaagtttattttttttattataagttatttgttttttgtggtttgattgttttgtattttgtattgtattggtttcgtttcgtttgttgtaatgggtaagtgattgtttttttttaagttttttttattgaatatatttgagtgtatttatgatttgtgttaagtaaatagataaatgtatacgaatagtagagtttttttttttgaagaagagacgttaatttttttttagggatgcggatagtaaggagggagtttgtgtatagtatattatattaaggtttggtttttttaatagtttcgtgaggttagtaggagttagggttattaaatttattttatagaggagaaatcggatttttagaaagaagtcgtttattttaaggttatttaaaatcgtaggatttagaatttaggtttttagatttttagatttttgggttttttttagttggttttagagaaattttatggatttagtttttcggtgtattgattttatttggtggtgtgttaattttaatagtaggtagatttaaaggtgtttagagtataagtttggatttacggttaatttaagcggcgtatacggagaaggtatttagtatacgaggagtatttcggtatgtacgaagttttgatttattatatacggagtagtcgtagatatatggtttaatatatgtttgatataaagggtataataattgcgcgggtatataaatataattaggtttacgacgtaaagtacggagaagtttaaatatttaggatcgtataaatgattagagataaaatatatcggttatatggaaaagtgtatagatataagttcgggataaaagatagttttacggatataattaataatttacgttttcggacgttaggataagcgtaaggttatacgtttttggaggatacgtgattaaatttatagatttcgtcgggttttcgggatttgtatggagtttatttggcgttcgatatttattgtgggtgatagttacggtgagtttagttgtcgttattttttttttggttattttttcgtttcgggtcgatttttcgtttcgggttattttttggtttcgatttattttttcgttttgggtcgtttttttattttgggtcgtttttttattttaggtcgtttttttatttagggttaatttttcgtttcgggttaatttttcgtttcgggtcgagcggcgtcgggtttttttttttattcgcggtttgcgagcgtcggcgcgtcgttttgcgtgggtcggttatgttcgttggtagtatttcgggtaggtggacgtcgagagggaggcggattacgttgggcgggggtttcgattggcgcggttttcggttggtcgaacgcgcgtacgcgggaatttagtcgttttcggtcgtttcgcggtttttttattttttcgcgttgagttaggttcgtatttgttgatcgtttagcgatggaagttgagcgcggcgttttataatttcgttcgattattttttagtttcgtttcggtttggcgtttcgttttcgttttatgtcgcgttagttgtttttaggttttatttatttaattgaggtttcgttttgttatagtaaaattttttttattttttttattaatatttcgttttttgtaggtttttttcgagagtattaagtttttttgttttttattttcggaagattcggttgaaaattcggaaaaagaatcgggaaacgttaggaggtatattgcgtgcgtacggaggggtcggaagtcgaggcgggagtgattttgttttcgtttttggttttgttttagtgtttgggttttttcgcggttgtttaagatgaatcgatttttcgggaaagcgaaatttaaggtttcgcgtttagtttgattgattgtattggtacggtgggtatttgattatgtataagtaggtttaggatttttgatatattcgatttcgtttatttttagtttcgggtttatatttttttattttatttcgggttttgggttttttatacgtcgtttttttttattttatttttttttttttatttttgttatttaagttatttttaacgttataaattagggaatttttaattttattattgttttgttttgttagtatttaattcgttttgatgtttattgttcgtttattcgttttcgttttgatttttttattttatttagttttaggttatatattttttttattttattttgtttgattttttattttttttttatttgttatttttagtttatattaggatttagtttgatattttaggttaatatatttgtgttttcgttttggattttagtaatataaaatttagaattttagttttttagattaagttattattttcgatttagggaatggtattagatttataattagttggttttatttggtattggtttattttatgtgttttttggaggaatttttagtttggttagtttttgattttagggaaattttaatttaatttagtgatttttaaattattttttgttttaatttatttgaaggttatttggtatattagaatcggggtagtgtggcggggggtaagagaataatttataaagtttagggtttttggttgggaatatttttttttgtgaattattgttttttatttttttttttaagttttttttttttttttttgtatttttttttttttatttgttttttttggaataagtgtattgtagtaattattagtgtatttgatatttttttttaaggtggatagtagagtagaatttattgataagaagatttttcgattggatgttgagttagtgaagtataaggattagattaagaagatgagagagggttttgtaaaggtaaggtgggtagtaattgttcgataaggtgttggtagagtttagttttagtatttatagaaatagggtttagttcggttgggcgtagtggtttatgtatgtaattttagtattttgggaggttgaggcgggtggattacgaggttaggtatttgagattagtttggttaatatagcgaaattttgtttttattgaaaatataaaaatttagttgggtatggtggtaggcgtttgtaattttagttatttaggaggttgaggtaggagaatcgtttgaatttgggaggcggaggttgtagtgagtagagattatatcgtagtattttagttcgagtgatagtgtgagatttcgttttaaaaaataagtgaaataggatttagtgtaggggttgtgagtatttttatagaagagatgtttatagtttggtaaggagaaaatatgtgagggtgtattttttagggaggagagtttgtaattaaatatggaagggaggttggggattgatttggtggaaagagatgttggttatacgtttaaaagtatgtatatgagaattagtatattatattgagaaggtggtaatttggagaggaagattaggttgtgtttaagattaatgatttgttaagttggttaggttaggttggtatattagattgtttaaggagtggtttgttgggaaaaattgaattaggtatttgggattagtgttttaatatattgttattgttttttagttgtgattttgataaagttatttattttttatttttgttaggtagaaatataaaatattgtgtttaagtatatggattgtggatatagaattattttgttttttttagatttataatttattaattatgtgagtttgggtattattgaatttttttttttttatttgtaaaatagagataatatttattttatagtatgaggattaaatgaggtaattgatgtgatttgtgtattattatgtttaggataaagtagtatttagtaaatatgagttatgattatttgtgaagtaataatatttgtttttttttttttattggagaagataaataaaatgatttatagaattttatagaaaaggaaggttttttttagttattttagtggatggtgtggaatgaagagtaattagaggtaggaaagtttatttagatttgagataatgaaagtttaaattatggtggtaggaaattaaagaattagtttgaaagtgagttttgaaattagttaataggatgattgtgtatgaagaaataatagaaagaggaaagataaggttgataaaaaggtttttaatttagagaggtgagagattggtgggttattgttatttattttaaaggtgagataaggtttaggagtttggaattgttgaggttaagttgatgggttgtataagtgaagaatttttttaaggtaattggatatatagatttagtatttttggggttagaggtagagataatatgtattaggaaaagagaaagtagttgaggattttgggatgtgggatgtaaagatagataggagtaaaggtttaaagattggattttagagatatttgtttttgggaggggaagtatagaatttaggagttattatgtttattattttgaagaagagaggaagtaggtatgtgagtttgaggttatgggaaattttttttatcgtatatgtgttttttattttatttttattaaatttgtttttttttttagaatatggttaagtagaaagttttgcgagttttaaagtaaaagaggatgtaagttatatatataatttttatttttagtaggtttaattaaaagagaaatggttttttatttttttaggtttttatattattttttaagtatttttgatttaattataaatttttattgacgtgtaattaaatatagttagttgggttgttatttgttgtaataatttttatttaaatagaattttttgttatgatggagatgttttatatttgtgtgtttaatatagtagttattagtaatatgtggttattgagtatttgaaatgtggttagtgtgattaaggaaatgaagtttaaattttatttaatttaaataatttaagtagttttatatggttagtgattattgttttggattgattagatttgtagggtttggtttttttattatttattttagagtgtattttttttgtttttgtttgtgaagttaggaattttaaatgtttgtttttttttattagaataaatttaaagatttttaatttgttttaggtgattatgttttaattttgagtagaagttaattagtatttttggtgtttatttttgtagattgtttagttgatgagattttttgtagggttatagaggttaggtataattagttatcgaggagttagaaagattgttagtgtttttttttttatattaaaatgattttttataagatattagatgttatttttttttttttagattagattaaattggaaaaagaaattgtaatgtttagattggtgagggtgtggtgaaatgatttatttttttaattggtggtattgttagttttaagtaattttttttgttataaaaagaatataggtttattgtagaaatttggaaaatatataaatatgaatagaagaaaataaaatttatttagatttttattattagaaataattatttttaaaatgttaattttttttagttttttttttttgtttttgtatacgtggtatgtgtgtatataattttttagaagaaatgaaattgtagtgtgtatatgtaggttttttttttttatttaatgttatattatgagtatttttttgtttttttaaatattttttggaaattttatattttttaatgagattataatattttattatttgtttgtattatgaacggattattttttttttagttggatagttagattgtttttaatattgtataaagaatatagtgatataagtttttgaggtaatattataatttgatataaaattgtattttaaaaatattttgaatattatatattaggttagatggattatttaattatgggtgtaaaattaataaaatatttggggttgggtatagtggtttatatttataattttagtattttgggaggttaagatagaagtttatttgaggttaggagttggagataagtttggttaatatggtgaaattttatttttattaaaaatataaaaattagttgggcgtgtttgtatgcgtttgtaattttatttatttgggaggttgaggtaggagaatcgtttgaatttaggaggtagaggttatagtgagttgagatggtattattatattttagtttgggtaatagagtaagattggttttaaataaataaataagtaaataaataaataaaataaaatatgtttgtttttaaggagtttaaaattttggaaaattatttagttatatgtatgaagagttttaaaaatagttttattttttgttttaagaattttatttttgtatatttattatagaaaataattataaagatttattaagatatgtagtaggtcgggtgcggtggtttatgtttgtaattttagtattttgggaggtcgagg

SEQ ID NO: 187 - DNA, 7558 bp, Artificial Sequence
  chemically treated genomic DNA (Homo sapiens)
gagttgtgggtggggttgttttgttttttttagtaaatgtttattgtgtgttatatatcgttttgggtattttataaagagtattttagtttatttttgtaattttttttaaggatagttattattatatttttattttaaagacgaggaaatagacgtagagaggttgagtaagttgttatttatcgtacggtttagtatgttagaattggtatttgaatttaggtagtttgattttagtagttttttaaaatgtgtttcgtgttttgttaggttttatatttttaagaagttttataggaagagggttcgtttttggcgttttttttatgtttatggttattatatttatttttaagtagatattttttttttttggtggagggtttagggttgattttacggggttttgtggttttttgtaggtattttttttttaattgtaggatttggataaagtggttgttaattttaaagtatagttaggtgagggaggtaggtggggtttagagatgtgatagagattttttaaattttttttaaggtttatttataggtttgttggttttttgtagttttttttttttattagttttttgttttgtatttggggtttttattatagagggggattatcgtttttaaaagtagggtgatgagggggtggggaatagagagaggtgggtttttgtttttataggggatggttgttaggtttgtagaaggagttgggagtaataggatttttcgtttttttggttttggtatattttttttttattttttagtttgtttttttttatatttggtattttttatttataattttttatttgtgggaggattttattttttttttttttttaaattaaatttttatttttagttttttttttattagatgtttttgttcgttggttttatttatatttttttgtttttttttattaggtgttttgttttagatttttatttatttaaggtttttttttttagattttttttagtatgggttttttattttaggtttatgttttttttttattttatgtttaggtttttttttagtatttttgttttaggttttgttaatttgggtattttttaattttagttttttatttgtttgaggtttttgtttttttagaggcgttttttgttggttttttttttttttttttaggtaggttgtttaatattttttggtttgttatgggtagaattgattttattttttcgttaggtttttttgtttttgtaggtgtaggttattatacgttttatgtttagttttaagggaggttgttgtgatcgttttgagaagtttttgggtatggttatagagaaggggtggggcggtaaggtagatggtttcggtttttttttttttatatgttttttttggtttattattagggaaatggtattttggtggcggaatatggaggagtagtttgaaatttatgattagggtttcggagttggggtttttattttgagaaggtttttaatttagattttgtaatagttattttaggattaattgtttaagaataggaagagtttttaaattaaaatttttagttggaaattttttagaattttgggaagtaaagattggggaggatgggaggttgggggagattagttggaggtagagggggtaggggtttgatgaagtagggaaggaggtgtggggggtaggtagggattttgggggaaagggggtggagatttggaggaaaagatgtgagagttttaggaagtttggtagggagtaaatagggagaggtagggagggaattgaattttgagggtaggggttattgaggattgtatatatttttgttttttttgggtttgttttgtttttaagaatatttttagtagttagatagtatttgtttttttttttagtatttaggttttgtgtttaggtggtagtatagattttattaagtttatttatttatttgtttttatttttatttatttatttttttgagatagagtttcgttttgtcgtttaggttggagtgtagtgggttatttcggtttattgtaagttttgttttttgggtttacgttatttttttgttttagttttttaagtagttggaattataggcgtttgttacggcgtttagttaattttttgtatttttagtagagatggggttttatcgtgttagttaggatggtttcgattttttgatttcgtgatttattcgtttcggttttttaaagtgttgggattataggcgagagttatcgggttcggttttgtttttatttttatttttaattttttgagatggagtttagttttgtcgttaggtaggagtgtagtggtataattttggtttattgtaattttcgttttttggttttaagcgatttttttgttttagttttttgagtagttgggattataggtattcgttattacgttcggttaatttttgtatttttagtagagatagggttttattatgttggttaggatggtttcgattttttgattttgtgatttatttatttcggttttttaaagtgttgggattataggtatgagttatcgtgttcggttttatttttattttatttttttgagatggggttttatttttgttatttaggttggagtgtagtggtataattttagtttattgtaattttcgttttttgggtttagtaatttttttgttttaattttttaagtagttgggattataggcgtacgttattataatcggttttattttatttatttattattattattattttttgagatggagtttcgtttttgttgattaggttggagtgtaatggcgtaatcgtagtttattataattttgtttttcgggtttaagtaatttttttgttttagtttttagagtagttgggattataggtatgcgttattacgtttggttaattttgtatttttaataggggtggagtttttttacgttggttaggttggtttcgaatttttaattttaggtgattagttagtttcggttttttaaagtgttgggattataggcgtgagttatcgtgttcgattaattttttttttttttttttgagacggagttttattttgttatttaggttggagtgtagtggcgtgatttcggtttattgtaagttttgttttttgagtttacgttatttttttgttttagttttttatgtagttgggattataggcgtttgttattatgttcggttaatttttttgtatttttagtagagacggggttttattatgttagttaggatggttttaattttttgattttaggtgatttatttgttttggttttttttttgtgtatttttaaaagagacggggtttcgttatgttaggtaagttggttttgaatttttgattttaggtgatttgtttgtttcgggtttttaaagtgttgggatgggattataggcgtgagttatcgtgttcggttttttttttttttttttttttttttttagagatagattttttttttgttgttttggtgtaattatagtttattgtagtttcgattttttgggtttaagtaatttttttattttagtttttttagtagttaagattataggtatataatattatgttttgttaattttttttttttttttttttttttttggtataagtagggtattgttgttgtttaggttggtttggaatttttgtatttggttttaagcgatttttttgttttggttttttaaatggttgggatgggattttaggcgtgatatatcgtagttggttgttttttttgttgttgttgagataaggttttgttttgttgtttagggcggaatgtagtggtgtaaatatggtttattgtggtttcgattttttgtgtttaggtgatttttttgttttagttttttaggtagttgggattattaaatgtataggtgtgtattattatatttagttaatttttaatttttttttgtagagatatggttttattttgttgtttaggttggttttgaatttttgggtttaagtaatttttttattttagttttttaaagtgttgggattataggcgtgagttattgggtttagtttttattgagttttaattttcgtttatttgattattatttttaggattttaaatatttagagattattaaggtgtatggtgtataggtttaaattgtaggttgaattttaatttagtattagtattttttaatgcgattatagaattgattattattatttattttttttgagatggagttttgtattgttattagggttggagtgtaatggcgtaattttggtttattgtaatttttattttttaggtttaagggatttttttgttttagttttttaattagttgggattataggcgttcgttattatatttagttaattttttgtatttttagtagagacggggttttattatgttagttagaatggtttcgattttttgatttcgtgatttgtttgttttagttttttaaggtgttgggattataggcgtgagttatcgcgtttggtttagaattgatgattaatttagttgagtttttgtttatttgaatgggtattgttaatagtatttatttataagagttgttgagaagatttaatgagataaatagttgttaaagtgttaggtatgtagtagtgtttaagaaattttttattttgggttttttattggtattgattgatgtagaggtgggggagaagattaaagataaggattgagaattagggatgggaaaagtagtgggttattgatagtcgttttgtttgtttgggaggtggggtggggaaagtgggcgggatatgtttttgggtttggtttatttagattattttataggttgtcggtttgtgcgtttgtattcggtggttatagagtaattttttttagagggagttgattggagtcgggtgtcgttggtatttttatgattattggagtttcgcgggtttttcgggttgtatagggataagtaaaggttatatttagatgtcgggaatgtattgacgtttatttttggaaattgggtttttatttagtttttgggagtagtagtcgttagtttttcgggatttttatttttattttgttgagttattcgggttgggttaggatttcggtaggtaagttggaagggttttgtttatttttttagattttagtagttttagttttagggtggggtagggagtttgtcgggagtcgggtggggaaggggaagtttaaggtttttttgggtaggtttgtcgtttcggttggggatttgattttgttatgtttgtttttggttgttttttatagtttttttttttggtttagttttggatgtcggagaattgtaagaattgggttttttaatagtttgggagatgggagtggaggttagagttaaggttaagggtagagagagaatttttttagcgtttgttgttgtttaatatttttagattgggtttagggtttggttaggtatgtatttttgggtaatatttatcggggtttagtaagtttaggaagtcgggggtggttttttttatcgggaatttaggttatttggatgggggaggtagagttaggtttgagttagtataggttgttggttttggtgggtgttttgaggttttatttgtttttttcggaagtttggggtgttggtagagggagttggaggtgtagttagtattttttagttttattgttttgggggtgtcgggttttggagattggggaagaaggaaggttattttatgtaaggagttacggggggtgggaggtaagtaaaattttttttttttgttttttgaaatggagtttcgttttgttgtttaggttggagtgtagtggcgtaatttcggttgatcgtaattttcgtttttaaggtttaagcgatttttttgttttagtttttcgagtagttgggattataggcgtacgttattatgtttagttaatttttgtatttttagtagagatggggttttattatgttggttaagttggttttgaatttttgatttcgtgggttattatgttcggttgtaaagttttgttttaataaggttttgtttttagaggtggaggagaggaaggtttgtttttattttgtttttgttcggtagatcgaggaggagtggggagttgggtgagggtataggtggtttagtttttttttatttttttttgagagtttttggggtattttcgaaaatatttttaggtttagcggaaggagggtgggcgaaggtttttaggttttgggcggtgggggtggggttgtgtgtttggtttagggtggggttgtatattttttttttttgggataggaggagggcgttttttttttgagggttggaggttgtttggggaaatggggttttgggaggggtgtaaattgaaagtgaaatagttgatatttaggaaatattcgttttgatgaggggttatagtaggttggggttgcggttaggattaggtaaagaggaaaattggggtcggggatagaagattaggtgtgtggtgggagtacgaggtaggttatggggttttaaagaaggttttgattttgagggtttttttcggttattgtaaggtagtagtggggaaggtatagataggaggtaaatagggaaagttgttttgagaaagaatatattttgaggtttataaattggaaaagaaattttgtatgcgtgttgagtatatggatttacggagatttagataaataatttgatttttcgtgattaacgatgtgatttcgggtatttaattttttgtgttttattttttttgtttgtaaagtgggtatgatggcgtttattttgttgggtttatgtgagtttttagtgtttattatttatagagtgtttttaagtgggagagtatattttaggtttttaggaaatgtttgcggttaatagtttagagttaaaaaataggtgtgttttggttagttagagggaagtagggtttttgaggatagtttttatgggttattggttgggtagtggttcgtttgtaataagtatgtgttgggtgggttgtaggaggttttaggaatagttaaaaattttttaggtttttgttttaggagtggtatgaatttgagagttagcgggtattgttgtagttatatttttttcgatggtgtagatattttagtttgtttttggttgttttatttttttattttgttttttttaaagagggagtgtttagtaagttgtttttttttagtagattttattgggatttatgttggagtaagaataaaaagttttagaggaggttaggtacggtggtttatatttgtaattttagtattgtggatggtcgaggtagatttacgaggttaggagtttgagatcggtttggttaaagttttagaggattaagggtttttttgggaatgggggatttttttttttatgtggatatggtaatttgtatggggtttttagttataggtttgtgtttatttttatttttgttttttttcgttttttttcgtagg

SEQ ID NO: 188 - DNA, 7558 bp, Artificial Sequence
  chemically treated genomic DNA (Homo sapiens)
tttgcggggaagggcgagaaaaagtagagatgggggtgagtatagatttgtgattggggattttatataggttgttatgtttatataggagagaggattttttatttttagaaaggtttttagttttttgggattttggttaggtcggttttaaatttttgatttcgtgagtttgtttcggttatttatagtgttgggattataggtgtgagttatcgtgtttggttttttttgggattttttatttttattttagtatgggttttagtgaagtttgttgggaggaaataatttattgaatattttttttttgagggagatagggtaagaaggtgaggtagttaagggtagattgaggtatttgtattatcgaggagggtgtggttgtagtagtgttcgttggtttttaagtttatgttatttttggggtaagagtttggggggtttttagttgtttttggggttttttgtagtttatttagtatatgtttattgtaagcgagttattgtttagttaatggtttatgaaggttgtttttagaggttttatttttttttggttggttagaatatatttgttttttaattttgggttgttagtcgtaaatattttttgagagtttaagatatatttttttatttaggagtattttgtgggtggtgaatattggaaatttatatgaatttagtagggtgagcgttattatatttattttataggtaggaaaagtgaggtataaagagttgagtgttcgaggttatatcgttagttacggaaagttaggttgtttgtttgaattttcgtgagtttatgtatttaatacgtatgtaagattttttttttagtttgtggattttagagtgtgtttttttttagggtaattttttttatttattttttgtttgtgttttttttattgttgttttgtagtgatcggagggagtttttaggattagggttttttttgaagttttataatttgtttcgtatttttattatatatttggttttttgttttcggttttaatttttttttttgtttggttttgatcgtagttttaatttgttgtgattttttattagggcgagtgttttttggatgttagttgttttatttttagtttgtattttttttagagttttatttttttaggtagtttttagtttttagaaggagagcgttttttttttattttagagggagggggtgtgtagttttattttgggttaagtatatagttttatttttatcgtttagggtttggggattttcgtttatttttttttcgttaggtttgggagtgttttcgaaagtgttttaagagtttttaagaaggggtggaggagggttggattatttgtgtttttatttagttttttattttttttcgatttgtcggatagggatagggtgaaggtagattttttttttttttatttttaggggtaaggttttgttaaaatagaattttgtagtcgggtatagtggtttacgaggttagaagtttaagattagtttggttaatataatgaaattttatttttattaaaaatataaaaattagttgggtatggtggcgtgcgtttgtagttttagttattcgggaggttgaggtaggagaatcgtttgaattttggaggcggaggttgcggttagtcgagattgcgttattgtattttagtttgggtaatagagcgagattttattttaaaaaataaaaaaaaagagttttgtttgttttttatttttcgtagttttttatataagatggtttttttttttttttagtttttaggattcggtatttttaggatagtagggttggaggatgttgattgtatttttaattttttttattaatattttaggttttcgaggggagtaggtagagttttagaatatttattaaggttagtaatttatgttgatttaggtttagttttgttttttttatttaagtggtttaaattttcggtgaggggagttattttcgattttttgggtttgttgggtttcgatgaatgttgtttagggatatatgtttggttaggttttggatttagtttagggatgttgggtagtagtaagcgttgagaaagttttttttttgtttttgattttggttttgatttttatttttattttttagattgttaaaggatttagtttttatagtttttcggtatttagggttgggttaagaggggaagttgtgaggggtagttagaggtaggtatggtaggattaggtttttagtcggggcggtagatttgtttagggaagttttgagtttttttttttttattcggttttcggtaggttttttgttttattttggggttggggttgttgagatttgggaggatggataagatttttttagtttatttgtcgggattttggtttaattcgggtggtttagtagggtggagatggaggtttcgaggggttggcggttgttgtttttaggggttgagtgggagtttagtttttaggaatgggcgttagtgtattttcggtatttggatgtagtttttatttgtttttgtgtagttcgagggattcgcgagattttagtgattatagaggtgttagcggtattcggttttaattagttttttttagaggaagttgttttgtggttatcggatgtagacgtataggtcgatagtttgtagggtgatttgggtgggttaggtttaggagtatgtttcgtttattttttttattttattttttaggtaggtagggcggttgttagtggtttattgttttttttatttttgatttttaatttttgtttttgatttttttttttatttttatattaattaatattaataaaaaatttagggtgagaagttttttaagtattgttgtatgtttggtattttagtaattatttgttttattggatttttttagtaatttttgtaagtgagtgttgttgataatatttatttagatgaatagaggtttagttgggttaattattagttttgggttaggcgcggtggtttacgtttataattttagtattttgggaggttgaggtaggtagattacgaggttaagagatcgagattattttggttaatatggtgaaatttcgtttttattaaaaatataaaaaattagttgggtgtggtggcgggcgtttgtaattttagttagttggaaggttgaggtaggagaattttttgaatttgggaggtggaggttgtagtaaattaggattgcgttattgtattttagttttggtgatagtgtaagattttattttaaaaaaaataaatagtaataattagttttgtagtcgtattggggaatattaatattagattgagatttaatttgtaatttagatttgtgtattatgtattttggtggtttttggatgtttgaaattttgaaggtgatagttaagtaaacggagattaaaatttaatagaggttgggtttagtggtttacgtttgtaattttaatattttggaaggttgaggtgggaggattgtttgagtttaggagtttaagattagtttgggtaataaagtgagattatgtttttataaaaaaaaattagaaattagttgggtatggtagtgtatatttgtgtatttggtggttttagttatttaggaggttgaggtaggaggattatttgagtataggaagtcgaggttatagtgagttatgtttgtattattgtatttcgttttgggtaatagagtaagattttgttttaataataataaaaaaggtagttagttgcggtgtgttacgtttagaattttattttagttatttgggaggttaaggtaagaggatcgtttgaggttaggtgtaggagttttaggttagtttgggtaatagtaatattttgtttatattaaaaaaaaaaaaaaaaaaaaaaaaaattagtaaggtatggtgttgtatgtttgtggttttagttattggggaggttgaggtgggaggattgtttgagtttaggaggtcgaggttgtagtaagttatgattgtattagggtaatagagggagagtttgtttttagaaaaaaaaaaaaaaaaaaaaaaaaggtcgggtacggtggtttacgtttgtaattttattttagtattttgggagttcgaggtaggtagattatttgaggttaggagtttaagattagtttgtttaatatggcgaaatttcgttttttttaaaaatatataaaagggaggttaaggtaggtggattatttgaggttaggagattgagattattttggttaatatggtgaaatttcgtttttattaaaaatataaaaaaattagtcgggtatggtggtaggcgtttgtagttttagttatatgggaggttgaggtaggagaatggcgtgaatttaggaggtagagtttgtagtgagtcgagattacgttattgtattttagtttgggtgatagaatgagatttcgttttaaaaaaaaaaaaaaaaaattggtcgggtacggtggtttacgtttgtaattttagtattttgggaggtcgaggttggttgattatttgaggttggaagttcgagattagtttgattaacgtggagaaattttatttttattaaaaatataaaattagttaggcgtggtggcgtatgtttgtaattttagttattttggaggttgaggtaggagaattgtttgaattcgggaggtagagttgtggtaagttgcgattgcgttattgtattttagtttggttaataagagcgaaattttattttaaaaaataataataataataaataaataaaataaagtcggttgtggtggcgtgcgtttataattttagttatttgggaggttgaggtaggagaattgttgaatttaggaggcggaggttgtagtgagttgagattgtattattgtattttagtttgggtgataagagtgaaattttattttaaaaaaataaaataaaaatagggtcgggtacggtggtttatgtttgtaattttagtattttgggaagtcgaggtaggtggattataaggttaagaggtcgagattattttggttaatatggtgaaattttgtttttattaaaaatataaaaattagtcgggcgtgatggcgggtatttgtagttttagttatttaggaggttgaggtaggagaatcgtttgaagttaggaggcggaggttgtagtgagttaagattgtgttattgtatttttgtttggcgatagagttagattttattttaagaaattaaaaataaaaataaaaataaggtcgggttcggtggttttcgtttgtaattttagtattttgggaggtcgaggcgggtggattacgaggttaggagatcgagattattttggttaatacggtgaaattttatttttattaaaaatataaaaaattagttgggcgtcgtagtaagcgtttatagttttagttgtttgggaggttgaggtaggagaatggcgtgaatttaggaggtagagtttgtagtgagtcgagatagtttattgtattttagtttgggcgatagagcgagattttgttttaaaaaaataaataaataaaaataaaaataaataaataaatagatttagtggggtttgtgttattatttggatataaaatttggatgttaagagggaagatagatattgtttggttgttgggagtgtttttgaggatagaataaatttaggaaggatagaggtgtgtgtagtttttaatagtttttgtttttagggtttagttttttttttgtttttttttgtttgttttttgttaagttttttggggtttttatatttttttttttaagtttttatttttttttttttaaaatttttgtttgttttttatatttttttttttgttttattaaatttttgttttttttatttttaattaattttttttaattttttattttttttagtttttgttttttagaattttgggaagtttttaattggaggttttaatttgaaaattttttttgtttttaagtagttggttttggggtggttgttataggatttgaattggggatttttttaggatggaggttttagtttcgaagttttgattatgaattttaggttgtttttttatgtttcgttattagggtgttatttttttgatgatgagttaagagggatatgtgaggaggagggggtcgggattatttgttttgtcgttttattttttttttgtggttatatttaggggttttttaaaacggttatagtagttttttttaaagttgggtatggggcgtatggtgatttatatttgtaagagtaagaaggtttggcggagaggtgaagttagttttgtttatagtaagttaggaggtgttgggtaatttgtttgagaaggaggggaaggagttagtaggggacgtttttgggaaaataggggttttagataggtgaggggttggaattggggggtatttaggttggtaaggtttgggatagaggtattgagaagaggtttggatatgagatgggggaagggtatgggtttgagatgggggatttatgttggggagggtttggggagggaggttttgggtgggtaaaggtttggaatagggtatttggtggggaaggatagggagatgtgggtggggttaacggatagaagtatttggtggggaggaggttggagatggggatttggtttgggaaggagggagagatggggtttttttataagtgaggggttgtggatgggggatattagatatgaaagaggataggttagggagtagaaagggaatatgttagggttagagggacggggggttttgttgtttttagttttttttataggtttggtagttattttttgtgaggatagggatttatttttttttgttttttatttttttattattttatttttgagagcgataatttttttttatgatgaggattttagatgtagagtagggggttgatgggagaggaaggttgtagagggttagtagatttgtaggtgagttttgggggaggtttagggggtttttgttatatttttgagttttatttgttttttttatttgattgtgttttgggattagtagttattttatttagattttgtagttgaaggaagaatatttgtagagagttatagggtttcgtgaggttagttttgagttttttattagggagaaggagtgtttgtttgaaggtgagtgtggtggttataggtataggggaagcgttagaaacggattttttttttgtagaattttttaggggtgtggggtttggtaggatacgggatatattttgagggattgttggagttagattgtttgggtttaaatgttagttttaatatgttgagtcgtgcgatgggtggtagtttgtttaatttttttgcgtttgttttttcgtttttaaagtgggaatataatagtagttatttttgaaggaagttgtaaggatgaattgagatattttttgtaaaatgtttagaacggtgtgtggtatatagtaggtatttgttaaagaaaataagataattttatttataattt

SEQ ID NO: 189 - DNA, 5518 bp, Artificial Sequence
  chemically treated genomic DNA (Homo sapiens)
gtataaattatatttttaagagtggggagaatattgtaaagtatttttttaagtggggtggaggggagaatatattatattagttagagtggggtaggaataaattattatggtggaatgttattagttaaggttatttttattttttttgtggatttttagttgttttcggttatttggatgtgtacgtgtaggttataggggatatgacggtttagtttgggtttagaggtttgatatttattatatggtagttggttttttttaaaggaagtgatttgaaagggaataaggtggaagttgtagtggtttttttgatttgttttgtgaaattatattttgttatttttataatatttttttggttatattgtttagttttattgagtgtgggtagagattatatagtagtatgaatatttggaggtgtgattttttaggtgttattttggatgtgggtttaatagttttgatttagtatttttattattataaagagtttggttgggtgcggtggtttacgtttgtaattttagtattttgggaggttaaggcgggcggattatgagggtaagagatcgagattattttggttaatatggtaaaagtttatttttaataaaaatattaaaattagtagggcgttgttatacgtttatagttttagttatttaggaggttgaggtaggagaattatttgaattcggaggcggaggttgtagtgaattgagattatattattgtattttagtttggcgatagagtaagatttcgttttaaaaaataaaataaagtaaaataaaataaaatatataaaaaagagttttagttaggtatagtgacgtatgtttgtagttttagtattgtgggaaattgaggtaggtggtttatttgagtttaggggtttgagattagtttgggtaatatggtaaaattttttttttataaaatatataaaattagtagtgtatagtggtatatacgtgtagttttagttattttagaagttgaggtgggaggattttttgagtttaggaggtcgaggtggtagtgagttatagttgtgttattgtattttagtttggacgatagagggagattttgttttaaaataaataaataaaaataaaaataaatagttttgattttataattagttaaaaagtgtatttttttatttagtgattgtattgtttagaggtgtatatttgtattaaaagttttttttttttttttttgtaattggagtagggaagggttattttttgttatgattggaagttttttgaggtttttttagaagtagaagtttgtgttatatttgttgtatatagtttgtagaattatgagttaattaaattttattttttttttttttgagatgaagtttcgttttgttattcgaggtggagtgtaatggtacgatttttgtttattgtagtttttgttttttgggtttaagtgattttttggttttagttttttaagtagttgggattataggagtatattagtacgtttagttaatttttgtatttttagtagagatagggttttattatgttggttaggttggttttaaatttttgattttaggtgatttgtttgttttggttttttaaagtggtgggattttaggtgtgagttattacgttggttaaggatatggttttttatagagattttgttttttaaatttataaattgttggaaattttattagtaaaaatgaaatattcgagttttgttgataggatttaatttatttgatatagagtagtagttttgatttttaaagtaggtgtatagttttagataaagggtttttggatgtaatattttatatgtatttttttgtttttagcgatttaggatattggttttattttatagttttgatttaatgttgattttgttttgttttaagttattatttggttgttatttaagttttattttttttttttattttggttttttttttttttttttttttttgagataggttttttttttgttatttagtttgattgtagtgatgtaattgattatagtttacggtagtcgggattttttaagtttaaataatttttttattttagttttttaagtagttgggattataggtacgtattattatatttagttaatttttttttttttttgtttttttttttttttgtttttttttagatagaggtttgttttgttgtttaggttggggtgtagtggtacgattttggtttattgtaatttttgttttttgggtttaagcgatttttttgttttagttttttaagtagttgggattgtaggtacgcgttattatttttagttaatttttttgtatttttagtggagacggggtttcgttatgttggttaggttggttataaatttttgattttagatgatatatttatttcggttttttatatagttggtattataggtgtgagttattacgttcggttttttttttttttttttgttttttagttgatatagggttttattatggtatagtttaggttggttttgaatttttggttttaggtgatttttttgttttggttttttaaagtgttgggattataggaatgagttattatatttggtttttttttttaatttttaaaataaattgattttttaaggttaagaggaaatattttttttgagaagttttttttgaatgttagaggtagataatgtttgatttttgtatgttttttaatatttaattatatagttattgaataatatattttgagagataattatgaattaagtaatatgttggtttttgggagaattgaggataaattaattttgtggaaattttgggtggatgaaaaaaattaatatgaaattaaaatattgtatatatttatagttgtgagaagtattatatattttgggtgttatgcgagttttttttttttttttttttttttttgagttggagttttttttttgttattgaggttggagtgtaaggttacgattttagtttattgtaatttttgtttttagatttaaacgatttttttgttttagttttcgagtagttgggattataggtgtttgttattatatttggttaatttagaatttttagtagggatagggttttatcgtgttggttaggttggttttaaatttttgattttaggtgatttatttatttcggttttttaaagtgttgggattatagaagtgagttattgagtttaattaggagttttttcgagaaagaaggaagtttaagagatttttttgatattttagtttgattttgttttttgtttgtttaaaatttttttatgttttttagcggttttttggatatagattaagttttttttttgataggtttaaattttttattatttgattttagtttatttttttgagttttttttagttgttattattttttgtttaaagtgatatgttataatatttataaagtatataagttttatgtgtatagtttaatgaattgtaaatatgtgtatattcggtcgggtatagtggtttacgtttgtaattttagtattttgggaggtcgaggtaggtggattatttgaggttaggagtttgagattagtttgattaatatagtgaaattttatttttattaaaaatataaaattagttgggcgtggtgtcgtatgtttgtaattttagttatttgggaggttgaggtaggagaattgtttgaattcggaggtagaggttgtagtaagtcgagatcgtgttattgtattttattttgggtaataagagtaaaatttcgttttaaaataataataataataataataataataataataataatgtgtatatttatgtaaatattatttagataaaaatatggtatatttggggtattcggggagtgttttttgtggttttttttttttatattttgttgatttattagtatagattagtttttgttattttttaaattttatattttttttttttttatataaatataaatattcgagttatgattgggtggggtggtttaagtttgtaattttagtattttgggaggttaaggtgcgaggatcgtttgagtttgggagtttagagattagtttgggtaatatagagagattttatttttatataaaaagttttaaaaattaattaggggcggtgtagttttagttatttaggaggttgaggtgggaggttttagttcgggaattttagattgtagtgagttatgattgggttattgtattttagtttgggtaatatagtgagattttgttttaaaaaaaaaaaaaaaaaaaataggaaaaaataaataaatagaaaagtaggtttggcgcggtagtttatgtttgtaattttagcgttttggaaggttgagacggggttattttttgggtttataagttagagataagtttgggcgtgggttatattgttagatttaggtttttgtaaaaaataaaattatttagtttttagttatttataacgttttgtttggaagtatgttattttgggtttttgagtttttgtatttgttaattttttttgcgttggggagagtttaaattttgttcgaaatttttaaaaatggtgtttggataaatgaaggtattagagttgcgattggacggacggttgttggacggcgttattgttggtatttatcgggagatgtttattggatagttacgtgacgggattaaatttttcgagggagcgaggtaggtgcggttacgtgattcggcggcgttgcggggtagcggttattttgcggggcggttacgtgaaggacgtacgtttagcggggtttttacgtgattcgggcgcgttgcggtcgttcgcgcggattcggcgagaggcggcggcgggagcggcggtgatggacgggttcggggagtagtttagaggcgggggtgaggcgggaggtagacgggcgggaggagggcgagttttttcgtcggttcgttcgggattttttttatcggtttggggttgtgcgatttttaagtattgaggggtagaaattttcggatcgggcgttgttagtttttagtttttttcgttttcggaggtttttggttttttgattttcgtgtttcgatttttgtttttttggcgttttcggattttcgagaattaggggatttcggaagttaagttttcgggtaggttcgggtttgtcgttcgtattattttttgtttttggtattggtgggaggggcgggtttcgtttttgtttttttaggttaggggtttggatgtatatagcgtttttttagttttttttttcggggagaatgtaggatataggtttagttttttggtttttttttattagggatttagttgtttgggttttttcgttattttatttgttagggttttagaagtttagggttttagttttgtttttttttagggtcgtgagtttttatagttttttgattttttagaatttaagagtttaggtatttttttttttttttttttttttagg

SEQ ID NO: 190 - DNA, 5518 bp, Artificial Sequence
  chemically treated genomic DNA (Homo sapiens)
tttagaggagaaaggaagggaagaggtatttggatttttgggttttaggggattaggagattgtggagatttacggttttgagggaggatagagttgggattttggatttttgggattttagtagataaagtgacgggggggtttagataattgagtttttgatggagaaaggttaggaggttgggtttgtattttatatttttttcggggaaagaggttaggggaacgttatatgtatttagatttttggtttgagggggtagaggcgagattcgttttttttattagtgttagaggtaggaagtggtgcgggcgataagttcgggtttgttcgggggtttggttttcgagattttttggttttcgagggttcgagagcgttagagaggtagggatcgggatacggggattagagagttaggaattttcgaggacggaggggattggaggttggtagcgttcgattcgggagtttttgttttttagtgtttggagatcgtatagttttaggtcggtaggaaggatttcggacgggtcggcgagggggttcgtttttttttcgttcgtttgtttttcgttttattttcgtttttgggttgtttttcggattcgtttattatcgtcgttttcgtcgtcgtttttcgtcgggttcgcgcgggcggtcgtagcgcgttcgggttacgtgagagtttcgttgaacgtgcgttttttacgtggtcgtttcgtaaaatggtcgttgtttcgtagcgtcgtcgggttacgtgatcgtatttgtttcgttttttcgggaggtttggtttcgttacgtgattgtttaatgagtatttttcgataagtgttagtagtggcgtcgtttaatagtcgttcgtttaatcgtagttttaatgtttttatttatttaggtattatttttagaagtttcgggtagggtttgagttttttttagcgtagaaggaattagtaagtgtaaaagtttagaggtttaaaatagtatgtttttaggtaggacgttatagatgattaaaaattgagtggttttgttttttgtagagatttggatttagtaatatagtttacgtttaggtttgtttttaatttgtgagtttaagagataatttcgttttagttttttaaagcgttgggattataggtatgagttatcgcgttaggtttgtttttttgtttgtttgtttttttttgttttttttttttttttttttgagatagggttttattgtgttgtttaggttggagtgtagtggtttaattatggtttattgtagtttggaattttcgggttgaagttttttattttagttttttgagtagttgggattatatcgtttttggttaatttttaaaattttttatgtggagatgaggtttttttatgttgtttaggttggtttttgaatttttagatttaagcgattttcgtattttggttttttaaagtgttgagattataggtttgagttattttatttagttatgattcgaatgtttgtgtttgtgtaaaaagaaaaggaatatgaagtttaaaaagtggtagaaattaatttgtgttgatagattagtagggtatggaggggaggggttataagagatatttttcgggtgttttaaatatgttatatttttatttgaatggtgtttatatgggtatatatattattattattattattattattattattattattattttgagacggagttttgtttttgttgtttaggatggagtgtaatggtacgatttcggtttattgtaatttttgttttcgggtttaagtaatttttttgttttagttttttaagtagttggaattgtaggtatgcgatattacgtttagttaattttgtatttttagtaaagatggggttttattatgttggttaggttggttttaagtttttgattttaagtgatttatttgtttcggttttttaaagtgttgggattataggcgtgagttattgtgttcggtcgggtatatatatatttataatttattgagttgtatatataagatttgtgtgttttatgaatattatgatatgttattttagatagaaaataatagtaattaaggaaaatttagaaaaatgagttaggattagatgataaagggtttgggtttgttagagaagggatttgatttatgtttagaaggtcgttgggaagtatggggaaattttgagtaggtaaagggtagagttagattagggtgttaggaagattttttggatttttttttttttcgaaaaagtttttggttgggtttagtggtttatttttgtaattttagtattttgggaggtcgagatgggtagattatttgaggttaggagtttgagattagtttggttaatacggtgaaattttatttttattaaaaattttaaattagttaggtgtggtggtaggtatttgtagttttagttattcgggagttgaggtaggggaatcgtttgaatttggaggtagaggttgtagtgagttgagatcgtgattttgtattttagttttagtaataagagggaaattttaatttaaaaaaaaaaaaaaaaaaaaaaaaagttcgtatagtatttaggatgtgtaatgttttttatagttgtaaatgtgtgtagtgttttaattttatgttggttttttttatttatttaaaatttttataaggttaatttgtttttaatttttttagaaattagtatgttatttgatttatagttattttttaaaatgtgttatttaataattgtatgattgaatgttggggagtatgtagaaattagatattgtttgtttttgatatttagagaagattttttagaggaggtatttttttttgattttgaaggattagtttgttttgaaaattgaagaaaggggttaggtgtgatggtttatttttatagttttagtattttgggaggttaaggtaggaggattatttgaagttaggagtttaggattagtttgggttgtattatggtgagattttgtgttaattaaaaaataaaagaaaggagggggggtcgggcgtggtagtttatatttgtaatattagttgtgtgggaggtcgaagtgggtgtattatttgaggttaggagtttgtgattagtttagttaatatggcgaaatttcgtttttattaaaaatataaaaaaattagttgggagtggtggcgcgtgtttgtagttttagttgtttgggaggttgaggtaggagaatcgtttgaatttaagaggtagaggttgtagtgagttaagatcgtgttattgtattttagtttgggtaatagagtaagtttttatttaaaaaaaaataaaaagaaaaggaagtagaaaaaaaagaaaattagttggatgtggtggtgcgtgtttgtagttttagttatttgggaggttgaggtgggaagattgtttgagtttgggaggtttcggttgtcgtgagttgtgattaattgtattattgtaattagattgggtgatagaggaagagtttgttttaaaaagaaaaaagaaaagaaaaagttaagataaagggggagggtagagtttaggtgataattaaatgatagtttagagtaaagtaaggttaatattggattaggattgtgaagtgaaattagtgttttgaatcgttggaaataagaaggtatatgtgaaatgttgtatttagaaattttttatttgaagttgtgtatttgttttggaaattaaggttgttattttgtattaagtggattagattttgttagtaagattcggatgttttatttttattgatagaatttttaataatttatgaatttagagaataaagtttttgtaagaaattatgtttttggttagcgtggtggtttatatttgaaattttattattttgggaggttaagataggtagattatttgaggttaggagtttgagattagtttggttaatatggtgaaattttgtttttattaaaaatataaaaattagttgggcgtattggtgtgtttttgtaattttagttatttgggaggttgaggttagagaattatttgaatttaggaggtagaggttgtagtgagtagagatcgtgttattgtattttatttcgggtgatagagcgagattttattttaaaaaaaaaaaaaatgaggtttaattggtttatggttttgtagattgtgtatagtaagtgtaatataggtttttgtttttggggaggttttaggaagtttttagttatggtagaaggtggtttttttttattttagttatagagaaggaaggaaagggtttttaatgtaggtatatatttttgaatagtatagttattgagtgagggaatatattttttagttagttgtgaagttaaaattgtttatttttatttttatttatttattttgagataggatttttttttgtcgtttaggttggagtgtaatgatataattgtggtttattgttatttcgattttttgggtttaagggatttttttattttagtttttggagtagttgggattatacgtgtgtgttattatgtattgttaattttgtatgttttgtagggagagggttttgttatgttgtttaggttggttttaaatttttgggtttaagtgagttatttgttttagttttttatagtgttgggattataggtatgcgttattgtgtttgattaaaatttttttttgtgtgttttgttttgttttgttttgttttgttttttgagacggagttttgttttgtcgttaggttggagtgtagtggtgtgattttagtttattgtaattttcgttttcgggtttaagtgatttttttgttttagttttttgagtagttgggattataggcgtgtgataacgttttgttaattttgatatttttattagagataggtttttgttatgttggttaggatggtttcgattttttgtttttatgattcgttcgttttggttttttaaagtgttgggattataggcgtgagttatcgtatttagttaaattttttataataataaagatgttgaattaaaattattaagtttatatttaagatggtatttgaggagttatatttttaggtatttatgttgttgtgtggtttttgtttatatttaatagggttaaatagtgtgattaagaggatattgtggaaatgatagagtgtgattttataggataggttagaaaagttattatagtttttattttgtttttttttagattattttttttaaggaaagttagttgttatgtggtgagtgttaggtttttgagtttaagttaagtcgttatattttttgtgatttgtacgtatatatttagatggtcggaagtaattgaagatttataaaagaagtgaaaatagttttaattgatgatattttattatggtgatttgtttttgttttattttaattgatatgatatatttttttttttattttatttaagaaggtattttgtaatattttttttatttttgagaatgtaatttgtat

SEQ ID NO: 191 - DNA, 11422 bp, Artificial Sequence
  chemically treated genomic DNA (Homo sapiens)
atttttatgttattatttttaggaaaaatttaaaatagtttttatatataataaaagtaagttagataaattatattgtatttatataaataattaatatataggtatataaatgaagttaaaaaaatattcgatagtattattttggaaaaatttaagataggttatatgaaagtaggttattaaagattatgtatgatgtatttttaaattagtttgaagtaaaaggtatagttgtgtatgagaataagtaattaaaaaaaagaaaaagtatatatatatatatggtagtataaaaatgtttttagtatttaagttttaggattttgttttttagtgtgtagtttgtgaattttttttattagttttatagaggatagtagtataacgttgtttttaagtttattgaaattaaagtttagggatgtggtttagaaatttggatgtttaaatagtattttgatgaatttgataatgtgttattttgtaatttttttgagagtgagattttaaagatagttaagggtttgggaagagtaaatttaagttaatttagtaaattaggtgataaataaagaagtttgttgtttttttttttttttttatgttttaaaataatgagtttttttttttttgtttaagttttgaataatttagtttagaatttgtttttttattttgattttgttggttttgttaattttatgaaaatttatttggtattatatttttttagaagtttttgtttttttttgattttttttttgtttttagagtttaatattttagtgttttattaaattgttgttgtttttttttaaaatttttttaattaaattatttgtatttttatgtaaaaggtattatagattttttattatttatttttttttaattttaaaatatttatgtgttattttttatagatgttattttttgtaaggttttttatattagttgttataatattattaaagaattttattatttgtggttttggatttatttttaatatttttggagatatttatttttaaatatttgttatatttagttatgagggtttagtatttgggttttagagatatgtttaggttagttttgattataagaatattttttttttttgttagaattgttggaaagttatttttatttaatagtttgtgtaggattttagaagattgaatatatatataaatatatatatatatatatatgtatatatatatatatatatatatgtatatgtattttgtttatgtcgtatttggttattttaattttgggaaaataaattaagaaaataattaaaagatgtatttaaatatcgatatataaaatgtttattgtaataatatataaaaaaagttagaagttaatttcggtatttgtatgatttggagtaagttatttaaattttttgtggttatatttttttaaatgtaaaataaggttaataatagtgtttattttaaaggtagttatgagttttaaatgaatttatgtatttaaagtggatagaatagtgtttttaaataatatttattatttaaaattattattattattatataagtaataagagatataatgaattataatatgtttatatgataatatattatatagtaattaaaatattttaataggaaattaatattataagataaaaagtaagaagaatgatgataagttatttgattattattatatttatttatgtaattataattatatatatatattttaaaaaattgattggaatatataaaatggtttttttattttttgtgatatgtaaaatgtagaaatatatttttttgggttggatgtagtagtttatatttataattttagtattttgggaggtcgaggttggtggagtatttgaggttaggaattcgagattagtttggttaatatagtgaaattttgtgtttattaaaaatataaaaattagttagatttggtggtgggtgtttgtaattttagttatttaggaggttgaggtaggaaaattgtttgaatttaggaggtagaggttgtagtgagtcgagattttgttattgtattttagtttgggcgatagagtgagattttattttaggaaaaaaaaaaaaaaatttatttatttatttatttatttatttatttatttatttatttatttatttatatttatatatatttttttttgttatttatatttattttagagaatgtagtgttattgtaaaaaaaatgaataaaattaatataagtttagagtatttttttggtattagtatgtttaaggaaaattaatgtataatataggattaatgttttttatattattttaaattttattgaatgttgttatttagaaaatagtggtaattgagttataatgggattttaaaagtaaaaaattattgtgattggttaattgaaagtgattatagagttaaaattataatgattgttttgtttaagttttagtatatatggttgtaaaatgtgcgtagtgttaatgtcgtgttaagtgttttgtggtattttattagtgtcgtttataaggtatatttaatatttaatagtaggattattaattatttatgttgtgatgtaatggaatagtgtttttttattaattttgaaataagtttattgtgtgtgatttatattttttcgttggatgagtgtgagaaaatgatgatattatagaagtaaagtagttgttgtaagttgagttataaggaagaaatttttaagataggaagaataaatgttttagaggtgtattaaaataatgaatgaattaatgtggtatagttgtgaaattatgcgaggaaaagaattatagggatagtaatagaaggtggttttttgaagtaaagatattgagaagaagaaaaattgttaatttgtgtaattagttgatgttgttagttagttagtttaaatatgcgttaaagataaagatttgtttgaaattaattattttattgtttggttttttgtttaaagatgaaaatgaaatatgtgtatatatgtgatatattttatttagtagtgagtagatgtaggaagtatgtaaaatgttttgttgaatttattaacgttataaaatattttttaataattgtcgcgtttgataggttgattttatgttagtataggaaataatgtagtggatttgggttggagagaagaattttgatatttggatttttaaaaattatgtatattgaatttatgaatttttatgtggaatattagatttattatattttaaatagaaatgttattattataaaaattattgtaaatttgttaatatatttttatttaaaaagtttttttttgtttttattgatttattgattaatttttttttgagataggattttattttgttatttacgatgaagtgtagtggtataatcgtggtttgtagtttcgattttttaggtttaggtgatatttttattttagttattttttaagtaattgggaatgtaggtttgtattattatgtttgatttatttttttgtagaaattgagttttgttatgttgtttagatttgttttgaatttttagattgaagtaattcgtttatttaggttttttaaaatgttgggattatagttatgaattattgtgttttatttttttttttttttttttagatagattatgtattttgtattttttgtgtaattaatttgttattatataaattatattttaaatatattataaattattgtgattatgatatttattattgaattaatattgtttaagtagtaatttttatagaaaagataattttaaaagattaaaatggttatttttttggaagtagttgatataaaataatagaataatatagattaaaattttgttttttaatagttattagtggtaagaaatatagtaagtttttgatttgtagaaattttagtttttttatttgatgaggtggttaataatattaatttttatatttgttgaaataatataaaatatttaatataaattgttaattataatgattggtataaggtagaattataataaatgttaattatatttgtttgtttgaaaatttaatattttattaaaaggtaaaaaagtgtttatttgtaaatattaatatatgttttttgtttagtttatagaaagtttataagtaagagatttaaaagtgaaagttattatttatagaagattaagaatatattgtattgagaagatagggattaaggagtttattaaaggttttttaaaaaattatttttttgaatattattttaagaaagataagcgttaaagatataaatatattttttagagtatgtgtattgtaagttgataaatgtgttttttttatagagtttggtgaaggttatttattttattttttttgttttgattagaaaattgtggttttttattatgtatgattgtttgtagggttttttgaataggaaattattaatgttgaaatttgtatgatttaaataagtgttgaagtgtgggggttgaaaggagatatatattagagatatttatttagttaatagaattaagtttttgatttgtatagtttatatttagagtattgtgttttttattttttatattattattttttttaattatataattagtatagattgaagttataatggattttaataatagtattattttagaatgatgtatacgtttttaaattttaagataagtataggaaatatgtatatttttaaaaaaaggaaaatttttttaaagtttagagttaaaagaaatatgtattttttgttatattttagattattttagttaaagaattttttatgttttttttttttatttttagaagattatttgtaattgtaaagtatgaattttgtaatatttttgtaaatgaattattattgtatttatattattagtttttgaatagattttaagttgttgttgttaattttcgcgagttttgttagtaatagttgattgttatatttagtaatattgaatgttagtgtagtttaatttataggttggagtagtagttgtattttgtattttttcgaagtattatatgatttttattttttgtaaattttgttatttttgttgtagagaatcgggtaagttgttttgaatttatattttcgtgtagagatttaagttattgtaaagtttattttgtgggatgagagtgatttttttatgtgtttgttgtgtttttttggtgttttgtggggaatagttattgaagtttgtaaatgggatagaggaagtgagttagtaggtatatgtattaaatttttttattatttagggaacgtagattttgtttatttaattgttgagaaaataatgaatttatttaattttgtataaaggattatagtacgtgtggaattattgtgatatatatttttagtgagttttttaagaaaaaatattttatattggtttatttttaaatgtattgtttattgaatttttttgtaaaagtaatttttgattagtttttttttttttttttttttaaatgggataaagttagtagttaatttatttttttttgaataaaatattttttttaattaatattttgttatttaaaattttaatagtaataattggtaaatgagaggtttgtttattttatgtaaataaaaataaaatttgttttttaatttgatttatagtgatttatgagcgtgttttttttgttttttgtgtttattttttatatgtttgtttaaattgtagtaaaatattttatatttgttattattttattattatagaaatagtaagtaaatgtattttttgtttattttataattttgtaaaattattattttgataatattagttttattttaattagggaattaaatattaaggattataaaatttatgaatgattaaaagtaaattgaaatgtgattttattgtttatgatttttatttattatatatttttattttatgagtatgttttttatatttttatgaatatattttatgataataaatttaattaggagtttttgttattagtttgtgtaatgttttttttaatataaattattttatagttataataaatataatgatagtttatttatataagtagttattttgtttaaggataagcgtgagtttttaaagtgtgattttaatatttgaataaaaatttttagaattttttttggatataaaataaagtagttttttggatgttaaataaatttttaattgggttattaaagttttgttttgtttttttaattttttgttgttgttgtttgtttgtattgttttagttttttaattgtaaaaatatgtttgggatgtattttatattttatttttataaaatataagttattaatagttaaataagttatattttatttataaatttggtttttttttcgagttattttttgataagtataatatatatttatattgaatattatttttatttcgatggttttttgttagtatttgtttatttttattaaaattagacggttttagatgttaagagaattgtaattgaatagatagtaatttaagaggagatttaatttttagagaagatttaagaaatttttttaataaatgtttaaattatttatataatgaagtttgtaaatgttttttttaattgaggatagataaaatattttaagttttttatatttaatgtagtgttttttatatgtatatatgtttaaagtatagttgaagaatttttgaaagatagtgatgtagtttatttataattagatttttttaattttttattttatttagtttgtaataaaataagttttttaagtttgatataaagacgtcgttgttttaatttttttaaatatatttaagagagtttgttttagattatattaatattatttagatggttttttttttattattttaagagggtttatttttaagtagaaataaatatttatttaattgtaattttttaaaagatagggaaattatatatagggaaaatattttgaatatttgtttgaatattttttaaaaatttttggtttgttttttattttgaaaatttggttgatatttaagtattttaaaaaatagttttttatataaattattttattatatttatattttatagtataatatttagtattttttgttaaaattagttagggaatattaatagtatttttaaaattgaattaaaaatataaaaaaagatttgttattttttttatttgaaagttattgttataatagtttagtatttttaaaaattgttagtaaatttttttaattttaaataaaaatttagttttttaaaaatttaaattttttaaaaatttaattttttaaaaattagaatggtttgaattttaaataaaaatttttgtttttatttttaatattaaatattattttgataagtaaattgatttaaatttagatatatagttgtatttgtgaaaatgtgttttatttttatgataatgtttatgttattatgtttttttagaattatgtgagatagtatttaattgtattagaatttattaaaagaaaaacgattaaatttgtacgttgtgtatatgtattttaaaatttaaagtataataataataaaattaaaaaaaagaaaaacgataatgttttgttgaatattttaattattaataaaaattttgagatatagatttaatatttttattttatttttatttatttttttttcgattgtttaattatatgataaatatattaaaatttttaaagttttttaatggtaaaattatagagtagtatgttagaatagataatattagattataaaaagggtaaagtgatgtttatttaaaaaataaagtattgtaattaaatataaaaatattagtttataatatattaatagtatatgaatatttgtatatttttatattaaagtatatattaaataatatgttatatgatattttgtaataatatatatgagttagtattatattgttatttttgtaatgaatgtatgtttataagaattgttttgattgttattaattatattatttgtaagttgataatttagatattattatcgaaaaattaaagattttaatttatattatattattatataataagatttatttagtataaaatataaatattaatatataataaattttgtattaaattaagttaagtgatatgggaagatattataattatttagatgttatagtaattgtttaatataaataatgaaatattatattttataattatataaaatataaatatagttttgtagtaattatagtatttgttttgtaataatataaattgtttgtagaataagtttgaaaattattagagattaaaatttattttaatttggtgtttggtttttaaagataaattaatatttaaataaaattaaggaaaaaatagatggtttttgtattagatttagaagaatattgattgagttaggtaagagggagaatgggtataattagggatgatgtaattaatttattaaattgtagtttagaacgaatcgtttaattagttttgtattttatttattttttttttttagaggatgtttttaaaatagaaaataaaaaaaattatattagtattttgtttttttttagatgtttttttgtatttattaaagagaaaaggattagcggttattagaaagaaaaaagaattgaagtagtagagtgtttttaaaattttgattatgtttgaaatgttattagtgttaggtaataggaaattttaagttattgttatattttatttatttatttattgtgatttatgatatagttatataatatataatgatgttttaattaataatggtggttttatataattataatatagtatttttattgtattttttttttgtttatatatatatatagttattattttttaataattgtttatagtatttaggaatatgttatatagatttgtagtttagatgtaatagtttatattatatagtttaaaggtgtggtaggttatggtatttaagtttgcgtgagtatatttataatgtgtgtataatgattagatcgtttaataatgtattttttagaatgtatttttgttaataaatggtatatgataaggatatattatataatagtatttaaattatatataatagtatttaaatattatgaatgtagaaatgttgttaaaaatatattttaattatgttttattgattttagtatatatttaattgtattaaatagaattgaaaaaataataattttgtggtttgatttttttaaaattttattattatagtagttattttatatgtaaatatatatgtatatatatatgaatattgttagaattagatatagaaatagatatatttattaagtattaagttttgaattaaatgttttagattatggattaataaattgagatatttattgggataaaaaatatttgtaggttattagatattttatgattattggtgaattaggttgatttgaaatatgatattttacgtttgggatataggtattagaatagttatttattttttttttttgagaaaatttaaattaaataaataaagataaaattaatataaatgtttagtatttgtaggattcgtttattggttgtgtaggttggattttagtaatttaattatagtatgagaaaaaataaagggaaggttttgtatattaatggatttttgttattattatgtgaatgagaattagtatttgtaattgattattttagttatataaatatattagtttttttatggtcgggcgcggtggtttatgtttgtaattttagttttttgggaggtcgaggtaagtggattatttgaggttaggagttcgagattagtttggttaatatggtaaaattttatttttattaaaatataaaaattatttgggtgtggtgttatatatttgtaattttagttatttgggaggttgaggtagaagaattatttgagtttaggaggtagaggttgtagtgagtcgagattatattattgtattttagtttggcgatagagtgagattttattttaaaagagatattagtttatttaaatgatatttgtattatattttgttgtttttttttgttatagagtttttaaatttgatttttaattttttttttattgaaaagaaatttatatttgtattatgaatttttgataaaatttagattttttttaatagtttatgttatttattaaatattattttataaatgttaaatatttatgattttgtaggttataaagattatttttgtttttgttatgtggtttaatagtttttaagttttgattttttaattttagttattttttttattataaaaaatgtaaataattttgattgtgttaatatatttagttttattagttgtatatattttaatttgttaataaattgttataataaatatgaatatatattgagtaatattgagtataaaattttttttaagttataatttttttttagatattataatgttagtttttggttttttttattgatattataaatttggtaaagagttttttatgtttattaaattttggagaaattatttggaatatatttttagttttcgttttttattttttttatagtttttattagtggtagtatgtttgttagtttttataatttgtagaataaatggtgattattatatatttgttatttaatattttgtgaataaattgtttaaattttttttagtttgtataataggattgtatagaggaagatgttatttggtaaaagggattatagaaaagataaggaaaatagaaaaggataataatgataatttattgatttttaaaagtttttaatttatttaataattttgttaagaattagttagttatgatattttagagaatatatgaatttgtattttttttttttattaaggtagaaattatatttgatgtaggtagattattgtttattgtttttttggtggagttgtatatatagttagaagtaatattaaatttggttaggataaatattttatttaaaatattagtttttttttataaagatttgataataaatatttttaaaatgaatattttttattttttattttattatttttttttttaaattgaaaattaaaatatttttgttttttatttttttttatgtaggtttttatagaagtaggtttatttgtttttataatttgtagaattattaacgattatattttaggtaattattattaataaagtataatatgttatatgtagaaggtttataaaatattatatttattttttttttaga

SEQ ID NO: 192 - DNA, 11422 bp, Artificial Sequence
  chemically treated genomic DNA (Homo sapiens)
tttgaaagagaggtaagtataatgttttataagttttttgtatatagtatattatattttattgatgataattatttaaaatatagtcgttagtaattttataaattatgaaaataaataaatttgtttttgtaaaggtttatataggaaaaaatagaaaatagagatattttagtttttaatttagaaaaaaaaatagtggaatggaaaataaaaaatatttattttagggatatttattgttaaatttttgtaaggaagagttagtattttaaatagaatgtttgttttagttaaatttaatgttatttttgattatatgtatagttttattaaaaaagtagtaaatagtagtttatttatattagatataatttttgttttggtaagaggagaaaatataagtttatatattttttgaaatattatgattggttggtttttggtagaattgttaagtaggttaagaatttttaaggattaatagattgttattattgtttttttttgttttttttgttttttttgtggttttttttgttaagtgatatttttttttatataattttattatataaattgaagagaatttagataatttatttatagaatattaagtaataaatatatggtagttattatttattttataaattgtaaaaattaataaatatgttattattagtaagggttatggaaaaaataaagagcgaaggttgaggatatattttaggtaatttttttaaaatttaataaatatgagggattttttattagatttataatgttaatagagagaattaggggttagtattataatgtttgggagaagattgtggtttaagaggaattttatatttagtattatttaatatgtatttatatttgttatagtaatttgttaatagattaaagtatatgtaattagtgaagttaaatgtgttagtatagttagaattatttgtattttttataatgaaaaaaatgattgaaattagaggattaaagtttagaaattattgggttatatggtagaagtaaaaataatttttgtgatttataaaattataagtatttgatatttatgaaataatatttaatggatgatatagattattagaagagatttaagttttattagaaatttataatgtagatgtgagtttttttttaataaaaaagaaattaaaaattagatttggaaattttgtgataaagagggatagtaaaatgtgatgtaaatattatttaaatgaattaatgttttttttgagatggagttttattttgtcgttaagttagagtgtagtggtgtgatttcggtttattgtaatttttgttttttgggtttaagtgatttttttgttttagttttttaagtagttgggattataggtgtatggtattatatttaggtaatttttgtattttagtagagatggggttttattatgttggttaggttggtttcgaatttttgattttaagtgatttatttatttcggttttttaaagagttgggattataggtatgagttatcgcgttcggttatagaagaattaatgtgtttatataattaaaatagttaattataaatattgatttttatttatataataataataaagatttattaatgtataaagttttttttttatttttttttatgttgtaattaggttgttgaaatttaatttatataattaataaacgaattttataaatattaagtatttgtattagttttgtttttgtttatttaatttagatttttttaaagaaagagaataaataattattttaatgtttatgttttagacgtagggtattatattttaaattagtttaatttattaatggttataggatatttagtgatttataagtattttttattttaataaatattttaatttattaatttatggtttggagtatttggtttagggtttgatatttaatggatatatttatttttatatttaattttaataatatttatatgtatatgtatatatatttatatataaaatgattgttataataataaggttttaaaaaaattaagttataagattattatttttttagttttgtttggtataattagatgtgtgttaagattaataaaatataattaaaatatatttttagtagtatttttatatttatgatatttaggtattattatatataatttaggtattattatataatgtatttttgttatatgttatttattgatagggatatattttaagaaatgtattgttaggcgatttaattattgtgtatatattataagtgtatttacgtaaatttagatgttatagtttattatatttttaggttatatggtataggttgttgtatttaggttataaatttgtataatatgtttttgaatattgtaggtaattgttagaaaatggtaattgtatgtgtatgtaaatagagaaaaggtatagtgaaaatattatattataattgtataagattattattattgattgaagtattattatgtattgtatgattgtattataaattatagtaaataaataagtaaaatataataatgatttaaagttttttgttatttgatattaataatattttagatataattaaagttttagaggtattttattgttttagtttttttttttttttgataatcgttaatttttttttttttaataaatgtaggagagtatttggagaaaaataaagtgttagtatgattttttttattttttgttttgaaaatattttttgggaagaaaaagtgaataaggtgtaaagttgattgggcggttcgttttaagttgtaatttaataaattaattgtattatttttggttgtatttatttttttttttgtttagtttagttaatgtttttttaagtttaatgtaaaagttatttattttttttttgattttatttgaatattagtttgtttttagaaattaaatattaaattgaaataaattttggtttttgatagtttttaaatttgttttataaatagtttatattattgtaaagtaagtattatagttgttataaaattgtatttgtgttttgtgtaattatgaaatgtgatgttttattgtttatgttaaatagttgttataatatttaaatggttgtaatatttttttatgttatttaatttgatttaatataaaatttattatatgttgatatttatattttatgttgagtaggttttgttatataataatatggtatgaattaaaatttttaatttttcgataatgatatttgagttattaatttgtaaataatgtaattggtaataattaaagtaatttttgtaagtatgtatttattgtaaaaatgataatataatgttaatttatatgtattgttgtagagtgttatatgatatattatttaatgtgtattttaatataaaaatatgtagatgtttatatattgttagtgtattgtaggttaatgtttttatatttaattgtagtattttattttttaaataagtattattttgttttttttataatttggtattatttattttaatatgttattttgtagttttgttattaaaagattttaaaaattttgatatgtttattatgtaattgagtaatcgaaagagaaataaatgaaaatagaataaaaatattgagtttatattttaaaatttttattaatgattaggatatttaataaaatattatcgttttttttttttttaattttattattattatattttaagttttagggtatatgtgtataacgtgtaggtttgatcgttttttttttaataaattttggtgtaattggatattgttttatatgattttgagagaatatagtagtataaatattattataaaaatggggtatatttttataaatatagttgtgtatttgaatttagattaatttgtttattaaaatagtatttaatattggaaataaagataggagtttttgtttggaatttagattattttagtttttgaggaattgagtttttgaggaatttgagtttttgaggaattgagtttttgtttggaattaagaaaatttattggtaatttttgaaaatgttaaattgttataataataatttttaaataaaaaaggtgataaatttttttttgtatttttaatttaattttgaaagtattattaatattttttagttgattttaataaaaaatattaaatgttatattataagatgtgagtgtgataaaataatttgtataaagagttattttttgggatatttgaatattaattagatttttaaaataagggataagttaagaatttttaaaagatgtttaagtaaatatttaaaatattttttttgtgtataatttttttattttttaaaaagttataattaaataaatatttatttttatttggaaataaatttttttaaaatggtagagaaagagttatttagataatattaatatgatttagaataagtttttttaaatgtatttgaagaaattggaataacgacgtttttatattaaatttaaaaagtttgttttgttgtagattaagtgaagtggggaattgaggaagtttgattataaatagattatattattgttttttagggattttttagttatgttttaggtatgtatatatatagaagatattatattagatataagaaatttaagatgttttatttgtttttaattaggaagaatatttgtaaattttattgtgtgaataatttgaatatttattagagagattttttgagttttttttgaaaattaaatttttttttaggttgttatttatttaattataatttttttaatatttgggatcgtttaattttggtaagaatgagtagatgttggtaagaaattatcgaaatgaagataatatttaatgtaaatatatattatatttattaagaaatgattcgaagaaggaattaaatttatagataagatgtgatttgtttagttattagtagtttatgttttataaaaatgaaatatggaatatattttaaatatatttttataattaaaaaattaggataatataaataaataataataataaaaaattaggagaataaaatagaattttgataatttaattagaaatttatttggtatttaaaagattattttattttatatttagagaaaattttgaagatttttatttaaatgttaaagttatattttaaaagtttacgtttatttttaaataaagtaattatttatataagtaaattgttattgtatttattgtaattatgagatagtttatattaaggaaggtattatatagattagtgataggagtttttaattgagtttattattatgaaatatatttataaaaatgtagaagatatatttataaaataaaaatatataataaatagaaattataaataatgaaattatattttagtttatttttagttatttatagattttataatttttaatatttaattttttggttaaagtggaattgatgttattaaaataatagttttataagattataggatgagtagaaagtatatttgtttattatttttataatagtaaaataatagtaaatgtaaaatattttgttataatttaaataaatatataaaaagtgaatataaagggtaaaggggatacgtttataaattattgtaaattaaattagaaaataggttttgtttttatttatataaaataaatagattttttatttgttagttgttattgttaaagttttaggtgataaaatgttgattgagaaaagtattttgtttaggaaaaagtaagttaattattaattttattttatttaaaaagaaaaaaaaaggaagattaattaaagattatttttatagagagatttaataaataatgtatttaagggtaagttagtatgaaatgtttttttttaggaaatttattaagaatatatattatagtgattttatacgtgttatggttttttatatagagttgaataaatttattatttttttagtagttaaataaataaagtttgcgttttttgaataataggaagatttgatgtatgtgtttgttggtttattttttttgttttatttgtaagttttagtaattgttttttatagagtattaaagggatataataaatatatgaagagattatttttattttatagaatgagttttatagtaatttggatttttatacgaaggtgtaaatttagagtaatttattcgattttttgtaataaagatggtaaagtttgtaaggagtgaaaattatgtaatatttcggggaaatgtaggatgtagttgttgttttagtttgtaaattggattgtattgatatttagtgttattgaatgtaataattaattgttattgataaagttcgcgagagttggtagtagtaatttgaaatttgtttagaggttaatggtataaatgtaatagtgatttatttatagaagtattataggatttatgttttataattgtaggtagttttttaagaatgaagaaaaaaagtatagaagattttttaattaaaataatttgaaatgtaatagaaaatgtatgttttttttaattttaaattttaaaaaaatttttttttttttaagaatatatatattttttatgtttgttttaagatttaaagacgtatatattattttaaagtagtgttattattgaaatttattatagttttaatttgtgttaattatatagttagagaagatagtaatatagaaaataagaaatataatgttttagatataagttatgtaaattaaaaatttagttttattaattgaatggatgtttttgatatgtatttttttttaatttttatattttaatatttatttaagttatataaattttagtattggtaattttttatttagaagattttgtaggtagttatatatgatgagaagttataattttttggttaagataggaaaaataaaatgaataatttttattaaattttataaaagagatatatttgttaatttgtagtgtatatgttttggagaatatatttatgtttttggcgtttattttttttgaaatgatgtttaggaaaataattttttaaaaaatttttgataaattttttaatttttatttttttaatgtaatatatttttaattttttgtaagtgatagtttttatttttgaattttttatttgtgggttttttatggattaaatagaaggtatgtattaatatttgtaggtgagtatttttttgttttttaatagagtgttaaatttttaaataagtaaatataattagtatttgttgtaattttattttatgttagttattataattgataatttatattaaatattttatattattttagtaaatatgagagttaatattattaattattttattagatgagaaagttaaggtttttataaattagaagtttattatattttttattattagtagttgttggaaaatagaattttaatttgtattattttgttattttatgttaattgtttttaagagaataattattttggttttttaaaattattttttttgtgaaaattgttatttaggtagtgttaatttaatgataaatattatgattataataatttataatgtatttagaatatagtttatgtaataataagttagttatataaaaggtatagaatatataatttatttgaaaaggagaaaaaggaggtggagtatagtggtttatgattgtaattttaatattttaggaggtttaagtgggcggattgttttagtttgggagtttaagataagtttggataatatagtaaaatttaatttttgtaagaaaatgggttagatatggtggtgtaagtttatatttttagttatttgggaggtagttgaggtaagagtattatttgagtttaggaggtcgaggttgtaagttacgattgtgttattgtattttatcgtgggtgatagagtgagattttgttttaaaaaaaaattaattaataaattaataaaagtaggaaaaggttttttaaatggaagtatattgataaatttgtaatggtttttatagtgatggtatttttgtttaaaatatagtaaatttgatgttttatatgagagtttatgggtttaatatatatgatttttaaaaatttaaatgttaaaatttttttttttaatttaagtttattgtattgttttttgtgttagtataaggttagtttattaaacgcggtaattattaaggaatattttgtgacgttagtgaatttagtaaagtattttatatgttttttgtatttatttattgttaggtaaaatatgttatatatatatatatattttatttttatttttaaataggaagttaaataataaaataattggttttaagtagatttttatttttaacgtatgtttaaattggttaattagtaatattaattgattatataagttggtaattttttttttttttaatgtttttattttaaagaattattttttgttattgtttttgtagttttttttttcgtatgattttatagttatgttatattagtttatttattattttagtgtatttttaaagtatttattttttttgttttgagagttttttttttgtggtttaatttatagtagttgttttgtttttgtggtgttattatttttttatatttatttagcggaaggatgtaggttatatatagtgagtttgttttagggttagtagggaagtattattttattatattatagtatggatggttaatgattttgttgttaaatgttgagtatgttttgtaagcgatattgatgaaatattataagatatttgatacggtattaatattgcgtatattttgtaattatatatgttgaagtttgggtaggataattattatggttttggttttatgattatttttagttagttagttatagtggttttttgtttttaaggttttattgtaatttagttattattgttttttagatagtagtatttagtaagatttgagatggtgtgaaaaatattaattttgtattatatattagttttttttaggtatattgatgttaaaaaagtgttttaaatttatattaattttatttattttttttataatagtattgtattttttgaaatgaatatggataataaagaaaagtatatataagtatagatagatagatagatagatagatagatagatagatagatagatagatagattttttttttttttttttgagatggagttttattttgtcgtttaggttggagtgtagtggtaggatttcggtttattgtaatttttgttttttgggtttaagtaatttttttgttttagttttttgagtagttgggattataggtatttattattaaatttggttaatttttgtatttttagtagatataggattttattatgttggttaggttggtttcgaatttttgattttaggtgttttattaatttcggttttttaaagtgttgggattataggtgtgagttattgtatttagtttagaaaagtatatttttatattttatatattatagagaatgaaaagattattttgtatattttaattaattttttaaaatatgtgtatgtggttatagttatatagataaatatagtggtagttaaatggtttattattattttttttgttttttattttatgatattaattttttattaaaatattttgattattgtgtgatatattattatatgggtatattatggtttattgtattttttgttatttatatgatgataataataattttaggtaataaatattatttgaaagtattattttatttattttgaatatatgaatttatttaaaatttatgattatttttaaaataagtattattattaattttattttatatttgagaaaatatagttataaagagtttaagtaatttgttttaaattatatagatatcgaggttagtttttgattttttttatgtattattataataggtattttgtatatcgatatttgagtgtattttttaattatttttttaatttatttttttagaattggaataattaaatacgatatggataaagtatatatatatatatgtgtgtgtgtatatatatatgtgtgtatgtatatatatttatatgtatatttaattttttgaaattttatatagattgttgaatagagataattttttaataattttggtaaaaaagagaaatgtttttataattagaattaatttgaatatgtttttggagtttaggtattagatttttatagttggatgtggtaggtgtttgaaggtggatatttttagagatattagaagtaggtttagagttataggtaataaaattttttagtgatgttgtagtaattaatatggaaggttttgtaggaagtgatatttgtaagggataatatatagatattttggggttaagggagagtgagtgatgggaggtttgtggtgttttttatatgaagatatagatagtttggttaaaggagttttggaaagagataataataatttggtgagatattagaatattagattttaagaatagaaagaaaattaagaaaaagtaagagtttttaaggaaatgtggtgttaagtggatttttatggaattggtaaagttagtagaattaaagtaagaaaataaattttgaattaaattgtttagggtttgagtaaaaaaggagaaatttattgttttaaaatataaaaaaagagagaaaaatagtaagtttttttgtttattatttaatttattgaattggtttaaatttattttttttaaatttttgattatttttggagttttatttttagaaaaattgtaaagtaatatattattaaatttattaaagtgttatttaaatatttagatttttaggttatatttttgggttttggttttagtagatttgaggatagcgttatattattgttttttgtgaagttgatagagggagtttataaattatatattaagaggtaaagttttggagtttggatattaaggatatttttgtgttattatatatatatatatgtttttttttttttttaattgtttatttttatgtataattgtattttttgttttaagttaatttggaaatatattatatatagtttttggtagtttatttttatataatttattttaagtttttttaaaataatgttatcgaatatttttttaattttatttatatgtttatgtattaattatttgtataagtataatataatttatttaatttgtttttattgtatatgaaggttattttaaattttttttggaaatagtaatataaaaat

SEQ ID NO: 193 - DNA, 6120 bp, Artificial Sequence
  chemically treated genomic DNA (Homo sapiens)
gtgattttgataaattgggtattatttagaggtttagtagggtttaattattaggtagtttaattttcggttttaggattatttcgagtgtggttttgttgaaaatttttttgttgatttttatttcggtcggttcgtatatattcgttaggatagaggtgttatttgaggagatagtagggagggttttatttatagtttttttgtttttggggttttatttgtggtattgagtttgacggttagggttttttacgttattttcgttatttgttggtattgattttttgagtatttattttattttttttatttgtaaaatggggaaaatagtagttttttttcgttagcgttttgtgaggattaaaggatataatttatagaaaatatttagaatattgcggggtttacgttgaatgtgtaatagattttagttgtattagtaatattcgtttatttaggtatttaggtagggttttatttttattgtttaggttggagtgtagtggtgttattacggtttattgtagttttgattttttgggtttaagtgattttttcgttttagttttttaagtagttggaattataggtatgtgttattatgtttgattaatttttatatttttagtagagaggggattttgttatgttgtttaggcgggtttcgaatttttgggtaattgtaattttaaggtgttaggattataggcgtgagttattacgtttggttttgatattagtaatttttttttttttaatgagatggagttttgttttgtcgtttaggttggagtgtagtggcgtaatttcggtttatcgtaatttttgtttttcgggtttaagtagtttttttgttttagtttattgagtagttgggattataggcgcgcgttattatatttggttaatttttttatttttagtagagattgggttttattatgttggttaggttggtttcgaattttttgattttatgatttgttcgttttttaaagcgttgggattataggcgtgagttattgtgttcggttggtattagtaatttttaataggaagttttttttgaaagttaattatttttttttttattgtagttgtttttaatttttttttttaaagtttttttagtttagttttttttttaggtattggtttttaaattttgtattagtttggatatttgagaaagggataatatttggaatgaattttgattttttatttttttagaagttatgaacggggtataggaggtaaaatttaagaaataaatagtttggtttttagtattgtttgttgtaattttagtattttgggaggttgaggtgggtggattatttgaggttaggagtttgagattattttagttaatatggtgaaattttatttttattaaagatataaaaattagttgggtatagtggtgggtgtttgtaattttagttatttgggaggtcgacgtaggagaattgttggaatcggggaggcggaggttgtagtgagtcgagattatattattgtattttagtttggataataatagtaaggtttagttttaataaaaaaaaaaaaatatattttaggttaggtatggtggtttatatttgtaattttagtattatggaggtttaggtgggaggattgtttgaggttaggagtttgagattagtttgagtagtataggaagatttttgtttttatttttttttttgggatagagtttttttttgttatttaggaggttggagtgtagtggcgtaattttagtttattgtaattttcgttttttaggtttaagtgatttttgtattttaatttttagagtagttgagattataggtgcgtgttattatattcgattaatttttgtatttttagtagagatgggtttttattatgttggttaatttggttttagaatttttgattttaattaagcgaggtggtttacgtttgtaattttagtattgtgggaggttgaggtaggtggattatagggttaggagtttaagattagtttggttaatatggtgaaatttcgtttttattaaaaattataaaaattagtcgggcgcggtggtacgtatttgtggttttagttatttaggaggttgaggtagaagaattgtttgaattcgggaggtggagggtgtagtgagttacgattattttattgtattttagtttgggcgatagggcgagattttattttaaaaaaaaaaaaagaaaaaaaaaaaaagaatttttgattttagaggttttttaaagtgttgggattatcgttgtgagtaattgtattcggtttttttttaatttttacgttcgaagaaattttaggtattttaatttagtataagcgttaagtttgagggagggtttgggaaggtttttggttaaggtcgtattttttgggaagtttaatttgtttttatacggaaggtatgtttagttttaggagaaattgttttgaggattggagaagttattaaaatagaatttgtttttggttttagatgaattgtttgtgttttgttcgagtataagagtttttttttttttatttttttgaagacgtggttttagtaatttttttttttgttgattttataataatttataatttttgttttatttatttgatttttttatagtagaatttttgaatagttgtttttttttttttttttgtgattttattattttattgcggtagtttaatatcgttattattgatttttaaatgattaatttttttatgattcggttgttagtaaggttgaaatagttggttagtttttatattttagatatgttttttttttggttttaggttattattattttttggtttttttttaattttttgggcgttttttttgagttttttttgttagtttgttatatgtttttgattgtttaagttggaaggtttagggtttggttttgggatttttttttttttttatttatatttatttcgtttaggtaatagtttgaaatattatttatatagttagagagttttaaattgtttatgtttagtttgggttttttttttgatttttagatttgtatagatttgggtagaaattttagttatgtttgaattttttttttcgtatttaaattaaattatacgtaagttttgttcgtattatttttaaattatatttagaattttattatttttattatttttgttttggttggagttattattatttttttgtttttttttatattttttataattaatatagtagttaaattttgttaaaatgtattggggttgggcgtggtggtttatatttgtatgagtattttgggaggaggattgtttgagtttaggagtttaagattaatttgggtgatatcgtgagacgttgttttaattttttttttttttgagatagagttttgttttgtcgtttacgttggagtataatggtacgatttcggtttattgtaatttttgttttttaggtttaagtgattgttttgttttagtttttcgagtagttgggattataggcgttcgttattatgtttggttagtttttgtatttttagtagagatagggtttcgttatgttggttaggttggtttcgaatttttgattttaggtgagttataggttttggttttttaaagtgtggggattataggcgtgagttatcgttttcggtttttcgttttaaacgttaaagagaaatatttttggagttaatttatttttgagagttatttagttaggaaaaggggatatttgttttataggtaagatttgttttaattttttttttttttttttttttgatttgttttaattttagggatatttatttgtgtggagagatgtagtgaggtagcggtggggatgtattttttaatttagcgtaatgatattatttttaatttgaggagtatttacgtgggtgaaagattcgttatagtttatagtatgtaaatagataggtttgttttagttcgggatgtaaggatttagagggtgtgtgtgtggggggtgggggtgggagggtggaggaggaatcgagttaagggggatatttattttggcgaggtgattttttttattttgaaatattaatttttgggcggatagtttgtttttttttttatttttagagatagttataaagatggaattatttttttttttttagtcgtgagggagagatgtgtgtatttttgcgtatttagtagtatttaatcggataagaaattatgtattaacgtaggagtgatatttattagttggtatcgtgaggaggtgggtattcggttgtatagtatacggtagtttttttttaaaagaaagatttgggtgaagtttttattttgtaggaaggaagtagagttatttggtcgcgatagtaggttttgttcgtaggtaaagtgtcggaggttgtagttaggatttcgagggttggattttgttttatttttagtacggattttggcgttagtatgcgtttttttttttatcgcgtcgagtttacgtgcggttgtagttgttattttcgtttggtagcgcgcgtcgtaaataggttgcgtaattagtgcgtacgcgtcgggttgggttatttttttgggcgttcgtacgtggtttagcgtttattaataatttggtttcgtttagttttattttttaattttggtaacgttattggatatttgggaatagaaggtaggttttggtattgattcgttttattttgggttttcgggttttaaatttttgaggttttggttaggttgtttttttttttgtttgttataggagtaattataatgaggcgattggagaaaattttgggtagatagatttttttttttttaaatttttgtgtattttatttattatagaacgggaagaagatggtttttttgttagatggtgttggagtttgcgttaggtatataaagaggtagtttcgaatttagtttacgtgagtgtcggatcgttgagtggttgttagttaagatggcggtagcgatcgttgtagcgagggtttggcggttaaatcgtggtttgagttaggttgtttttttgttgttgcggtagtttggggttcggggattggttagatttgtgagtatttgggttttaggcggtttttttaaaggggattagggatgtaaaggttatttttagagtgtggggtttttgaaggatatgaaggaagggttgttataaaagggaaaaagagtgggagattttttggagaagatatcgaagggaagatttgttatttttttaggagacgaaaagaatttttatttttttaggagaggaaaaaattcgtttgtaatttttttgtgggttttgagggagacgatttgaagagagagatgggggttttttattagttgttattggtatttaggggaggttttttggaggaataggggaagatcgtaagatttttttttttagggtttggagaatgaaattgattttgtaagggagggatttttttttgggtaaagatttttttttaagaagaagaaagaagagaataggtttttgttataggttgtatagggttttgtatttttttgtttttttgttataattttgattttaaaatgaattgtgtaaaaaatttgtttgatttttgtgttttttgatcgaatattaagatagagaattcgtgtgttttggatattgtatagaggagacgattaatatttgttgaattaatgaggggaaaaaaggagggagagaggtatagatagggtattttgtttatattttttagaaatatttgagaaggttttgttttttgttaaaagggttataatttttttaggtggatgttgttaagggtaagattatattgtaaaaaatttaggtggaagtttatttttagacggggagaggtaatgggttgtagaagagttttgaattatagttgatagataggagagtagtggttatatgggtggatgtatgtttttgttttgtcgttttttatttgtgtagttttggttaacggattgtatttttttggatttatggagttaatttttttttttaaaatattaatagtggttattttatagggttgtgaaaaattaatatgtaaaat

SEQ ID NO: 194 - DNA, 6120 bp, Artificial Sequence
  chemically treated genomic DNA (Homo sapiens)
attttatatattgattttttatagttttatgaggtggttattgttaatattttagagaggaaaattagttttatagatttagagaagtgtagttcgttggttaaggttatataagtggaaagcggtagagtaaggatatgtatttatttatgtaattattatttttttatttgttaattgtagtttaaagtttttttgtaatttattgttttttttcgtttaaagataggtttttatttaggttttttgtagtgtaattttgtttttagtagtatttatttgaagggattgtgatttttttgataagaaataaagtttttttaagtgtttttaagaaatgtgggtaaagtgttttgtttgtatttttttttttttttttttttttttattaatttaataaatattaatcgttttttttgtatagtgtttagaatatacgaattttttgttttgatattcgattaagagatataggaattaaataaattttttatataatttattttaaaattagaattgtggtaaaggagtaaagaaatataaggttttatgtagtttgtgatagggatttgttttttttttttttttttttgaagagggatttttgtttagaagaaagttttttttttataaagttagttttattttttaaattttgagggagaaggttttgcggtttttttttgtttttttaaggagttttttttgaatattagtggtagttaataaggaatttttatttttttttttaagtcgttttttttagggtttataaagaagttgtaaacgggttttttttttttttaaagaagtggaagtttttttcgttttttaaggaagtggtagatttttttttcggtgttttttttaaggagttttttatttttttttttttttgtgatagttttttttttatattttttagggattttatattttgaagatagtttttatatttttaattttttttgggaaaatcgtttggggtttaggtatttatagatttagttagttttcgagttttaggttgtcgtagtagtaggagggtagtttggtttaaattacggtttagtcgttagattttcgttgtagcgatcgttatcgttattttggttaataattatttagcggttcggtatttacgtaggttagattcggggttgtttttttatgtgtttgacgtaaattttagtattatttgataagaaaattatttttttttcgttttgtggtagatagaatgtatagagatttggagaaaaaaaaatttatttatttaaaattttttttaatcgttttattgtagttatttttgtaataggtaaagaagagggtaatttgattagggttttagggatttagggttcgggggtttagagtaaagcggattaatgttaaggtttgttttttgtttttaaatgtttaatggcgttgttagagttaggaggtgggattgggcggagttagattgttggtaaacgttaagttacgtgcggacgtttaggaggatggtttagttcggcgcgtgcgtattggttacgtagtttgtttgcggcgcgcgttgttaggcggaagtgataattgtagtcgtacgtgggttcggcgcgatggaggaggagacgtatattgacgttaaaattcgtgttgaaaatggaatagggtttagttttcggggttttggttgtagttttcggtattttgtttgcgaatagaatttgttgtcgcggttagatggttttgttttttttttgtaaggtaagaattttatttaggttttttttttggagagggattatcgtgtattgtgtaatcgagtgtttatttttttacgatattagttggtaaatgttatttttgcgttgatgtatgattttttgttcgattgaatattattaaatacgtagggatatatatattttttttttacgattagaaaggagaagatagttttatttttgtaattatttttgagaatgagaggaggggtagattgttcgtttaagaattgatattttagaatagggaaaattatttcgttagggtaaatattttttttaattcgattttttttttatttttttatttttattttttatatatatattttttaggtttttgtatttcggattgaagtaaatttgtttatttgtatattgtggattgtggcggattttttatttacgtaaatattttttaaattgaagataatgttattgcgttgggttgagaaatatatttttatcgttattttattgtatttttttatataagtaaatatttttaagattagggtaagttaaaaaaaaaaaaaaaaaaaagattagggtaagttttatttatagagtaaatattttttttttttagttaaataatttttagaagtagattaattttaagaatatttttttttaacgtttgagacgggaggtcgggggcggtggtttacgtttgtaatttttatattttgggaggttaagatttgtggtttatttgaggttaggagttcgagattagtttggttaatatggcgaaattttgtttttattaaaaatataaaaattagttaggtatggtggcgggcgtttgtaattttagttattcgggaggttgaggtaggataattatttgaatttgggaggtagaagttgtagtgggtcgagatcgtgttattgtattttagcgtgagcgataaagtaagattttgttttaaaaaaaaaaaaaattgagatagcgttttacgatgttatttaggttggttttgaatttttgggtttaagtaattttttttttaaagtgtttatataggtatgagttattacgtttagttttaatatattttaataaaatttggttgttgtgttgattgtggggagtatgggggaaaatagggaggtgatggtggttttagttagagtaggagtagtggaggtgatgagattttggatgtagtttgaaagtaatacggataaaatttacgtatagtttggtttgagtgcgaggaaaaagatttaggtataattaaggtttttgtttagatttgtataagtttggaaattagaagagagatttaagttggatataggtaatttggaattttttggttatatagatggtattttaggttattgtttgaacgaagtgagtgtagatggaaaagagaagaggttttaggattaagttttaggttttttaatttgagtagttagagatatgtgataagttagtaaaggagatttagaaggaacgtttagagagttagggggaaattaggagatggtggtgatttggggttaagaaaagagtatgtttgagatgtgagggttgattagttgttttagttttattgatagtcgggttatgggagggttgattatttggaggttagtggtgacgatgttgagttgtcgtaatggagtggtggggttatagaaaaggaagaagaggtagttgtttaggagttttgttgtaagaggattagataagtggggtaggagttgtagattgttgtggggttaataggggagagaattgttggagttacgtttttaagaaggtgagaggggagagatttttgtgttcgggtaaaatataggtagtttatttggagttagaggtaagttttgttttggtaatttttttagtttttagggtagttttttttggaattaagtatatttttcgtgtaagggtaaattgggttttttaggaaatacggttttaattaaggatttttttaggtttttttttaggtttagcgtttatgttgaattgagatatttaaagttttttcgaacgtaagaattaagaagaggtcgggtgtagttgtttatagcggtaattttagtattttgggaggtttttgaggttaggagttttttttttttttttttttttttttttttgagatggagtttcgttttgtcgtttaggttggagtgtagtgaagtgatcgtggtttattgtattttttatttttcgggtttaagtaatttttttgttttagttttttgagtagttgggattataggtgcgtgttatcgcgttcggttaatttttgtggtttttagtagagacggggttttattatgttggttaggttgattttgaatttttgattttgtgatttatttgttttagttttttatagtgttgggattataggcgtgagttatttcgtttggttgaggttaggagttttgagattagattggttaatatggtgaaaatttatttttattaaaaatataaaaattagtcggatgtggtagtacgtatttgtaattttagttattttggaggttgaggtataagaattatttgagtttgggaggcggaggttgtagtgaattgagattgcgttattgtattttagttttttgggtgatagagggaaattttgttttaaaaaagaaaatagagataggagtttttttatgttgtttaggttggttttaaatttttggttttaagtagtttttttatttgggtttttatagtgttgggattataggtgtgagttattatgtttggtttaaaatgtatttttttttttttattgagattaagttttgttgttattgtttaggttggagtgtaatggtgtgatttcggtttattgtaattttcgttttttcggttttagtaatttttttgcgtcggttttttaagtagttgagattataggtatttattattatgtttagttaatttttgtatttttagtagagatagggttttattatgttgattaggatggttttaaatttttgattttaggtgatttatttattttagttttttaaagtgttgggattatagtagatagtattagaagttaggttgtttattttttaggttttattttttgtatttcgtttatagtttttggggaaataaggaattaggatttattttagatattattttttttttaggtgtttagattgatgtaaaatttgggggttagtgtttaagggaagagttgggttggggaagttttggaaagagaagttgagagtagttgtagtaagagggaggatggttagtttttaggaagaattttttgttaaaagttattaatattagtcgggtatagtggtttacgtttgtaattttagcgttttgggaggcgggtagattatgaggttaggaagttcgagattagtttgattaatatggtgaaatttagtttttattaaaaataaaaaaattagttaggtgtggtggcgcgcgtttgtaattttagttatttagtaggttgaggtaggagaattgtttgaattcgggaggtagaggttgcggtgagtcgagattacgttattgtattttagtttgggcgatagagtaagattttattttattaaaaaaaaaaaaattattaatattagggttaggcgtggtagtttacgtttgtaattttagtattttgggattatagttgtttaggagttcgaaattcgtttgagtaatatggtaaaattttttttttattaaaaatataaaaattagttaggtatggtggtatatgtttgtagttttagttatttgggaggttgaggcgggaggattatttgagtttagaaggttaaggttgtaatgagtcgtgatggtattattgtattttagtttgggtaatgagagtgagattttgtttgaatgtttgaatggacgaatgttattaatatagttaaagtttgttgtatatttagcgtgagtttcgtagtgttttaagtgttttttgtgaattgtgttttttgatttttataagacgttagcggggagggattgttattttttttattttataaatgagagaaatgaagtgagtgtttaaagaattagtattaataaatggcgggggtgacgtggggagttttggtcgttaggtttagtgttataaatggggttttaggagtagggaagttgtgagtgaggttttttttgttgtttttttaggtgatatttttgttttggcgggtgtgtacgggtcggtcgaggtgaaggttagtaaagagatttttaataaggttatattcgaagtgattttgaggtcgaagattgggttgtttggtaattgggttttgttgaatttttgagtggtgtttagtttgttaaaattat

SEQ ID NO: 195 - DNA, 6862 bp, Artificial Sequence
  chemically treated genomic DNA (Homo sapiens)
tgtattagattttttattttaaagtgatttttaagaaaaaaaaaataaaatgtagttataggtagtttttggacgtttttttatttgttaagtatttttttgtttcgagttttttagttatagtgtattggacgttatcggaaggttgtagttgttatttggtgttttattatcgttgagaaggtggaatggttacggttcggttttgttattttttttagtcggatagtcgttttattacggattttagtagggtcgagtatatttttttttgttcgtttttatagatgaatatgttatcgttttagtagtataattcgttttattacgtaaaaaagtagtttttatttattcgtagggaaggagtatgttcggtattatagttggattggtgttcgagttaagcgttttgggaggttcgtatgcgtttcggaatcgtaatgcgcgttttttttaagttttacggtaaacgcggacgtagggtaattacgtggcggtggaatcgaggttcggcgggaatgcgcggaatgcgcggcgcggtttcgcgcggttttcgagttacggtttagggttcggcggcgcgcgttttcgttttttttttttattttttttagtcgtatttcggttttggttttgttatttagaattcgttgggtaagtcgtgtttcgcgtgaatatatagaaggggtttggggatcgagcgcggtttattagttttttagattttgaggatttagaattttttaaggggttcgaattcgagttttgtttttagtttttaaggtacgggttttagggattttaggggaagggcgcggggtattaggtacgtaattcgttttttcgtatttggaaaaaaattttttttttttttttttttttgtttgttgagtgtgcggataattagaattttaaggcgtttcgtaataacgatttcgttgtttttttatttatttttaagtgttaaagcgagggatggaagcgtttttaagcgttttaagggtattgaggagcgagttggagaggcgcggggatgcggggtttttttcgtagtttttcggaaagggcgggggagggcgcggtaagtttcggagtggggtatgtcgtgggagtttacgagggttttagcgcggatttttcgtcggaaaatcggttttcgcgagtcgtcgtcgtaggttttttaggtttcgcgagtttcgtagcgaagttttgcgttttcgttcgacgcgggggtttgtttagtttcgggtgggtcgcggttaggtttgattgcgggggagagggtcgaacgtgattttcgaggttatttttagttagtttttttttttgtggtcggaagtggtttttttttcgatttgggcgtttattttttattatttggtttgagaggggttggggttagtcggaaggttagggaatttttggtggatttgggggtttatattgtttagggtattagtcgatgcgttttgaggggcgggagtcgaggaattagaatcgtttttaatttttaagagttgcgtttttagtttcgggattttagatgcgtcgttggagttagggtcgtttttttatttgttgggtttgcgttttaattttagcgtatattttgtcggtagttttcggagttaggggaggggtttcgttttttcgtagttcgtcggatagacgattggggtacgggaggggcggtggtagggtggtttgtgtgtggttgaaattaattgatttggagcggaaacgtacgtttgcggttggggcgatggggggggggtgcggttgtttatgtgtcgagcgtgtggttgtttttggtgggtattggggtcggagttcgtttcggtttatttcgtagttttggggcgtttgggatcggcgttacgtaagcgaagtagagttgttatagtacgtgggtcgttacgcgtattttaaaagtaaatagtgtgggggaaaggagagttagagcgttttcggagtataggggtcggttttcgaaagcgttttttcgggcgatttaagggtttaataatggaaaattcgcggagtttgagttaagtttttttaagtcgtcgttaggtatgcggttgtaggtgattttatttgggtgcgttcgttcgttagtcgttttggtggaaaagcgggtgcgggaggtcgttggcgaaaggtcgggattggtttttgtattattcgtttttaatttaagtttcgagtttcgcggcgcgtagtcgcgttgagtttcggggtttgcgtcgcggcgcgtcggtttttgaatgaacgcgtttttttttttcgttcgaatgaaggtttttatagttagggacggtggcgaatacgcgtttgtagcggaattcgtttttttttgatcgattattcgtttaggtcgcggttatcggggcgggggttagggggcgaggaaagcgtgaaggtgattttagttaattttggatttttttttaaataacgtggttattttttcgattgggttatttgttttttgtttttaaatggttattaagaaataagaatagagtattttaaatgagtttagaattcgtagtttttgtttcgtggtgggttttaagaagatagtgtaaagtaaaattgtaatcgaaaagttttttaaagttgtttttttttttggaaaaaataaaattaaaatgttttttttgcgttttttgaagtaatgatttttaaaagtttagaggtattggttttttcgggggattcgggggtcgttaagtagggtttttttaggtgggggttgggtagttggcgtttttcgtcgggttttaaattttagcgtcgggttttaaattttagcgtttttttcgcgggtttttggacggttttttacgttcgttaatcgggtttgtaattttgcgttcgtttttgagtcgggaaattaacgaagtttttagtcgagatttgttcggttcgtttagtaatagcgtcgcgtttttattggtttatgttaattttagttttttttgttttgcgttcgggatgggggggtgaagtttttttttggatttagagtcggttgtgtcggagtgggcgagtttttttatgttttgttgtttttagtcgatttcggttcgtttcgcgtttcgggttgggttagggcgtacgcggggttcggggtttttcgttttacgggatgggagaggtcgggtgatagtttcgggttttataaattatttaggcggtcgtcgggtcgggattttatgaatgaaaaagtagttgggtcgtttttgtgcgcgggttgatgttatgaggtttggttatgcgggggttaacgcgattgtgggtgttcggggagtgggggggggtacgatcgtaggtgttttttgttggggtaatttatcgttttttatgcggaattcgggggtaattatttttttaggattcggaatattagtaattttaattttcggcgggggagggggcgcgggaggaatttattttgaaaggtgggggtggggggggtcgtattttgttgtgagtattttggcgaaggggagagggttttttttattagttttttttgagtttttattgttaagagggtacggtggtttgatgatattgaattatatttaaaaggaagtaaatgaatagtttttttaatttggggtaggtattgtaaaaataaaaataaaagttaagatagtaaaatgtttttttattttttaatgtattaaagagatagaatttgtaattttaaaaattgtgtattttaatttatatttgtttaagtttgcgataatattggggatttttttatgtaattacgaatatttatcgattttgttaaaaattagattagtatattcgtttgtttaattgataattgttttgaattatgtcggtttttgttagtttttttacgtttacgaatttagttttagggtaaattttaaaggtgaagggacgtttatatttttaataaaattaattaggaattttcggtggttttgttttaggtagaggggattaatatttttagtaatttaattttttttttaattaaaaaaaatgagttagaatggagattattgttttttagttttttatttagaggtgtgtttttttcggttaaattgtcggtacgggaagggagggggtgtagttggggattttcgtaaggatcgattggttaaggtaggaaggtagttcgaagagtttttaggttagaaggataagatgaaggaaatgttggttattattttgggttgttgttggaattttcgggtatttattttattttattttttgagcgagcgtatgttaagttgaaatttttttaatttttaggggttatttttttgggtatttgtaacgacgtttttgtgcgtcggaatgaaatttgtataggggttgtgtgttcggtttttttcgtttttgtatgttaaattagtttttgtaatttatacgtgttaatgaaaatgaaagaagatgtagtcgttgagattttttggtcgtttgttcgttcgtgggtgttttcgtggcgtttttggaaatgcgtttattttgtcggtttggatatggggtgtcgtcgcgttttagttattttttttcgtggtttttttaggttgcgtgtggtttgtcggtttttttagttgttttttattgtagagttatttttattttattttttaaatttcgggggatttattcgaggcggacggggttttttgtattttttttttttggcggggagaaaggttgtagcggggcgatttgtatttttatgaaaatcggattataggggtaatttcgtcgtagggtaggcgcggcgttttagggatggtttttgggttttgtttttcgttgttttcggcgtttggcgttcgcgttttttttttttgcgttcgttttcgtttttttttcgtttttattttttgtcgggttttgatttttgtttaataatagtaacgttatacggattataggggagttttgttgaagttgtaaagttttggagtttttagagggttgtcggcgtagtagtagcgagtagtagagttcgtacgtttcggcgaggggtagaagagcgcgagggagcgcggggtagtagaagcgagagtcgagcgcggatttagttaggatttatagttttttttagttgtttaggaagagttttagttatggaatattagtttttgtgttgcgaagtggaaattattcgtcgcgcgtatttcgatgttaatttttttaacgatcgggtgttgcgggttatgttgaaggcggaggagatttgcgcgttttcggtgtgttattttaaatgtgtgtagaaggaggtgttgtcgtttatgcggaagatcgtcgttatttggatgttggaggtgcggggttgggggcggtttttttaagatttttttgtaatttgttgtttagatttacgtttttttgttatttattttttttttttttttttcgttagaattttgaagtttgtcgtggtgtttttagggattcgtatttttaaaataaaaattgcgggtattttttgaaggaggaaggggtgggggtgggggtgttagaagtagcgtttcgtgggaggggagaagggggttcgggaggggtgttttcgggagaagttagtgttaggggtattttaatgggttcgagggtgcgggttggtaggttgggtgcgttttgtgtttttcgtttgcgttttagttcggttgcgttttagcggtcgggagtcgttaatttcggggggagggggtatagatttgatttttaaattaatatttatggatacgtatgtaagggtcgttcgtgttagtattatgcgttatttttgtttttttattgtaaagtaaaagtgtttattaataattgggggtagggtgggggcggggagcggtcgtcgggcgttggggtcgtagttaagggtcgcgcggttgtcgggagttcgcgggaggggcgtagggacgcggtatgggtagttttggggggacgtcgttagggaagggggggtttttgtttaagtagcgagtttcggggcgtttcgaacgggtagtttgggtcggagagtacggcgagttgtaaggtcgcgtggtttttaagacgttagggtttgattttcgtttgtagggatatcggtttggaggatttttttcgagcgagtcgggggtttgggagtatatttttagattttcggtgggcgtttgaggggttcgtaagtattttaaaataatttttgaaagtgcggcgtggtgtttttgcgagagggaaacgtcgttcgcgtttagggggaagggggggtttcggagtttgaatttttggggtttttttcggagtttgtaacgaatttttaattttcggtttgggtaaagggtcgttcgagggttatttttagggtttttttatgtatttagttatttttttaatatttttaaatattttttgaaaagatgacgtttggggaaatgcggcgcggcggtttgggacgttatttttgtgtttcgtaggcgcggcgtttaatttcgcggttcgtttcgcggtttcgtattttagttggtgtcgatttttagttagagggattacggagttttagggcgggttagggtttcgggggtcggtagttcgcgtcgtcgcgtacgtcgtttagttgtgttcgttttcgtttttatcgtgttagtttcgcggggatttttttttttagtttcggggagggtgggtattggggacgcgcgggggagggggcgtattacgggaagtttttgtcgtttttagtttcgatttttcggcgttttttagatttggcggttttgttaagcgcgatggggggtgcgggggcgtgcgggggggcggcgcgatttggcggcggcggttacgggtttcgtgttttcgtagg

SEQ ID NO: 196 - DNA, 6862 bp, Artificial Sequence
  chemically treated genomic DNA (Homo sapiens)
tttacggaggtacggggttcgtgatcgtcgtcgttaggtcgcgtcgttttttcgtacgttttcgtattttttatcgcgtttggtagggtcgttaggtttggagggcgtcgaggggtcggggttgggggcggtaggagtttttcgtgatgcgttttttttttcgcgcgtttttagtatttatttttttcgaaattgaaagggaaagttttcgcgaggttggtacggtgggggcgggagcgggtatagttgggcggcgtgcgcggcggcgcgggttgtcggttttcgggattttggttcgttttggagtttcgtggtttttttgattgggggtcgatattaattggggtgcggggtcgcggaacgggtcgcggggttgggcgtcgcgtttgcgagatataaaggtggcgttttaggtcgtcgcgtcgtatttttttagacgttatttttttaaaaaatatttaaaaatattaaaaaaataattaagtgtataaaaaaattttgaaaatgattttcgggcgattttttatttaggtcgggggttgggagttcgttataggtttcggggggagttttaggaatttaaatttcggggtttttttttttttttgggcgcgggcggcgtttttttttcgtaagggtattacgtcgtatttttaaaaattattttaaaatatttgcgggttttttaggcgtttatcgaaggtttgaaaatgtgtttttaggttttcggttcgttcggagaaggttttttaagtcgatatttttgtagacggggattaagttttggcgttttgggggttacgcgattttgtagttcgtcgtgtttttcggtttaggttgttcgttcggggcgtttcgggattcgttgtttgaataaaggtttttttttttttagcggcgtttttttaaaattatttatgtcgcgtttttgcgtttttttcgcgggttttcggtagtcgcgcggtttttagttgcggttttagcgttcggcggtcgtttttcgtttttattttgtttttaattattaataaatatttttgttttgtaataaaagagtaaagatggcgtataatattggtacgagcggtttttgtatacgtgtttatggatattaatttaaaaattaaatttatgtttttttttttcggagttggcggttttcggtcgttgaggcgtagtcgggttggggcgtaggcgggggatataaagcgtatttagtttgttagttcgtattttcgggtttattggggtgtttttggtattggtttttttcgaaggtatttttttcggatttttttttttttttttacgaaacgttatttttagtatttttatttttattttttttttttttagaaaatattcgtaatttttattttgaaaatacggatttttagaaatattacggtaaattttaaagttttagcgggagagaagggaggggggtgagtagtaaagaaacgtgggtttgggtaataagttgtagggaagttttaagagagtcgtttttagtttcgtatttttagtatttaggtggcgacgatttttcgtatggacggtagtatttttttttgtatatatttaaagtagtatatcgagggcgcgtaggtttttttcgtttttagtatggttcgtagtattcggtcgttgaggaggttggtatcggggtacgcgcggcggatggtttttatttcgtagtataggagttggtgttttatggttggggttttttttgggtagttggggagggttgtgggttttggttgggttcgcgttcggttttcgtttttgttgtttcgcgttttttcgcgtttttttgtttttcgtcggagcgtgcggattttgttgttcgttgttattgcgtcgatagttttttggaggttttaggattttgtaattttaataaaatttttttgtagttcgtgtgacgttattgttgttaagtaaagattaaagttcggtagagaatgggagcgggaggggggcgggggcgggcgtagggggagggggcgcgggcgttaaacgtcgggagtagcgaggggtagagtttaaaagttatttttgaggcgtcgcgtttgttttgcggcggagttgtttttgtagttcggtttttatagaaatgtaaatcgtttcgttgtagttttttttttcgttagggaagaggggtgtagggggtttcgttcgtttcgagtgggtttttcgggatttagggggtgaggtggaggtggttttgtagtaggggataattaggaaggtcggtaggttatacgtagtttggggagattacgagaaggggtgattggggcgcggcgatattttatatttaagtcggtagaatgggcgtatttttaagaacgttacgagggtatttacgggcggatagacggttaaagaattttagcgattgtatttttttttatttttattaatacgtgtaaattgtaagaattaatttagtatgtaaggacggggaggatcgggtatataatttttgtgtaagttttatttcggcgtataggggcgtcgttgtaaatgtttaagggggtaatttttaaaagttaaagggattttagtttagtatgcgttcgtttaaaaaataaaataaaataaatgttcgaaaattttagtagtagtttaagatggtggttagtattttttttattttgtttttttagtttggagatttttcgggttgtttttttattttgattagtcggtttttgcgggggtttttaattgtatttttttttttttcgtgtcggtaatttaatcgggagaaatatatttttgaatggaaagttgagaaatagtgatttttattttgatttattttttttaattaaaaaagaaattaaattgttggaaatattagttttttttgtttgggataagattatcgaaggtttttaattggttttgttgggggtgtagacgtttttttatttttagaatttgttttgggattgaattcgtgagcgtgagggggttggtaggagtcggtataatttagaataattattaattaaataaacgagtgtattgatttgatttttagtaaaatcgataggtgttcgtggttatatgagagggtttttaatattatcgtaaatttaagtagatgtaaattaaaatatatagtttttaaaattataggttttgtttttttggtgtattaaaaaataaaaggatattttattgttttaatttttgtttttatttttatagtatttgttttaaattaagaaaattgtttatttatttttttttgaatatagtttagtgttattaaattatcgtatttttttaatagtaaaagtttaaagaaaattgatagaaaaagttttttttttttcgttagggtgtttatagtaagatgcgattttttttatttttattttttagggtgaatttttttcgcgttttttttttcgtcgggaattaggattattaatatttcgggttttgggggggtaattattttcggatttcgtatggggagcgatgggttgttttagtagggagtatttacggtcgtgtttttttttatttttcgagtatttataatcgcgttggttttcgtatagttaagttttatagtattagttcgcgtataagggcggtttagttgtttttttatttataaaatttcgattcggcggtcgtttggatgatttatggggttcggagttattattcggttttttttatttcgtggggcgaggggtttcgagtttcgcgtgcgttttggtttagttcgaggcgcgaagcgggtcgaagtcggttaggggtagtagggtataaagaggttcgtttatttcggtataatcggttttgggtttaggagggagttttatttttttatttcgggcgtaagatagaggaaattggaattagtatgagttaatgggggcgcggcgttgttattaggcggatcgggtagatttcgattaggaatttcgttgatttttcggtttagggacgagcgtaaaattgtaagttcggttagcgagcgtaaagagtcgtttaggaattcgcgggggaggcgttggaatttggggttcggcgttggaatttggggttcggcggggagcgttagttgtttagtttttatttgggggaattttgtttggcggttttcgggtttttcgagggggttaatatttttgggtttttgagggttattgttttaagaagcgtagagaaagtattttgattttattttttttaaagagaaaagtaattttaaaaaatttttcggttgtagttttattttatattgtttttttaaaatttattacgaagtaggaattgcggattttgggtttatttaaagtgttttgtttttattttttggtgattatttggagataaagggtaagtggtttagtcgggagggtaattacgttgtttgaaagaaaatttaaaattaattgaaattatttttacgtttttttcgttttttggttttcgtttcggtgatcgcggtttgggcggatggtcggttaggagaaagcgaatttcgttgtaggcgcgtgttcgttatcgtttttggttgtgggaatttttattcgggcgggggaagggagcgcgtttatttaggaatcggcgcgtcgcgacgtagatttcgggatttagcgcggttgcgcgtcgcggggttcggggtttgggttgggggcgggtggtgtagggattagtttcgatttttcgttagcgatttttcgtattcgtttttttattagggcggttggcgggcgggcgtatttaggtggggttatttgtagtcgtatatttggcggcgatttgaaaggatttggtttaggtttcgcgagttttttattgttaagtttttaagtcgttcgggaaaacgttttcgaaagtcggtttttgtgtttcgaaggcgttttagttttttttttttttatattgtttgtttttggggtgcgcgtggcggtttacgtgttatgatagttttgtttcgtttacgtagcgtcgattttaggcgttttaaaattgcgaggtgggtcggggcgaatttcggttttagtgtttattagagatagttatacgttcggtatatggatagtcgtattttttttttatcgttttaatcgtagacgtgcgttttcgttttagattaattagttttagttatatatagattattttgttatcgtttttttcgtgttttagtcgtttgttcggcgggttgcggggaaacgagattttttttttagtttcgaaggttgtcggtaaggtgtgcgttggagttaaaacgtaaatttaataggtaggggggcggttttggttttaacgacgtatttgggatttcgaggttgaaggcgtaatttttgagggttaaaggcgattttaatttttcgattttcgttttttaaaacgtatcggttggtattttgagtaatatgaatttttaaatttattagggattttttggtttttcggttggttttagttttttttagattaagtggtggggagtaggcgtttagatcgagaagaaaattattttcgattataggagagaaagttggttgggggtgatttcggaggttacgttcggttttttttttcgtagttaggtttggtcgcggtttattcgaggttgagtagattttcgcgtcggacggagacgtagggtttcgttgcgggattcgcggggtttaggaaatttgcggcggcggttcgcgggagtcggtttttcggcggaggattcgcgttgaggttttcgtgggtttttacggtatgttttatttcggaatttgtcgcgttttttttcgtttttttcggaagattgcggggaggatttcgtattttcgcgtttttttagttcgttttttaatgtttttggaacgtttgaaagcgtttttatttttcgttttggtatttgggggtgggtggagggatagcggggtcgttattacggggcgttttagagttttggttattcgtatatttaataagtaggggaggggagggaaagggagtttttttttaggtgcggggaaacgggttgcgtatttaatgtttcgcgttttttttttggggtttttggagttcgtgttttaagggttgggggtaggattcggattcggattttttagggaattttgggtttttagggtttgagggattgatgggtcgcgttcggtttttaagttttttttgtgtgtttacgcggggtacgatttgtttagcgagttttgggtggtagggttagggtcggggtgcggttgggagaggtgaggggaggaggcgagagcgcgcgtcgtcggattttgggtcgtggttcgggaatcgcgcgaggtcgcgtcgcgtatttcgcgtattttcgtcgggtttcggttttatcgttacgtggttgttttgcgttcgcgtttatcgtaaggtttagaaaaagcgcgtattacggtttcggagcgtatgcggattttttaggacgtttaattcgagtattagtttagttgtggtgtcgaatatattttttttttgcgggtagataggggttgtttttttacgtaataaggcgggttgtattgttggagcgatagtatgtttatttgtaaagacgggtaggaaggagtgtgttcggttttattggaattcgtaataaggcgattgttcggttgaagaaagtgatagaatcgggtcgtgattattttatttttttagcggtggtaaagtattaaatagtagttgtagtttttcgatggcgtttagtgtattgtggttggaaagttcggagtaagaaggtgtttaataaataggaaaacgtttagaaattgtttatagttatattttatttttttttttttgagggttattttaagataaagaatttagtgta

SEQ ID NO: 197 - DNA, 14924 bp, Artificial Sequence
  chemically treated genomic DNA (Homo sapiens)
  unsure 208..209, 211, 213, 227: n is a or g or c or t
ggttttatagtgttatttggtaatgttatagaattagattagagaaaatgggatttttttattgtagtgtgtttaatgatttttgtaaagagtatagtataaaaaagttttattagtttgaagatttattttgattgaattgtaggatttttgtttgggtttcgtgtattttattaaaatgaaataaagtagttatatttaaattttnnnntntttttttttttttnggagacggagttttgttttgtcgttaggttggagtgtagtggtgttattttagtttagtgtaatttttattttttgggtttaagcgatttttttgttttagtatttttagtagttgggattataggtggttattattatgttcggttaatttttggattttttcggtagagatggggttttattattttggtttattgtaattttcgttttttgggtttaagtgattttttttttttagttttttgagtagttgggattatagttatcggttattatgtttggttaatttttatagttttagtagagatagggttttattatattggttaggttggttttaaattttttatttaaggtgattcgtttgttttgggtttttaaagtgttgggattattaggtgtaagttattgcgtttagttataatatgtaagaatttttaaagtaattttttttggtatatagaagattagaaatataaagttttaggttgggtgtggtgatttatgtttataattttagtattttgggaggttgaggaggcggattatttgaggttagtagtttgatattagtttggttaatatggtaaaattttatttttattaaaaatataaaaattagttagaagtgtttttaggcgtttgtaattttagttatttgggaggttgaggcgggagaattatttgaattcgggaagtagagattgtcgtgaatttagattacgttatcgtattttagtttgggcgataagagtaaaatttcgttttaaaaaaataaaaataagggtttattttttttttatttttatttattgtttaagttaggatttagtgaaggtaggtagttgatttttgttgaataaatgaaatgtttagttaattattattatttttatttttatttttgagatagagtttttttttgttgtttaggttggagtgtagtggtgtaattttagtttattgtaatttttattttttgagtttaaacgattgttttgttttagttttttaaggagttgggattataggtgcgtgttattaagtttagttaatttttgtatttttagtagagatagggttttattatgttggttaggatggtttcgattttttgatttcgtgatttatttgttttggttttttaaagtgttgggattataggtataaattatcgtgtttggttttatatttttttttttttataagtagagatggagttttattatgttggttaggttggttttaaatttttgattttaagtgatttatttgttttggttttttaaagtgttgggattataggcgtgagttattatatttagttaaagatgtttgattgtaattttaaaattatatgtttttattattattattattattattattttgaggggataggattttattttgttgtttagattggagtgtagtggtataattttagtttatcgtaatttttgttttttgggtttaagtgatttttttgttttagttttttaagtagttgggattataggtatgtgtttttattgtttgtatttttagtaaagacgggtttttattatgttggttaggatggttttgaatttttgattttaaatgatttattcgttttgattttttaaaggcgtgagttagcgggttcggttgttttttttatttttaaagaaatatttagtattaaggaaatgtaatgagagagagaaaatttaatttttttattttttttttggtttttatgatgtttaaagatgatttaaggaggtatagtagtttgtttttggttttgtgtttttgtgggttaacgggtatagtttaggaggtacgggagaatttttttaggggaatttttggagaagtggtttgataatatatttgtatgtttttttgtgttttataggttttatattagtttggatattttaagaaaatgttatgaggggattagacgtttaatagatttattggggtaaatgtttgtgagggaaaagagggagggaggtagaagagattatagagttgttagattataatgtaggattgatttttgtaaaggatagaaggaggaagatggggtaggaagttttttatgattgtgtagtcgaaggaagttttagtaaagtttatggggagttattgaagtaaagttatttattaaaggaagttgatttgtaggaatcgattttaaggtttttgttttgtttagttattggttgggaatagtttgtaggatgtgtggttttagtgtaaagttgtggtagatttaaagtattgcggttggggtttttagttaattaaattattatagtaggtttgaaagatgtatttttatggttgttacgttattaacgagtattttaagtagtatttttttttttttttttaattttatggtgatagtttagaaatgtaggttatatatgaattattttttttatttgtagttggttatagataggataaaagatttaaagttattttatatgtggatggaaaaaaaaagtgaatttaatttttttagcgattatgagttatttttttttttttttatttattgtaaatttttttttaggattgttgttatagttaaattaaatgagatttgtattttatttatgaagttatatttttgataggtaaagagatgattgggaggttaaattttttattagtttataaaagaataatgaggaattagttttgattaggtacgtacgttttattaggtatggtgatagaggttttatataggttatttttttgaattttattttaattttttgaggttaatatgtattgttttattttataaattaagtatagatttaaggtatatattgagtaaagaaagagagatttggttgggattgagtttaggttttttgattgtaagtttagtgttttttttggttttgtaatttttaatttatatatcggatagtttatttgagttaaaaatgtgaattaagttaggtttaaagtagaattttgttttttattagaaattttagagtaggtggaaggtgaagattaaagaaggtatttttttttttttttttttttttttttttttgagatggagtttcgttttgtcgtttaggttggagtgtagtggtataattttagtttattgtaagtttcgttttttgggtttaaaggatttttttgttttagttttttaagtagttgggattataggtgttcgttattatgtttggttaattttttgtatttttggtagagatggggttttattgtgttagttaggatggtttcgattttttgatttcgtgattcgttcgttttagttttttaaagtgttgggattataggggtgagttatcgtgtttggtttaaagagggtattttttttttttttttcggtattatttttatttaattataaatgattaagggcggtattgttagagttatttcgagaggttttgttttttgttatttaggttgttttgtagtttttattttaaattgtcgttatttcggtttatttcgtggatggcgtttaagattttttttaaatttgaaatttatagaattattttaaagtgaataatttagtggtatttagtattttcgtagtgttgtgtaatttttatttttatttagttgtaaaatatttttttttttttttttttttggagatagagtttcgttttgttgtttagattggagtgtagtggcgtgattttggtttattgtaatttttgtttttcgggtttaagtaatttttttgttttagtttttcgagtagttgggattataggtatacgttattcgtttggttaattttttgtattttagtatagacggggatttattatattgtttaggttggttttaaatttttgagtttaggtaattcgttcgttttgtttttttaaagtgttaggattataggcgtgagttaacgcggtcggttttgtaaaatatttttattatataaaagaaaattttttatttattaagtagttatttttttttttttttagtttttgttaattattaatttgttttttattttatggatttaattgtttggatattttatagaaatagaattatataatgtatgattttttttgtttggtttttttttattagtttaatgtttttgaggtttatttttgttgaagtatgtattagttttttattttttttttgggatgaataatgttttataatttatttattttttcgtttgttgatgaatatttgagttgtgtttatattttggttattgtgaatagtgttgttatgtatattcgtatgtaagtatttgagtatttgttgggtgtatatttatgaatggaattgttgggttttttgataattttgtatttaattttttgagaaattgttaatatttttataggggttgtattattttatatttttattagtaatttataaggattttaatttttttatattttgtatttaagatttgtaaagttgaattaattataggatgaggaagtggtttttttgaaatattttttttttttatattttaaatttttttttttatatatgatatgaaatatagtttacgtacgaaagtgattaggaggaaggatattataaagtgatgtaaatagaaattttattagtttttatgtattattatgtgttataatttagttaagtttagtgagtatttttagtatattgttttaatagttttaaggtgagttagtttaagattttgttttttattaggtagaagatgatagattgtgaatttggatatatttataggttggtttaggattatttgtagtgcgttttatagatattataatttggattaggtttaagtaaaacgtttagagtgttataaaatgttgcgtttttagtttaaaaagaagtggaaaagaatttgaagttatgtttggataatgttaatgttgtgttcgtagatattgttagaatattatttaattaagtgatggaaaaggagtttgaagacggtattattaattggggaagaattgtaattatatttgtatttgaaggtatttttattaagaaatttttacgatagtaaattgtttcggatgtggatatttataaggagattttatattttgttgcggagtttataatgaataatataggagaatggataaggtaaaacggaggttgggtatgtgtgatggaaaaattttttattgtttttttttgtgaaatagaaattgagaatttttttgttagttaaaataataataaaatattttatttaagaatattattttttttgggtggtttgttttaatttttaaaataaaaatatattttttggtttatttttaatgaatttttgaatttgaattttatagttggaaagtatttatgtttttagtttttatttttaatagtataaattatagtagtgagttttggggattaataaagtattttttttatgtagttttataattagttgtgtatatattttaatttagtatttagtttttgttagggttgttatgatagtatagatagtatagaaatttttataattagtatagaaagttgttattagatgttgttatttttaggtatttatgggttgtaaaagataggtgtaaatttttgtaagtttatcgtttataaattggtgttttttagtttattaatatataataaatagtaatatatattaatatatagtaaattatattatatataatatataatatattattattaataataaatttcgggttgttaaagtttgttgattaaaatataatatattgtatgattagtaagaatttttatttaagaatttttaaataaaaatttattttattattagtgtttaaaaaagttaagattatgtagaggtttgtgttgaaatttatgttggtaaaaagtttgatatagttggatgtatatggttttttttatattttaatatatttaataattatttttttaaagtatttaagtgtttattgattttttttttaacggtttttattttttttaagaggtaattattgttattaattattttgtatgtaaaatatgtttattgaatttatttatagaaaataaataatatttttttgtaaaatattttttgtaaaaaaagttttatataaaatgtatatgtatgtttatgtatatgttttatataatatatatgttatattatataatatatattttttttatatatatatatagattttttatgtatatatataaattttgtatatatatttttatatgtgtatatgtaaaaatagtatatggtattaatgttgttatttatttttttatttagaattatttaaaatagtattattaagagtgttgtgtatattttgttatatgtaagtgttgtagagtatttggttatttttagttgatagttgtttaggttatttcgagtttgttgttatatataatgttttattgaatattattttacgtaaatttttttttgtgcgtgtgtgtagttttttagggtggatgttgggttgtagatgttgggttatggtgtatatatattttttaatttgttaggtttttgttttttaaagtggttttattaagttatatttttattagtagttcgttaggatatgtttcgggatttttttattttagttgattaatagtaggttgttgtaatttattataatttttttaatttgttgggttaaaaatatagagtttattttgttttaatttttgtttttttgatttttagtaaggttaattttttttttatattttgagtatttttttatatattaattgattatttgtaaatgtagggaattgtttgtttatattttttgtttattttttttttattttgttttttttttattgatttgtaggaattttttgaatattttggatataaattattatttttattattgtttaaattttttgagatagagtttttatttttgttgtttaggttggagtgtagtggtgtgattttagtttattgtaatttttgttttttggtttcgagtaatttttttgttttatttttttaagtagttgggattataggtatgtgttattatatttagttaattttgtatttttagtagagatagggttttattatgttagttaggttggtttcgaatttttgatttcgggtgattttttttttttggttttttaaagtgatgggattataggcgtgagttatgtatttaaattatttttatgtatgtggtagatattttttagtttgttgattaacgttaatgatgtttttggttattataaatgtttaaaagtttgttgtaattaaatttattgattttttatttgatgttttttttattttgtttaaggtttttttgtatgatagagtttattgtagttattttttttttttaattattttttttttggaatttagttttttttaattgagtttgattgaggttgggcgaattatgtgaaatgttttgttatgttttttttcggttggttgtgggaggttatatttgaggattggtggaaatttagttgtattgtgtagattttaggtgaaggtaaatgttttttggtatagaggattatagatgagtttgtagagaaatattttattagtttgtaggttttatttgggtttggattgtatttttaacgtttagtataatatttggagtatatagatagtgaataaatgttagttaaaaatttaatttttttataataaattttgtgagtttttggaatttattgttagtaagaggtgtggaattgtttttgagaatttttagtagtatttttattttttaagggtggtatagatgtaaatatgagtgtggtcggatgaatttttttcgagtgtagatataaatatatatattgtttgtacgtgtatatatttagtttttttaaagtttttaagtttttttttttttttaaaaaaaatatttgaatagtttaagttgtagatatgaaataaatatttttggaaatgttattttaaagtaatttttatgtcgtttttttagtttagatgagatattgattttgttaacgataggtagtgtttttttgagttagtgtaaattggtatggaaaattgttattatttttttatagtgatgttgataaatttgtttaaatgaatgaatttatttttgaatgatttattttaggggaaatggtataattatatatttatgttggtagagttagtggtttataagaagaggtaagagtagagaaggtatttatagttttattaagatgtgagtatatataatttataatttaattaaatgttaaaattgtttagagattttatgaaaattttgaattaataatgcggtatgtgtcgggtgtagtggtttatgtttgtaattttagcgttttgggaggttgaggtgggtggattatttgaggttaggagtttaagagtagtttagttaagatggtaaagttttgtttttattgaaaatataaaattagtagggtttggtggcggatgtttataattttagttatttaggaggttaaggtaggagaattatttgaatttgggaggcggaggttgtagtgagtcgggattgtgttattttagtttgggtaatagagtgattttattttaaaaaaaaaaaaaaaaaaaagcggtatgtgagtatagtatagatgtttagagtattaatttagaattagatagatttggttttatttttgggttcgagtgtttattatttgtgtgaattgtataagttgtttaatttttttacgttttgtttttttatttgtaaaaataggaaaatattgtaatttatgttttgggattggtataaggattaaattagttaatatatgtaaagtatttgaaataatttttgaaaatgagtatttaatataagtttaggatttttgtttattatgtaaaatagattttttaatgggaagaaacgagattggtttattagtaataggatttataatttttttcgttatttttttttttttttttgttagttgttttttttttttttttgtttttttgtttttttgtttttttgtttttttgtttttttttgtttgtggttttttatttttttttttgtttttttttatatttattatggtttttttttgttcgtttttttaattggaagtgttgagaggatgtgtttttataagatttgataggagagttagtgttatttggttgtttttagtatttataaggaaaggatggtttttaaaaattattagaatgtttatgagatgaaatttatgtttttttttttgggattatttttttttttgaattagatgggtttttttattttttttttttttaatgaagtatttttttttgtatatgttgggggagtagaaagaatgtttggtatttagttttatatgggagaaattgtgtttatttaatgtattattgtgtattttatgtttagtatagaaggtaataatatttgttgatgggatgatttaacgaattaatattgaaattgaatatttgaattttggtttttttatttattagaggtataattttgggtaaattattgaggtattttgagatttagattttttatataatgtatataataatatgatatgatatatgataatttattatatatgtaatatttaatgaaaataattttatttatttttaaaggaaagttaaaggattataaaatattttttgtaaaatagtgttttttaagttgttaaatattgtgtaattacgagagtcgtgggaaattttaggaagtttagataggtaattttttgtttttttgaagtaggatgtatagttagagttggtgtttttttagtaattattattttaaaggttgggttatatagttaggttaagaggtttttttttttttttttttttttttttgttatttttttattttaaataatagttcggttaatttgaggttaaataaatgggtatatagagatatgtatagatgattaattaagtgtttattttggtaaaggtatttttaaaaggtataaagatttagtagtaaggtgatattattttaagtgtttatatatattttttgattaaataagttttggggtaaaattttttatgttttttgaatttttatttgagattttaaaattatttagtgaaaaataaaagatttttaagttaggtagaaatgtatgatatttaagtgttagttttttaattttgggagttagtttggatttttgttttttatagtttatatttatttattagtaaatttttttggttgtttttttgaaatgttgtaatattttgtgtatttaggtcgttttttttttttatttgattttgttagtagttttttgttagattttatggttttattttttatttgttagaatttgttttttatatagtttttatagcgatatttttaaaatttgaggggtcgggcgtattggtttaagtttgtatttttagtattttgggaggtcgaggcgggcggattacgaggttaggagatcgagattattttggttaatatagtgaaatttcgtttttattaaaaatataaaaaattagttgggcgtggtggcgtatgtttgtaattttagttatttggtaggttgaggtaggagaattgtttgaatttaggaggcggaggttgtagtgaggtgagatcgtgttattgtattttagtttgggtaatagagtgagattttgttttaaaaaaataaaataaaataaaaatttgaattagattatgttttggtttaattataattttttaagttgtttttttattttgggaataaaagtataaaattttgattgtggtttttaaagttttatatgatttagtttttaatcgttttttaaattttatttgtgaattttttcgtgtttttatagttttagtttttttggataagttaagtatattttatttttaaggtttttgtatttgttgttttttttgtttggaataatttttcgttagaagtttgtttggtttattttttttttttgtttaggtttttgttttaaggttgtttttttagagaagttttttttgattattttaattgagaaagtattattgttattttttgtttttttatttaattttattgtttttataatagtttttatgattggatattttattgtatatttatttgtttatttgtttattgtttgtgtttgtcgtgaaaatgtaagtttagtgagggtagggattttgtatgttttttttattattgtgtttttagtgttttaaatggtatttggtatgtggttaatgtttaatgaatattttttgaatgaataaatgaataataatgtttagagaagtgggagtaatataatggtgtttgcgtgtattttgtttgtttgtttgtttttttgaaatagggttttgttgttatttaggttggagtgtagtggcgtaattttggttaattgtagtttcgatttttagggtttaagtaatttttttattttagttttttaaagtgttaggattataggtttgagttattgcgttcggttgtttgtatttttaaaaattttgagattttgattttttttggattattgatattgtatattattttatgttttaggtttttttgtaattaaggtagttgaatttaataaattattattatttttagaaataataaggtttgaattatttttatttattattatattattgataggatattgaatttttgtttgtatatttatttttatataatggttttaagatataaatagtattattaaagaaaatatatttgaaaataatatttttgaaaggaagaaaagttatttttattattttaatatatttatatgtagatattgtatgtaattataattagggtgtataagagtttttttttgtgatatattgtagatatttttaatattgttttatatattttatgttaatattaggtattaatttttaatgtttatagaatattttattaatttgttatattataatttatttaattaatttttaattgttagataatttggttttttcgagttttttttttttagatataatgttttaatattgaagtatgggtatgtttttttggtgttttttattttttaatattttagaagattgttttatgataaatttttaatattggaatgattggtttataagatgtgtgtataattataatattttagtatattggaaaatatattttttttttaaaagtattatattaatggaataatgttataataaatttaatgatgtgggtggtattattaataattttgaggtttgttaggtataaaataataaagttaatttaataggtttaaaaaataataagattgtgttaaaagtatatttttaattgttattagtgttttttttatatatttgttaataatttatatttttttttttaatggttttttttttttaaattattaagggtttgaggattttttgttatatttgaatgaatttttttatgttatatgtaaatatttttttagtttattgtttttttaattttaattttttatagtttaaaaaaattttaggttaggtacggtggtttatgtttgtaattttagtattttgggaggtcgaggcgggtggattatgaggttaagagatcgagattattttggttaatatggtgaaattcggtttttattaaaaatataaaaattagttgggtgtggtggcgtgtgtttgtatagttttagttatttgggaggttgaggtagaggtagaagaatcgtttgaatataggaggtagaggttgcggttagttgagatcgcgttattgtattttagtttgggtggtagagtaagattttgatttaaaaaataataataataaattttaatttttttttggttgaatttattatttttttttttgtttattgttttttcgatattgatgtatataaggtgatatattatgattgtttaatgataatagataatgattattgttataataataaaaattatgttgggtgcggtggtttatatttgtaattttagtattttgtgaggtcgaggtgagtggattatgaggttaggagtttaagattagtttggttaatatagtgaaatttcgtttttattaaaaatataaaaattagtcgggtatggtggtgcgcgtttgtagttttagttatttaggaggttgaggtaggagaattgtttgaattcgggaggtagaggttgtagtgagttgagatcgcgttattgtattttagtttgggtaatagagtaagattttattttaaataataataataataattttagagggttttattatatttgcgaaatatggggtttatgaaaattttaggaaggggagtaatgaagtggatattttttgagagtgtataggaaattatgagtatgtattggtaggagggaaagaggaagaagagagagggttagttttttttttttgttaaggtatgatagtatgttttagagtacgatgtatatttaatacgtaggtagaaaatggtttttttaggtagttttttaaatgaaatttttttggttggtggtatttatttgttttgttagtgatgtttataaaatgattttaaggtatcgtagagttttcgagttatttttaattattaaagagttatgttcggtttatattttaatattagttatattgggttttgagttatttgtaggtatttgtaattttaaggttttgaaatttgtaaggtgaagacgtaaatgtttgttagatgattatttgaaaaaattattttaataattttttaatttttttggtatttgtttggaaatgtatggagtggaaagaagtagggtgtttatatttttatttaagtttaggtattaacgggttggttaattttagataatttatttttttgggtttcgatttttttatttgttaaaataatggagggttttaggttagatgattttagagatagtttttggtgaggattatttgattatagattgtaaattaattaaataaaatgtttagttaattgggttattttatatttttaaaattatgtttgattataaagagagtagattataaaataaattattaatttttttatagttttaaaggtattagtttaatttggatttattgtgagtttttatgatttttaatataatgtagtttatagtataatataatttatattatatatataagtgtattgaaattaatgttggataattgaataagaacgagaaaaaaaaaggttttttattttttagagttgtgtttgttgtttattatggaagtgaaatgtggttagtttgaattaagatgtattgttaagtattaaatatttattggatttcgaaggtttgttatgaaaaaagaatattttattaatgattttatattgattatatattaaaataaaaataattttaaaattattttaaaagttagttttatttatttttttattttgtaaaatatggttataaaaaaatttaaattatagacgtaggttatattgtatttttgttagatgttgttgtttaataggggtagaaggggtagaagattaattatttgtattatttaaatgaaaatatttttgttttttattttagtatatttaatttttaatgatgtttaaagtgttaaatttatttttttatagg

SEQ ID NO: 198 - DNA, 14924 bp, Artificial Sequence
  chemically treated genomic DNA (Homo sapiens)
  unsure 14698, 14712, 14714..14715, 14717: n is a or g or c or t
tttataaaagaataaatttaatattttaaatattattggagattaagtatgttggaataaaaagtaaaaatatttttatttaaatagtgtaaatagttaattttttattttttttatttttgttaagtagtagtatttaatagaaatatagtgtgatttacgtttgtaatttaaatttttttgtagttatattttataaagtaaaaaaatagataaaattaatttttaggatagttttagagttatttttattttaatatgtaattagtataaaattattaatgagatattttttttttataataaattttcgaaatttaatgagtatttagtatttaatagtatattttaatttagattagttatattttatttttatagtggatagtaagtatagttttagaggatagaaagtttttttttttttcgtttttgtttaattgtttaatattgattttaatgtatttatatatgtaatatgaattatattatattgtaaattgtattgtattgaaaattatgagaatttatagtaaatttaaattaaattaatatttttgaagttatgaaaaggttgatagtttattttataatttattttttttgtgattagatatagttttaaaaatataggataatttaattaattggatattttatttagttaatttataatttgtagttaaataatttttattaaaaattatttttgagattatttagtttgaagttttttattattttaataaatgaggaaatcgaggtttagaaaaataagttatttaagattagttaattcgttggtgtttggatttggatgagaatgtgaatattttatttttttttattttatatatttttaaataagtgttaaaagaattagaaaattgttaaaataatttttttaaatggttatttggtaaatatttacgtttttattttataggttttagaattttggggttataaatgtttgtaagtagtttagagtttagtgtaattaatattgaaatgtaaatcgagtataattttttgatagttgggagtgattcgagagttttgcggtgttttggaattattttatgagtattattggtaaagtagatgaatattattagttagggggattttatttgaaagattgtttaagaaagttattttttgtttacgtgttaagtgtatatcgtgttttgagatatgttgttatgttttgatagaggaaggaaattggttttttttttttttttttttttttttttgttagtatatatttatagttttttatatatttttaagaggtatttattttattatttttttttttagaatttttataaattttatgtttcgtaagtataatgaggttttttgaaattattattattattatttgagatggagttttgttttattgtttaggttggagtgtagtggcgcgattttagtttattgtagtttttgtttttcgggtttaagtaatttttttgttttagttttttgagtagttgggattatagacgcgtattattatgttcggttaatttttgtatttttagtagagacggggttttattatgttggttaggttggttttgaatttttgattttatgatttatttatttcggttttataaagtgttgggattataggtgtgagttatcgtatttagtatgatttttattattatgataatgattattgtttattattattgagtagttataatgtattattttatatatattaatgtcgaaaggatagtgaataaagaaaaaaatgatgaatttagttagaaagagattaaaatttattattattattttttgagttaaagttttgttttgttatttaggttggagtgtaatggcgcgattttagttggtcgtaatttttgttttttgtgtttaagcgatttttttgtttttgttttagttttttaagtagttaggattatataggtatacgttattatatttagttaatttttgtatttttagtagaaatcgggttttattatgttggttaggatagtttcgattttttgattttatgatttattcgtttcggttttttaaagtgttggggttataggtatgagttatcgtgtttagtttaaaatttttttaaattatgaaaaattaaaattaaaagaataatagattaggaaaatatttatatatagtatgaaagagtttatttaaatgtaatagaaaatttttaggtttttaatagtttaaaagggaaagattattaaagagagaaatataaattattaataagtatatgggaaaaatattaatagtagttaaaaatgtatttttaatatagttttattgttttttagatttattaaattggttttgttattttatgtttagtaaattttaaaattattaatagtattatttatattattaagtttgttgtgatattgttttattgatataatatttttggaaagaaaatatgttttttaatatgttagagtattgtaattatatatatattttatgaattagttattttagtgttagaaatttattatgaggtagttttttaaaatattggagggtagggggtattagaaaagtatatttatgttttagtattgaagtattatatttaaaaggggaaaattcgaaaaaattaaattgtttaataattgggaattggttaagtaaattatgatataataaattaatgaaatattttgtagatattagaaattaatgtttaatgttaatatgaaatatgtgagatagtgttgaaaatatttataatatgttataggaaaaaatttttgtgtattttaattataattgtatataatgtttgtatgtggatatgttagggtgatgggagtgattttttttttttttaaaaatgttatttttaaatatattttttttaatgatgttatttgtattttaaaattattatataaaaataaatatataaataaggatttaatattttattagtaatgtagtagtaaataagaatagtttaggttttattatttttgggaatggtgatagtttgttaaatttagttattttggttataagaaaatttaaagtataaaataatatatagtattaatagtttaaagaaaattaaaattttagaatttttaaagatataggtagtcgggcgtagtgatttaagtttgtaattttagtattttgggaggttgagatgggaggattgtttgagttttggaggtcgaggttgtagttagttaagattgcgttattgtattttagtttgggtgatagtaagattttgttttaaaaaaataaataaataaataaaatatacgtaaatattattatgttatttttatttttttaaatattattatttatttatttatttaggaaatatttattgagtattggttatatgttaggtattatttaaagtattggaaatatagtggtgaagaaagtatataggatttttgtttttattaagtttatatttttacggtagatatagataataaatagataagtaagtaaatatgtaatgggatgtttagttatgaaaattattatgaaggtaataaagttgggtagggagatagagagtggtagtagtatttttttagttggggtgattaaggaagatttttttgaggaggtaattttggaatagaggtttgagtaaagggaagaagtaagttaggtaaatttttggcggaaaattattttaggtagagggagtagtaagtgtaaaggttttgagggtggaatgtgtttagtttatttaaggaggttggagttatgagagtacggagggatttatagatgagatttgagaggcggttagaggttaggttatgtagggttttgaggattatagttaggattttgtgtttttgtttttagggtaaaagggtagtttggagggttatgattaggttaagatatgatttaatttaagtttttattttattttatttttttgagatagagttttattttgttatttaggttggagtgtagtggtacgattttattttattgtaattttcgttttttgggtttaagtaatttttttgttttagtttattaagtagttgggattataggtatgcgttattacgtttagttaattttttgtatttttagtagagacggggttttattgtgttagttaggatggtttcgattttttgatttcgtgattcgttcgtttcggttttttaaagtgttgggaatatagatttgagttaatgcgttcggttttttaagttttaaaaatatcgttgtgggggttatgtggaaaataaattttagtagataaaggatggaattatggagtttggtaggaggttattgatagagttaagtgagagaggaaggcggtttagatgtatagggtattatagtattttaaaggggtagttagggggatttgttgatggatggatgtgggttatgagagataggagtttaggttgatttttaaggttagagaattagtatttaagtgttatatatttttgtttgatttgagggttttttattttttattaaatgattttagagttttaagtaaaaatttaaaagatatagaaaattttgttttaaaatttatttaattaaaggatatatatgaatatttgagatagtattattttgttgttagatttttatattttttggaaatgtttttgttaaagtgaatatttagttaattatttatatatgtttttgtgtgtttatttatttggttttaaattgatcggattattatttagagtaagaggatgataaagaaaaaaaaaaaaaagaaaaaaaattttttgatttaattgtatgatttaatttttaaaatggtggttattgggaaagtattaattttgattgtatattttattttagaagggtaaagaattatttatttaaattttttggaattttttacgattttcgtagttgtatagtatttgatagtttggaaagtattgttttataaaaagtgttttataattttttagtttttttttaaaggtaggtaagattgtttttattaaatattatatatataataaattattatatgttatgttatattattatatatattatataaggaatttgagttttagagtattttagtaatttatttaaggttatatttttagtgagtgagaaaattagagtttaaatatttagttttagtgttggttcgttgaattattttattagtaaatattgttattttttatgttaggtatgaggtatatagtgatgtattaagtagatataattttttttatgtggagttgagtgttaagtattttttttatttttttagtatatgtagaggagaatgttttattgaagggggaggaagtaagaagatttatttggtttaaaaggaagggtgattttaagagaagagatatgagttttattttatgaatattttaatggtttttaagaattattttttttttatgaatgttggaggtagttaaatggtattagtttttttgttagattttgtgagagtatatttttttagtatttttaattaggagagcggataggaggaaattatggtaaatatggaagaggataaaaagagagatgagaagttataaataaaagaaggtaggaaggtaggaaagtaggaaggtaggaaggtaggaaggaaggaaagataattgataaaaaggagaaagagaataacgaaagagattatgagttttattattgatagattagtttcgtttttttttattaggggatttgttttatatggtaaataaaaattttaaatttgtattgagtatttatttttaggaattgttttaagtgttttgtatatattaattaatttgatttttatattagttttaggatataggttgtaatatttttttgtttttatagatgaggaaataagacgtagggaagttaagtaatttgtataatttatataggtagtaagtattcgagtttagaaatgaagttaggtttgtttgattttgagttggtgttttgaatatttatgttgtgtttatatatcgtttttttttttttttttttttgagatggagttattttgttgtttaggttggagtggtataatttcggtttattgtaattttcgttttttaggtttaagtgatttttttgttttagttttttaagtagttgggattataggtattcgttattaggttttgttaattttgtatttttagtagagatagggttttattattttagttaggttgtttttgaatttttgattttaggtaatttatttattttagttttttaaagcgttgggattataggtatgagttattgtattcggtatatatcgtattgttgatttaaagtttttataaagtttttgggtaattttaatatttaattaaattatagattgtatgtgtttatattttgataaagttgtaagtgttttttttatttttatttttttttgtgggttattgattttattagtataggtgtgtgattgtgttattttttttgaaatgaattatttaagagtaaatttatttatttaagtagatttgttaatattattatgaaaagatgataatagttttttatgttagtttgtattgatttaaaaaagtattgtttatcgttgatagaattaatgttttatttgagttgggaaagcggtatggagattgttttgaaatgatatttttaagagtatttattttatgtttataatttgaattatttaggtgttttttttaaaaaaaaaaaagagtttggaaattttagaaaggttgagtgtgtgtacgtgtaggtaatgtgtgtatttgtatttatattcgggagaggtttattcggttatatttatgtttatatttgtattatttttgaaagatgagggtattattagaaatttttagagataattttatattttttgttaatagtgagttttaggagtttataaaatttattgtggagaagttaaatttttaattaatatttatttattgtttgtgtgttttaagtattatgttaagcgttggaaatataatttaaatttaaatagagtttgtaaattagtagagtatttttttgtaggtttatttgtggttttttgtgttagagaatatttgtttttatttgaaatttatatagtgtagttgaatttttattagtttttaagtatagttttttatagttaatcggaagaaaatatgataaaatattttatatgattcgtttagttttagttaggtttagttagaaagaattaagttttaggaagaaggtgattgagaaaggggagtagttgtagtaagttttattatgtaggaaggttttaaataaaatgaaaaaggtattaagtaaaagattaataaatttgattgtaataaatttttaaatatttataatgattaaagatattattagcgttaattagtaaattaaaagatatttgttatatatataaaaataatttgggtgtatggtttacgtttgtgattttattattttgggaggttaaagggggaggattattcgaggttaggagttcgagattagtttgattaatatggtgaaattttgtttttattaaaaatataaaattagttgggtgtggtggtatatgtttgtaattttagttatttgggaggatgaggtaggagaattgttcgaaattaggaggtagaggttgtagtgagttgagattatattattgtattttagtttgggtaataagaatgaaaattttgttttaaaaaatttaaataataataaaaataataatttgtatttagaatatttaaagaatttttataaattaataagaaaaagataaaataaaaggaaaatgggtaaagggtgtaaatagataattttttgtatttataaatgattagttaatatatgaaaagatgtttaaaatgtaaaaaaaaaattaattttattagaaattaagaaaataagaattgaaataagataaattttatatttttagtttaataaattaagaaaattatgatgaattgtagtaatttattgttagttagttggggtaggagaatttcggggtatattttaacgagttgttgatgggagtgtaatttggtagagttattttggagggtaaggatttaataaattaaaaaatgtatgtatattatgatttagtatttataatttaatatttattttagaaaattatatatacgtataagggaagatttacgtaaaatgatatttaatgaagtattgtgtgtgatagtaaattcgaaataatttaaatagttattagttagaaatggttaggtattttatagtatttatatataatagaatatatatagtatttttaataatattattttaaataattttgggtaaaaaaataagtggtagtattagtattatgtattatttttatatatatatatgtaaaaatatgtatgtaaaatttatatgtatatataaaaaatttatgtgtatatgtaaaaaaggtatgtgttatatggtataatatatatgttatgtaaaatatatatataagtatatatatatattttatataaaattttttttataaaaaatgttttataaagaagtattgtttattttttatggatagatttagtaggtatgttttgtatgtaaaataattgataatagtggttattttttgggagaggtgaaggtcgttggagagaggattaatgaatatttaagtgttttaaaaaaataattattaagtatattggaatataaaggaaattatatatatttagttgtgttaggttttttattaatatgagttttaatataggtttttatatagttttggtttttttaggtattgataataaagtaaatttttatttgaaaatttttgaataaaggtttttgttggttatatagtatattatgttttaattaataaattttaatagttcggaatttattattagtaataatgtgttatatattatatgtaatgtaatttgttatatattaatatatgttattatttattatgtattagtaaattgaaaaatattaatttgtaagcgatgaatttataaaaatttatatttgttttttgtaatttataaatatttaaaaataatagtatttgatagtaattttttgtgttgattgtagaaatttttgtattgtttgtattgttatgataattttagtaaaagttaagtattagattagagtgtgtgtatagttgattgtgaagttgtatgagagaggtgttttattaatttttaaagtttattattgtaatttatattgttaagaataaaaattgaaaatataagtgttttttaattataaagtttaagtttaaggatttattggaaataagttagaaagtatatttttattttaaaaattaaaataaattatttaaggaaaatagtatttttaggtaaagtgttttgttgttgttttaattagtaaggaaatttttaatttttattttataggaaagaataatgaagaatttttttattatatatatttagttttcgttttgttttatttatttttttgtgttatttattatgaatttcgtaataaaatatgaaatttttttataggtatttatattcggggtaatttgttgtcgtagaagttttttgatgagaatatttttaaatgtaaatatggttataatttttttttagttaatgatgtcgtttttaaattttttttttattatttggttgaatagtgttttggtagtgtttacggatataatattaatattgtttaagtatgattttagatttttttttatttttttttggattgagaacgtaatattttgtagtattttggacgttttgtttggatttgatttaggttgtggtatttgtaggacgtattgtagatagttttgagttagtttgtaaatatatttaaatttatagtttgttattttttgtttggtggagagtaaagttttgagttggtttattttgaagttgttgaggtaatgtgttgagaatgtttattgagtttgattgagttatgatatatgatgatatatggaggttggtggaatttttgtttgtattattttataatatttttttttttagttattttcgtgcgtaggttgtgttttatgttatgtatgaaagagaaagtttaaaatgtgaaagaggaaaatgttttagagaagttatttttttattttgtgattaatttagttttgtaagttttaaatgtaggatgtggagaaattagaatttttgtagattgttggtgggaatgtgaaatggtataatttttgtgaaaatgttggtagttttttaaaaagttaaatatagaattgttaaaagatttagtaattttatttataggtatatatttaatagatatttaaatatttatatacgaatgtatatggtagtattatttataatagttaagatgtggatataatttaaatgtttattaatagacgaaaggataaataaattatggaatattatttattttaaaaaaggaatgaagaattgatatatgttttaataggaatgaattttaaaaatattaggttaatagaaagaagttaaatagaaaaggttatatattatgtgattttatttttatgaaatatttagatagttaaatttataggatagaaagtaaattggtggttgataggggttgagaagaggaaggagtaattgtttaatgggtagaaggtttttttttgtgtgatgaaaatgttttataaggtcggtcgcgttggtttacgtttgtaattttagtattttgggaggataaggcgggcggattgtttgagtttaggagtttgagattagtttgggtaatatggtaaattttcgtttgtattaaaatataaaaaattagttaggcgggtggcgtgtgtttgtaattttagttattcgggaggttgaggtaggagaattgtttgaattcgggagatagaagttgtagtgagttaagattacgttattgtattttagtttgggtaatagagcgagattttgtttttaaaaaaaaaaagaaaagaaaatgttttgtagttagatagaggtggaagttgtataatattgcgaaggtattaaatgttattgaattgtttattttaaaatggttttgtgaattttaaatttaagaaaagttttaaacgttatttacggggtaaatcggagtaacgataatttggaatggagattataaaatagtttgggtggtagagaatagggtttttcgaggtgattttggtagtatcgtttttgattatttgtaattgagtaaggatgatatcgagagggaagaaaaaaatattttttttgggttaggtacggtggtttatttttgtaattttagtattttgggaggttgaggcgagcggattacgagattagaagatcgagattattttggttaatatagtgaaattttatttttattaaaaatataaaaaattagttaggtatggtggcgggtatttgtagttttagttatttgggaggttgaggtaggagaattttttgaatttaggaggcggagtttgtagtgagttgagattgtgttattgtattttagtttgggcgatagagcgagattttattttaaaaaaaaaaaaaagaaaaagaaaaagaaaatattttttttggtttttattttttatttattttagaatttttgatagaaaataaaattttgttttaagtttgatttaatttatatttttaatttaggtaaattattcgatgtgtggattagaaattgtaggattagaaagagtattggatttatagttagagggtttggatttagttttagttaaatttttttttttttatttagtatgtattttgggtttgtgtttaatttgtaaaatgaggtaatatatgttgattttagagggttgaggtgaagtttaaagagatgatttatgtaaagtttttattattatgtttggtaaaacgtacgtgtttaattaaagttagttttttattgtttttttgtggattaatgaggaatttggttttttaattatttttttatttattaaggatataattttataggtgaaatgtaaattttatttgatttagttatggtagtaattttgagaaaaggtttgtagtggatggaagaaaaaggagataatttatggtcgttggagaaattgaatttattttttttttttatttatatatggagtgattttgagttttttattttgtttatgattagttgtaaataggaaaaatgatttatatataatttgtatttttgaattattattatagggttaaggaggaaaggagaggtgttgtttagaatgttcgttaatagcgtggtagttatgaaaatgtattttttagatttattgtggtggtttaattgattaagggttttagtcgtagtgttttgaatttattatagttttgtattgaggttatatattttataggttgtttttagttaatgattgagtaaagtaggaattttaagatcggtttttgtaagttaattttttttgataggtaattttgttttaatgattttttatgggttttgttgaaatttttttcgattgtatagttatggaagattttttattttatttttttttttttgttttttgtagaggttagttttgtattgtagtttgatagttttgtagttttttttgtttttttttttttttttttttataggtatttattttagtaaatttgttagacgtttaatttttttatgatatttttttggagtatttagattgatataggatttgtagagtataaaggagtatatagatatgttgttaagttatttttttaggaatttttttgggaaagttttttcgtgttttttagattgtgttcgttggtttataggagtataaagttaagagtaggttgttgtatttttttaaattatttttgagtattataagaattagggaaaggatgggaagattgagtttttttttttttattatatttttttggtgttgaatatttttttaaaaataagagaagtagtcggattcgttggtttacgtttttgggaggttaaggcgggtggattatttgaggttaggagtttaagattattttggttaatatggtgaaagttcgtttttattaaaaatataggtagtagaggtatatgtttgtaattttagttatttgggaggttgagataggagaattatttgaatttaggaggtagaggttgcggtgagttgagattgtgttattgtattttagtttgggtaatagagtgagattttgtttttttaaaataataataataataataataatagaagtatgtggttttaaaattgtaattaagtatttttggttgggtgtggtggtttacgtttgtaattttagtattttgggaggttaaggtaggtggattatttgaggttagaagtttgagattagtttggttaatatggtgaaattttatttttatttataaaaaaaaaaaagtataagattaggtacggtggtttatgtttgtaattttagtattttgggaggttaaggtaggtggattacgaggttaagagatcgagattattttggttaatatggtgaaattttgtttttattaaaaatataaaaattagttgggtttggtggtacgtatttgtagttttagttttttgggaggttgaggtaggataatcgtttgaatttaggaggtggaggttgtagtgagttgagattgtattattgtattttagtttgggtaatagagggagattttgttttaaaaataaaaataaaaataataataattagttaggtattttatttatttaataaagattaattatttgtttttattgggttttggtttgggtaatgggtggaaatagaaaaaagatagatttttgtttttgtttttttgagacggagttttgtttttgtcgtttaggttggagtgcgatggcgtaatttaggtttacggtaatttttgtttttcgggtttaagtgattttttcgttttagttttttaagtagttgggattataggcgtttgggaatatttttggttaatttttgtatttttagtagagatggggttttattatgttggttagattggtgttaaattgttgattttaagtgattcgtttttttagttttttaaagtgttgggattataggtatgagttattatatttagtttagggttttatatttttaattttttgtatgttaaaaggagttgttttaaaaatttttatatattgtggttaggcgtagtggtttatatttggtaattttagtattttgggagtttaaggtaggcgaattattttaggtgaggagtttgagattagtttgattagtatggtgaaattttgtttttattaaaattataaaaattagttagatatggtggtcggtgattgtaattttagttatttaggagattgaggaagaagaattatttgaatttaggaggcggaggttgtagtgaattaagatggtgaaattttatttttatcgaaaaaatttaaaaattagtcgggtatggtggtggttatttgtaattttagttattaggggtgttgaggtaggagaatcgtttgaatttaggaggtggaggttgtattgagttgagataatattattgtattttagtttggcgatagagtaagatttcgtttttnaaaaaaaaaaaaanannnnaaaatttaagtatagttattttattttattttaatagaatatacgaggtttaaatagaaattttgtagtttaattaaaataagtttttaaattaatgaagtttttttatgttatattttttatagagattattaagtatattataatgaagaaattttattttttttgatttaattttgtaatattattaggtaatattgtggagtt

SEQ ID NO: 199 - DNA, 6509 bp, Artificial Sequence
  chemically treated genomic DNA (Homo sapiens)
ttttttttttttttttttttgagagggtgttttattttgttatttaggttggagtatagtggtatgattatagtttattgtagttttgattttttaggtttaagcgatttttttgttttaatttatttagttgttagggataataggtgtatgttattaggtttggttaattgttttttttttgtttttgtttttgttttattttgtagagagggggttttattatattgtttaggttggtattgaatttttgggtttaagtattttttcgttttggatttttaaagtggtgggattataggtgtgagttattatggttggtttgtttttgggattttttttttttttttgaggtagagttttattttgttgtttaggttggagtgtggtggtatgtttttagtttattgtaaattttgttttttgggtttaagtgatttttttgttttagttttttgagtagttgggattataggtatttgttattatgtttagttaatttttgtatttgtagtagagacggatttttattatgttggttaggttggttttgaatttttgatttcgtgatttattcgttttggttttttaaagtgttggtattatagacgtgagttattgtgttcggttaaagttagtatgtttttagatagtgttatataattaaaaataatagttggacgtaatggtttacgtttgtaattttagtattttgagaggtcgaggtcggcggattataaagttaggagttcgagattagtttgattaatatggtgagataggagaattatttgaagtcgggaggtataggttgtagtaagtcgaggttgtgttattgtatttcggttttggcgatagaataagattttgtattaaaaaaaaaaaaaaaaaaaagagggaggttgaggttagagaatcgtttgaatttaggaggtagaggttgtagtgagttaagattatgttattgtattttagtttgggtaatagagtaagattttattttaaaaaaaaaaaaaaaagaaaaagaaaaaagaaaaaaaatataaagttatgtgtagataatatagagaagtataaaaaagaaaatttattttttttagatttaaatgtaatttattttttttaaattagattttagttaaagattatttgagagttatttttaagatttgtaaaattttttttttaaaatatgtatttatttttttaaaatataaatttttttatgttttttttggtttaaaaaaatttttgttggtttttttggtgttatttgatgtgttgttcgtatggatatatatttatattttattttttttttattattttttttagttattttaatttatttttaggatattatgggtttttacgttgggttgttaggttttcgtttaagtaatattttttgtttaaaatgtttttatatttttttttatttaagtaaaattttatttttttgagggttagtttagtaaagtttttatttgtggatagagtttatttgttttttgttgggtttttaaagtatattgaggtttttataatgatagtttttatattgagataattgtggtattataggtttaaaaatgtaaattagatcgggcgcgttggtttatatttgtaattttagtattttgggaggttaaggtgggcggattacgaggttaggagttcgagattagtttgattaattggtgaaatttcgtttttattaaaaatataaaaattagtcgggcgtggtggtaggtgtttgtaattttagttatttaggaggttgaggtaggagaattatttgaatttaggaggcgaaggttgtagtgagtcgagatcgtattatcgtattttagtttgggtgatagagtaagattttatttcgaaaaatagtaaaaaaaatgtaaattagagttaggtgtggtggttaatgtttgtaattttaggattttgggaggtcgatatagatagattatttgagtttaggagtttgagattagtttgggtaatatggggaaattttattttttataaaaaatataaaaattagttgggtgtggaggtgcgagtttgtatttataattattggggaggttgaggtgggaggattatttgggatggggaggtcgaggttgttgtgagttgagattatattattgtattgtaggttgggtgatatattttgttttaaaaaaaaaaaaaaaaaaaaggtcgggtacggtggtttatgtttgtaattttagtattttgggaggttgaggtagtcggattatttgaggttagtagtttgagattagtttggttaaaatggtgaaattttgtttttattaaaaatataaaaattagtcgggcgtggtggtgtgtatttgtagttttagatattagggaggttgaggtaggataattatttgaatttggcgggtagagtttatagtgagttaagatagtattattgtattttagtttgtgtaatagagtaagattttatttcgaataaataataataataaaaaaaaaaaaaaaaatgaggaaagagtttaatagaaagattatttgaaaaaggggtaaataatatgaagaaaatttattaatataagatttattattttttaaagaaagattaaaaaatatgataaattgtttaattttatttataataaaaaaagaaatatgaaagtgttttcggtttttatttatttaattggtaaggataaaatatttgataatatattgtgtggtttagggtgtaaggaaattggcggggcgcggtggtttacgtttgtaaacgatttttttgtaagcgagtttgttgttttagtttttcgagtagttgggattataggtatgcgttattacgtttagttaattttttgtatttttagtagagacggggttttattatattggttacgttggttttgaatttttaattttaggtgattcgttcgtttcggttttttaaagtgttgggattacgggcgtgagttatcgcgttcggtttgttttatggagtttataattaataatttttttaattattataatagtttaacgagagaggttggtattattatttattttataattgaggatattgaagtatagagtagttgagaaatttgtttaattagtagagttagaatttagataaagtgtttaattataaggcgatgttttttttatatataaattgacggacggatgaaataggttgattgattgatgagtgattgattgattgattgaatgaataaatggaaatgtgattataaatgttgattttttgcgtttttcgattttttagatttatcgcgagggggcgattttttttcggttttgatgttagttatttaaggcgcgtattttttttgcgtttcgggttcgcgcgcgttgtcgcggtatcggaagtgattgagtttgtaagtttttttgtttttttaggggaaattgaggtcggtttgttcgggagagacggcgcgagtagttagttaggtaggtcggtagttaggtaggtcggttcgggttcgcggcgcggaattcggtcgcgaagagtttttgcgtttggaagttatcgggtcgatgaagggggatgtggttttttacggttcgcggggttcgtaggtgagagcgtcgttttttttgtgcgtgatagtcgttgcgtttaataggagttttcgtcgtttcgttttcgtgtcggttgggttcgttgattggttgcgttggggcggatcgtcgggggcgaggtttttttttttaggaaggtttagggggcgttttcgggggagggcggttgtttagtaacggggcggtggttcggcgggtattcggtttagtgagttcgagaagtcgttaggtcgtagtcggtttattttgggtttcggagaggtgtagttttcggtttcggagttttttcgggggcgttagaaagttattttgggtttgtttttaggaaaacgtggttttagttgtggggtcgtcgagtaggtttcgatttttttttttgatttgaggagaggtttagcgttttatttttatttagtttttgtgtagggcgtcggcggttattgtgttcgggcggggaatggaggattcggtaatttttaattgttacgttttgggtttttggggaatttagagtaaattagcggtatttgttgggggttttcggtttttaatattatagataggtttgggggtggtttttttaaagttagattgtagatttgaggtagtttttttttttttgcgttttttattgaaattttgaattttattgagaagtttttttagggtttcggacgtttttattttattttgggttggtgtttaaatagaaaaaagaaaaataaaaattaattaaatttatattagttattttcgggagagtatttttggtttttagtaggaggcggagagttaaggggcgtgtaagagagagggggttgggttttcgggtggtaggaggtcgcggttgcggagcggtcgttttcgattcgggcgatggaggaggaagtaagcgagggggttggtttttgagtttcgtaatttttgtgtcgttttttgggtttttagtttgtcgggtcgtatgattttttcggtcggagttggtttttttgttagttatcgcgaggtcggttgagttatcggtattttcgtagttattttttttttcgatttgtgatataaaagatttttcgggggttgtatttgtttgtttttgtttaaggcggatttgaatgtaggtggtgcgggggagcgggagtggggcgggggggattgtttagggagtgatttttcgaggaaggtatttcggagaagacgggggtagaaaaggttggtgggagatttagagtttattggtgttttcgatttgatttaagtgaagtattttggaatttagatttagattttcgtaagatttataaagaaattagttttggtatttggagggggaatggaatttttagggtaaatggtatgtatattaattattttttttttttgaagttttttttttttttttagaattttattttggttttggattttagaagagaattattaattagagacgagatttagtgagtgagtaggtgttttggataatggattggttgagtttatttttattataaaaatgttttagagtaatcgggagttggtggttgatttttttttttataagtttttttagaaaggatatagttggagttagtttagtgatgtggaagagaataggattgaggttttagaagggattgaatcggagatggagatttttagtgttattaatggtaatttattttggtatttggtagatagtttcgcggtgaatggagttattggttatagtagtagtttggatgttcgggaggtgatttttatggtagtagtaaagtaagcgttgagggaggtaggcgacgagtttgaattgcggtatcggcgggtatttagtgatttgatattttagttttatattattttagggatagtatattagagttttgaataggtagtgaatgaattttttcgggatggggtaaattggggtcgtattgtggtttttttttttttcggcggggtattgtgcgtggaaagcgtagataaggagatgtaggtattggtgagtcggatcgtagtttggatggttatttatttgaatgattatttagagttttggatttaggagaacggcggttgggtaagaattaagttttttgtgtgttttttttttttggtttttggttagagatttttaatagttttttttttgtatttttttttgttgtgttgggtgattgttggagacgttgatagttgaggaaatttgattggttttattttattataagaggttaattttttggaaatataaatgattttgtgttttagagattaggtattttttattttggttatttttatgattttattattttatatttgtgttttagttttttagtaaagaaaattgtagtttatgtgtttattaagttttaaatttgtgagggtaggaagttagttcggtgttttttttattttatataatggtttatatataaaggggtgatgagtataatgtttggagaagatgatgagtattaatgatttatagatttttttatttgttttttttaaggggttttagttttattttgggttttttttttttaaattaagttttttttattttaaagtttgcgtgtatggtattttttttttagattagggtatggttataggtaggagtttttattgggttgaatggttgagaattgttagattttggggtagtgtaggttgtgtagattgtgtttgtattgcgttttttaagtttattttttttaaagtgtgcgattttttgtatggttgttttgtttgtggagtatttgttgtgttatatattaagttaggggattttgtattttattgtttggggtcggttggggagttttagttgttttgtttgttatttttcggttagagtttaggggtttttttaagtattgttt

SEQ ID NO: 200 - DNA, 6509 bp, Artificial Sequence
  chemically treated genomic DNA (Homo sapiens)
aaatagtgtttgaagaggtttttgggttttggtcggaaagtaataggtagagtagttggagttttttaatcgattttaggtaatgaggtgtaaagttttttggtttaatgtgtgatatagtaagtgttttataaataaggtaattatgtagaaagtcgtatattttgggggaaatgaatttagggggcgtagtgtaaatataatttgtatagtttatattgttttaaaatttgataatttttagttatttaatttagtgggaatttttgtttatggttatgttttagtttgagaggagagtgttatatacgtaaattttgaaataaagggaatttgatttgggggagagaagtttaggataggattgagattttttggggggaatagatggagaggtttgtgggttattgatgtttattattttttttaggtattatatttattatttttttgtgtgtgaattattgtataaggtaagggaaatatcgaattaattttttatttttataggtttgggatttaatgaatatataggttatagttttttttgttgagaaattggaatataagtatggaatagtggagttatgggggtgattagggtgaaagatgtttgatttttgaagtatagggttatttgtatttttaaggagttaattttttgtggtgaaatgaggttagttaggtttttttaattattaacgtttttaataattatttaatataatagaaagagatatagaagaagggttgttggggatttttgattagaggttaaagaaaagggatatataaggggtttggtttttatttagtcgtcgtttttttggatttaaggttttaggtggttatttaggtaagtggttatttaagttgcgattcgatttattaatatttgtatttttttgtttacgttttttacgtatagtgtttcgtcgaaggagaaaaaggttataatgcgattttagtttattttatttcggaagagtttatttattatttgtttaaagttttgatatgttgtttttggggtgatgtggagttgggatgttaggttattgaatgttcgtcggtatcgtagtttaaattcgtcgtttgttttttttagcgtttgttttattgttgttatggggattatttttcgggtatttaaattgttgttgtggttagtggttttatttatcgcggggttgtttgttaggtgttaggatgggttgttattgatggtattgggggtttttattttcgatttagttttttttggggttttagttttgtttttttttatattattaaattgattttagttgtattttttttgggaaagtttgtaggagagaaagttaattattagttttcggttgttttgagatatttttataatagggatgggtttaattagtttattgtttaaaatatttgtttatttattgagtttcgtttttggttagtgatttttttttaagatttaaagttaagataagattttgaagggagagaaagagttttaggaaaaaaaaataattaatatgtatgttatttattttaaaaattttattttttttttaggtattagaattggtttttttgtgggttttacgaaggtttgggtttaggttttaagatattttatttaagttaaatcgaaagtattagtggattttgaattttttattagttttttttattttcgtttttttcgaaatgtttttttcggaaagttattttttgggtagtttttttcgttttattttcgttttttcgtattatttatatttaaattcgttttaggtaaaggtaggtaggtgtagttttcggaagattttttgtattataggtcgggagaggaggtggttgcggggatgtcggtaatttagtcggtttcgcggtggttggtaaaaaaattagtttcggtcggagggattatgcgattcggtaggttgggagtttagaaggcgatataggaattgcgaagtttaggaattagttttttcgtttgtttttttttttatcgttcggatcgagggcggtcgtttcgtagtcgcggttttttgttattcgggagtttagtttttttttttttgtacgttttttggtttttcgttttttattgggagttaggagtattttttcggaggtggttggtatggatttagttggtttttgttttttttttttttatttaagtattagtttagggtgaggtggaggcgttcgaaattttaaagggattttttaatggggtttaaggttttagtgagggacgtagggagggggaaattgttttagatttgtaatttgattttgggaaggttatttttaggtttgtttgtgatgttgaaggtcggagatttttaataaatgtcgttggtttgttttgaattttttaaaggtttagaacgtggtagttggggattgtcgggttttttatttttcgttcggatataatggtcgtcggcgttttgtataaagattgggtgagggtgaggcgttgggtttttttttaggttaggaagaggggtcgaggtttgttcgacggttttatagttgagattacgtttttttggggataggtttaaagtggttttttggcgttttcgggagggtttcggggtcgggggttgtattttttcggagtttagggtgggtcggttgcggtttagcggtttttcgagtttattaggtcgggtattcgtcgagttatcgtttcgttgttaggtaatcgttttttttcgggggcgttttttagatttttttgagaggaggggtttcgttttcggcggttcgttttagcgtagttaattagcgagtttagtcggtacggaagcgggacggcgaaggtttttattgggcgtaacggttgttacgtataggggaggcggcgtttttatttgcgagtttcgcgagtcgtggggggttatatttttttttatcggttcggtagtttttagacgtaagagtttttcgcggtcgagtttcgcgtcgcggattcgggtcggtttatttggttgtcggtttatttggttgattgttcgcgtcgtttttttcgaataagtcggttttagttttttttgaagagataggggaatttgtaagtttagttattttcggtgtcgcggtaacgcgcgcgagttcgagacgtaaagggagtgcgcgttttgagtgattggtattaggatcggggagagatcgttttttcgcggtagatttggggaatcgggaggcgtaaaaaattaatatttataattatatttttatttatttatttagttagttagttagttatttattagttaattagtttattttattcgttcgttagtttatatatagaagaagtatcgttttgtggttaagtattttgtttggattttaattttgttagttaggtaagttttttaattgttttgtgttttaatgtttttaattgtaaaatgggtaatagtattaatttttttcgttgagttattgtgatgattaagagagttattaattgtaaattttataggataggtcgggcgcggtggtttacgttcgtaattttagtattttgggaggtcgaggcgggcggattatttgaggttaggagtttaagattagcgtggttaatgtggtgaaatttcgtttttattaaaaatataaaaaattagttgggcgtggtggcgtatgtttgtaattttagttattcgggaggttgaggtagtagattcgtttataggagaatcgtttataggcgtgagttatcgcgtttcgttaatttttttatattttgaattatatagtgtgttattaaatgttttatttttgttaattagatgggtaaaaatcgaaggtatttttatatttttttttttattatgaatgaagttgagtaatttgttatattttttagtttttttttggagggtggtggattttgtattggtgaattttttttatattgtttattttttttttaggtggtttttttgttgaattttttttttatttttttttttttttttgttattgttgtttgttcgagatggagttttgttttgttgtataggttggagtgtagtggtgttattttggtttattgtaaattttgttcgttaggtttaagtgattgttttgttttagtttttttagtatttgggattataggtatatattattacgttcggttaatttttgtatttttagtagagatagggttttattattttggttaggttggttttaaattgttgattttaggtgattcgattgttttagttttttaaagtgttgggattatagatatgagttatcgtgttcggttttttttttttttttttttttgagatagggtatgttatttagtttgtagtgtaatggtgtgattttagtttatagtagtttcgatttttttattttaggtgatttttttattttagtttttttagtagttgtgaatataggttcgtatttttatatttagttaatttttgtattttttgtagagaatggagtttttttatgttgtttaggttggttttaaatttttgggtttaagtgatttgtttatgtcggttttttaaagttttggaattataggtattagttattatatttggttttgatttatattttttttgttgtttttcgagatggagttttgttttgttatttaagttggagtgcggtggtgcgatttcggtttattgtagttttcgttttttgggtttaagtgatttttttgttttagttttttgagtagttgggattataggtatttgttattacgttcggttaatttttgtatttttagtagagacggggttttattagttggttaggttagtttcgaatttttgatttcgtgattcgtttattttggttttttaaagtgttgggattataggtgtgagttagcgcgttcggtttgatttatatttttgaatttatggtgttataattattttaatgtgaaaattattattatggaagttttagtgtgttttgggagtttagtagagggtagataaattttgtttatagataggggttttattgaattggtttttaaaagaatagaattttgtttgggtgagaaaggatgtaggagtattttaagtagaagatattgtttgagcgaaggtttggtagtttagcgtgagagtttatggtgttttggaaataaattgggatggttgaggggagtggtggagaggggatggaatataaatgtgtatttatgcgagtagtatattaaatagtattagaggagttagtaaagatttttttaaattagaaagaatatgaagaaatttatattttggaaagatggatatatattttggaaaaagaattttgtaagttttgaaaatggtttttaaatgatttttgattggaatttaatttaaagaaaataagttatatttaaatttaaagaaaataagtttttttttttatatttttttatgttgtttatatataattttgtattttttttttttttttttttttttttttttttttttttgagatggagttttgttttgttgtttaggttggagtgtagtggtatgattttggtttattgtaatttttgttttttgggtttaagcgattttttggttttagttttttttttttttttttttttttttttgatatagagttttgttttatcgttaaggtcggagtgtagtggtataatttcggtttattgtaatttgtgtttttcggttttaagtgatttttttgttttattatgttggttaggttggtttcgaatttttgattttgtgattcgtcggtttcggttttttaaagtgttgggattataggcgtgagttattgcgtttagttattatttttaattatataatattatttaaaaatatgttaattttggtcgggtatagtggtttacgtttgtagtattaatattttgggaggttaaggcgggtggattacgaggttaggggtttaagattagtttggttaatatggtgaaagttcgtttttattataaatataaaaattagttaggtatggtggtaggtgtttgtaattttagttatttaggaggttgaggtaggagaattatttgaatttaggagatagagtttgtaatgagttgagagtatgttattatattttagtttgggtaatagagtgagattttgttttaaaaaaaaaagaagaattttagaaatagattagttatggtggtttatatttgtaattttattattttgggagtttaaggcggaaagatgtttgagtttaggagtttaatattagtttaggtaatatagtgagattttttttttataaaataaaataaaaataaaaatagaaaaagaataattagttaggtttggtggtatatatttgttgtttttagtaattgagtagattgaggtaaaagaatcgtttaagtttgggaggttaaggttatagtgagttgtgattatattattgtattttagtttgggtgatagagtaagatatttttttaaaaaaaaaaaaaaagggaa

SEQ ID NO: 201 - DNA, 6049 bp, Artificial Sequence
  chemically treated genomic DNA (Homo sapiens)
ttttttttttttttggtcgttagtttttagggttttagattattatattttgttttttgttagcggtttgttttgagcgtgcgtttaattgtatttatttttcggttttaaggtttttacggttcgggcgttttcgtttatagttttttgataggtggtttcgtttgttttcgttgttgtattagggggcggggattttatttttgcggtttcgagtgaagttatttaattttttaaaaaaaatatttacggacgggacgcgatggtttacgttttaaattttagtattttgggaggtcgaggtgggaggatcgtttgaagtttggagtttaagattagtttgggcgttatagtgagatttttgatttttataataataataataataaaatgtaaaaagtttttaattttttcggtatagtataggaaaggttaacgtcgggaagaaaaaataattttttatttttttgtaggggaaggtttaaaacgtttagtatgtgattttatttttggggtttattgtttttttttttgaaatttaggtttttggtttgggtagggggtggtggtgcgtgtaaagaaggaaaggttatgaaagttaggtagagttttttaaatagaaggtgagaatatggtattcgaattgagaattgtaggaagatttagtttttagtgattttgagtaagtaaggtataatttttttggagttagtgttttcgtgtgtgtgtgtgtgtgtgtgtgtgtgtgagtgtgagatggagtttcgttttgtcgtttaggttggagtgtagtggcgtgatttcggtttattgtaatttttgttttttcggtttaagcggtttttttgttttagttttttgagtagttgggattataggcgtttattattacgttcggttaatttttgtatttttagtagatacggggttttattattttggttaggttggttttgaatttttgattttaggtgatttgttcgtttcggttttttaaagtgttgggattataggtgtgagttatttttgaatttagagttatattttgaatttagtgtttttatttgtaaaaaagtggtggagttttgatttttaatttaagtgtaagttttttgagggtaggggttttgtttgatttatggtgagttttagtatatggtaggtatttaaattattgaatgaataagtatttaataatttttttggagttgggattgtggaattataggtttagtgggagtttttaagaagggtagagttggttttttttttttttattttttttttttaatattagtgaaaaaaaaaagtgaagttgtttttagtttttttttaatttttttattgatttaatatagtatttataatgtgttaggtattgttgtaagggttttataaatattaatttatgtaatataattattagaggaatagagattattatgtttagtttaaagatgagagaattgagggagagaggggagaggatttttatttagggttatatagttaataattggggaggtgggattaggatttaaatagtttagttttagagtttacgtttttattcgtttggttatataagattaaaatatttaataataatagttaatatttttagagtgttaaaagagggaatattagagtagaaatgaagtttttaaatttaaagtagtaggatagtttaattgtaaaattataagtgattaagttgaaaataaattatgagatatatgttattttattattatataatttatttttgtttatatgtattcgtattagtattgattgtagtaatattagttagttaggatttatttttaaagtaatattgattttttaaattttatacgtatatagaatgtatggatgtatttttttcgtattattatatgtgatataatatatataatgtatatattgtatatgtatatataatataatatatataatgtatataaattaatgtttaataaattatatattaatttatgttataattaagttggtttaggagtttgagattagtttgggtaatataatgagatttttatttttataaaaaatgaatttaattaagtatggtgtagtatatttttagttttagttattagggaggttgaagtgggaagattgtttgagtttagacggtggaagttgaagtgaattgtgtttgtattattgtattttagtttaggttatggagtgagaattttgtattataaataaataaataaattaggagtgtaaatgaagatttggattaggttattttttaaagaagagggtaattttgttggtggtagttagaatgattaggttaagagtaaaaatgaaatgaggatggttgaaaggatatagttataaaggagtgtaataggttgtgtgtttagaatagaggagagaattgagtatggatttgtaaatggtgtggatttagattatgagaattatattgattatgtgaaggtaagaggtgattttgaagcgatagtgttaaagttatagtatgagatggttgtgttagttttttatatattagtttatggttttgggaaaattatttaatttttttaaattttaatttttttatttatagaatgaggataaaatagtataaggattggtgagaggaaaaaatatatatgtaaaaaaagtatagtatttaataattttttaaaatatgttagtttttatttttttttttttttgagatagagtttcgttttattatttagtttggagtgtagtggtatgattttagttttttgggtttaagtgatttttatgttttagttttttgagtagttgggattataggttggttaatttttgtattttacgtttggttaatttttgtatttttagtagagatggggttttgttatgttggttaggttggtttcgaatttttggttttaagtgatttattcgttttggttttttaaagtgttgggattataggtatgagttatcgaatttagttagttgttattgttattgttgtagaaaagattttgtttttttagtgattataagggaagatggtaatatagaggtttggattggaggtagaagtaaagggagttagtagaataggagaattaggttgtttttttttggtttttggttggggtattttttaaaaaagtgttagatttaagagtttagggggttggttgtgagtgtttttatgtggattagttatggttagattgttttacgtttgtgatttgttttgtataaatatattgttatgtataaataatggttttatatatatgtaatttggaaggataaatattaagtttaatattggtaatttgtagggagggaagtggaattgggtgtgtatgtgtgtgtgtgtttgagaatttgtattttattatttcgtacgtttttattgtttgattttttttataatgagaatgagtttgtgtgttgggtaaaaaaaagaaaaagaaaaaaattttattaaaattaatttaattataaaagaagatgaattaaagaaaagtatcgagagaaattgtttgtgatttaagttttggttttttaatgtttggttgaagtttagtttataaagagaatattgggttaaaggttttggagaaaagatgggaaaggtttggtgtttatgtggtgtttgttagttttataagggtaaggtatttggtagacggtttttagtttaatgggaattgtttttgttttttaggtatatagtttagggttggaaaagtttaataagtgtatggaatatcggaaattttttgaaaatgttaaatttgtttcgagatgtttcgaagttcggtatatttttttgggtagtttagaggtttaggagtttagtttagtttagtttatcgtgtttttttagttagtttttttttgtttttagtagttttttttttttttgagtagtggttttttgtaggtttgcgttttagtttcgtttttttttttggacgtatttttgggttttattattattcggcgtcgggttttttttttgtttttttttttttttttttttttttttttttttttttttttttttttttttttttttttagtttttgtattaggaaacggttcggatttcggtagcggtttgattcgtgagatttttaatttggtaggcgggcggggttggagattggttgaggtgggggtaagggaggagttgggtttttgggttgtattagggggaatcgggaatagagatggtgtcggtaggaagtttttggttttgggtttttcgggaggatagttattaaatatggattcggttatatagttggtagagcgttgggggtaggggtttaggtttagagttgtaattttagttttttttaggttagaatttgatttttggttttttttttttggttttgattttttttttttttttttagggttttacgttggttaggaggatgaaaggttttagttgggggttttttgttattagtgttgtgttttaagagttgttatttcggttgggtgagtgttttttttttttttttgtttggagtaatttattgcgttttttatttttttttttagtttatttgtttttttttattttgtgtttttgttaatatttttatattttgtatttggggaggttttaagattttttttttagttaagaaggtgtggattaaggagattcgggggtgggggtgttgtaggggtgttattgagttgacgttgttttattgtgaaaagaatttaaagtattttaaatagaaaatttatttgttttatatttaatttggtatattaggaatgtaatggttagttatttatagtttagttttatattatgatttaatttttttgtttttgtttttttttgtttagtgagttttgagtatttttttttttttttttattttattgggttggttaaattagaagtgttttttttgattttttttttatatatttatgttagttttttatttttgttttttatagtcgttcggatggcgattttagtttcggttttagatatacgggttttggtggtagattttgtaggttataagttgaggtagaagggttatgtttgtggagttggtttcggggagggtttagtagttgattcgttgtattaagttatgcgggtagttggagatgagttcgagattcgttttcggcgtattttttttgatttggcggtttagttgtatgtgattttaggtttagtttaataacgttttatttaggttttcgatgaatttttttaagggggttttaattggggtcgttttgtagttttttttgtttttggggttgtattgtgtgttgagagtgttaataaggagatggaattattggtgggataagtgtaggagtggatggtggtttatttggagacgtagttggttgattggatttatagtagtgggggttgggtaagaagttttttaattgtcgttttgtatatttttttgtaaagttggtttttagggggaagatgggggttttgattggaggttgaggtagttatgttgggaatgaggtacggggttgagttttttcgtttggatggaattagattgagagatgtttggattttgtattttagggttgttatgtagttaatattggatgggtttatggttttaagtagaggatagaatatatatttaaggagtgtttgtaggggaatgttgttagggattttttatatttgagttatggcgtgggaggtggggaggattagggatgggtggtggttaggtaagttttggtaaaggatgttagttttgagtagaatttttcgttaaggaaaggatggaatttattggaggtagagtgggtagatgaattagttttttagggtgggggtgtatttggggggattagaggggtttgtagggagaagagttttggttagagaggagttgggtatggggtagtgttcgtagtggatggaattggaattttttttttttttttttttttattttttttttttttgatattttttttttttttttttttttttgtttttttttttttttatagg

SEQ ID NO: 202 - DNA, 6049 bp, Artificial Sequence
  chemically treated genomic DNA (Homo sapiens)
tttgtgggagagaagggaagtaggagagaaagaaggagaaagggatattaggagaggaaagagtggagagaagaggagaggaagagttttagttttatttattgcgagtattattttatatttagtttttttttggttaaagtttttttttttgtaagtttttttgatttttttaggtgtatttttattttgagagattggtttatttgtttattttgtttttagtgaattttattttttttttggcgaaaaattttgtttagaattagtattttttgttaaggtttgtttgattattatttatttttggttttttttattttttacgttatgatttagatgtaaaaagtttttgataatatttttttgtaggtattttttgggtgtgtattttgttttttgtttgggattatgagtttatttagtgttgattgtatggtagttttggagtgtagagtttaggtattttttaatttaattttatttagacggggagatttagtttcgtattttatttttaatatagttgttttagtttttaattagagtttttattttttttttggagattagttttgtagaaggatgtgtagagcggtaattgagaagttttttatttagtttttattgttgtggatttagttagttagttgcgtttttaggtaggttattatttatttttgtatttgttttattagtggttttatttttttgttgatatttttagtatatagtgtagttttaaagataaagaaggttataaggcggttttagttggggtttttttgaaaaagtttatcggagatttgggtgaagcgttgttgggttgagtttggggttatatgtagttgagtcgttagattagagaaggtgcgtcggaagcgggtttcgaatttatttttagttgttcgtatggtttggtgtagcgggttagttgttgggtttttttcggggttagttttatagatataatttttttgttttagtttataatttataaagtttgttattagagttcgtgtgtttggggtcgaggttggggtcgttattcgggcggttataagaggtaaggatgaaagattggtatgaatatatgaagagagaattagaaggagtatttttggtttgattaatttagtgagatgaggaggagagaggaaatgtttaggatttattggatagggagaggtaagaataagggaattaagttatgatatgagattaggttgtgagtggttggttattatatttttaatatgttaaattaaatgtaaaataagtaaattttttgtttaggatattttagattttttttataataagataacgttagtttaatgatatttttataatatttttattttcgggtttttttagtttatatttttttggttagaggaagggttttaggatttttttaaatgtaagatgtaaagatgttggtagagatataagatgagggggagtagatgggttgaagagaaaggtgggagacgtaatgggttattttagatagagaaaggaaggagatatttatttagtcgggatggtagtttttaagatatagtattggtggtaaggagtttttagttggggttttttatttttttggttagcgtggagttttggaaaggggagggggagattagaattaggaggggaaggttagggattaggttttggtttgggaagggttagggttgtagttttgggtttaggtttttgtttttaacgttttattagttgtgtggtcgaatttatgtttaatgattgttttttcgggaaatttaaggttaagggttttttgtcgatattatttttattttcggttttttttagtgtagtttaaaggtttagttttttttttatttttattttagttagtttttaatttcgttcgtttgttaggttagggattttacgggttaggtcgttgtcgggattcgggtcgttttttggtgtaggagttgggagggagggagagagggaggaagggagggaaggaaggagggaggagaaaggggggggtagagggagggttcggcgtcgggtgatgatggggtttagagatgcgtttagagagaggggcggggttgggacgtaggtttgtaaagggttattatttaggaagagggagggttgttgaaggtaaagaagggttggttgagagggtacggtgggttgggttgggttgggtttttgagtttttaggttgtttagagaaatatgtcggatttcgggatatttcggggtaaatttagtatttttaggaggttttcgatgttttatgtatttgttgaatttttttagttttgaattgtgtgtttggaaaataggagtagtttttattaagttgggaatcgtttattaggtgttttatttttatggggttagtagatattatatagatattaaattttttttattttttttttaggatttttaatttagtgttttttttgtgggttgggttttagttaggtattagggagttaggatttggattataagtagtttttttcggtatttttttttaatttatttttttttgtaattagattgattttagtggggttttttttttttttttttttttatttaatatataaatttatttttattatgaaaaaaattaaataataaagacgtgcggagtaataaaatataggtttttaaatatatatatatatatatatttaattttatttttttttttgtaggttgttagtgttaagtttgatgtttatttttttagattatatatatatggggttattatttatatatggtagtatatttatatagggtaggttataggcgtgaagtagtttgattatagttgatttatatgagggtatttatagttagttttttgggtttttggatttggtatttttttaaagagtgttttaattaaaggttagaaagaggtaatttaatttttttattttgttagttttttttgtttttatttttaatttaagtttttgtattattatttttttttatggttattggagaagtaaggttttttttgtagtaataatagtaataattagttgggttcggtggtttatatttgtaattttaatattttgggaggttaaggcgggtggattatttgaggttaggagttcgagattagtttgattaatatggtaaaattttatttttattaaaaatataaaaattagttagacgtaaaatataaaaattagttagtttgtaattttagttgtttaggaggttgaggtatgagaattatttgaatttaggaggttgagattatgttattgtattttagattgggtgatagaacgagattttattttaaaaaaaaaaaaaggtaaaaattaatatattttgaggagttattagatgttgtgttttttttatatgtgtattttttttttttattagtttttatgttgttttatttttattttatgaatgaggaaattgaggtttggagaggttaagtgatttttttaaagttataggttgatatgtaagaagttagtatagttattttatgttgtaattttgatattatcgttttaagattattttttgtttttatatagttaatatggtttttatagtttgaatttatattatttataagtttatatttaatttttttttttattttaaatatatagtttattatatttttttatggttgtatttttttaattatttttattttatttttgtttttagtttgattattttggttgttattagtaaggttgtttttttttttagagaataatttagtttaagtttttatttgtatttttggtttatttgtttgtttgtgatataaggtttttattttatggtttaaattggagtgtagtggtataagtatagtttattttagtttttatcgtttaggtttaagtaatttttttattttagtttttttggtagttgggattagaggtgtattgtattatgtttggttaaatttattttttatagagatagggattttattatgttgtttagattgattttaaatttttgggttagtttgattgtaatataaattaatgtatgatttattagatattaatttatatgtattatatatattatattgtatatgtatatataatatatatattgtatatattgtattatatataatgatacgaagagaatatatttatgtattttatatacgtgtaaaatttaaaaagttaatattgttttaaaaatgagttttagttaattagtattgttatagttaatattagtgcgaatgtatgtaaataggaatgaattgtataataataagataatatgtgttttatggtttatttttaatttagttatttgtggttttatagttaaattattttgttgttttaaatttagagattttatttttattttaatatttttttttttaatattttgaggatgttaattattattgttaaatgttttaattttatataattaagcgggtaagagcgtggattttagagttaaattgtttaggttttaattttatttttttaattattaattatgtgattttgggtaagagttttttttttttttttttttaatttttttatttttaaattagatataatagtttttatttttttgatggttgtattatatgggttagtatttgtaaaatttttataatagtatttagtatattgtaagtgttatattagattagtaggaaagttagaaaaaaattaaaaataattttattttttttttttattaatgttaaaaaaaaaaaatgaaaggggaaaaagttagttttgttttttttggaagtttttattggatttataattttatagttttaattttaagagagttgttgggtgtttgtttatttaataatttgagtgtttattatatattaaaatttattatgaattagataaagtttttgtttttaaagggtttatatttggattagaaattagaattttattatttttttatagataagaatattgagtttagagtatggttttgagtttaggggtggtttatatttgtaattttagtattttgggaggtcgaggcgggtagattatttgagattaggagtttaagattagtttggttaagatggtgaaatttcgtgtttattaaaaatataaaaattagtcgggcgtggtggtggacgtttgtaattttagttatttaggaggttgaggtaggaaaatcgtttgaatcggggaggtagaagttgtagtgagtcgagattacgttattgtattttagtttgggcgatagagcgagattttattttatatttatatatatatatatatatatatatatacgagaatattgattttagagaagttatgttttgtttgtttaaggttattagaagttaggtttttttgtagtttttagttcgggtgttatatttttattttttatttgaaagattttatttagtttttatgatttttttttttttgtacgtattattattttttgtttaaattaggagtttaggttttagaaaagaaaatagtgaattttaaagataaagttatatgttgggcgttttgaatttttttttgtaagaaaatgaaaggttatttttttttttcggcgttaattttttttgtgttgtgtcggaaaagttgaggattttttatattttattattattattattgtagagattaggggttttattatgacgtttaggttggttttgaattttaggttttaagcgatttttttatttcggttttttaaagtgttgggatttgaggcgtgagttatcgcgtttcgttcgtggatgttttttttaaaaggttgagtagttttattcgggatcgtaaaggtggagttttcgttttttggtgtagtagcgaagataagcggagttatttgttagagggttgtgggcgggggcgttcgggtcgtgagggttttggaatcggagggtgagtgtagttgagcgtacgtttagagtagatcgttagtaggaggtaggatgtgatagtttaagattttggaagttgacggttagagggagggaagg

SEQ ID NO: 203 - DNA, 14568 bp, Artificial Sequence
  chemically treated genomic DNA (Homo sapiens)
gaggattatttgagtttgggagggggaggttgtagtgagttatgattttgttattgtattttagtttgggtagagtgagattttgtttttaaataaataatgtaattgcgggagtaagatttcgtttttaaattaatgaatgaaagtaattgtattatgacgtgaggatggatttaatgttattagtttcgttataattttttgggattattatcgtatatgtagttgttgattggaacgttgttatgtggtatacgttcgttttttttgatgtagtatttatcgcgtggtgatattgttttaagtgtttgatagatagtgtgtataattttttttttattttgttttttgagatggagattcgttttgtcgtttaggttggagtgtagtggtgcgatttcggtttattgtaagttttattttttgggtttatgttatttttttgttttagtttttcgagtagttgggattataggcgttcgttattatattcggataattttttgtatttttagtagagatagggttttattatgttagttaggatggtttcgattttttgatttcgtgattcgttcgtttcggttttttaaagtgttgggattataggtatgagttatcgcgtttggtttagcgcgcgtaatttttataagaattttatgaaatgggtgtagttatttttatttttattttatagatgaggtatagagaggttaggatatttgatatagttataattaatttatttatttttgtgattttggaattttttttttattttttttttttttttttttttttgagatggagtttcgttttgttatttaggttggagtgtagtggtgtgatttgggtttattgagatttttatttttcgagtttaagtgatttttttgttttagttttttgagtagttgggattataggtatttgttattatattcgggtaatttttgtatttttagtaaagatggggtttcgttatgttggttaggttggttttgaattttttattttaggtgatttgtttgttcgttttagttttttaaagtgttaggattataagcgtgagttattgtattcggttttttttttatttttttaatataattagaataatagtaaatatttgtagagagtttgatttttagtttttagtaaataattatttagattaattttcgaagtaattaaaaatgttaggaaaaatatttgaaaatattttaaaagttattatatgttgattgtaagaaagaagatagtgagaaattaggttaaaattgaaggaaaaaaattgaaatgtaatttggtaaggaagttatttttatttttgttagtttagtatatttgaatttgattatgaatgattttatggggtaagaggttagaaaattaggttgggtgcggtggtttacgtttgtaattttagtattttggaaggttgaggcgggcggattatgaggttaggagatcgaaattattttggttaatatggtgaaattttgtttttgttaaaaatataaaaaaaaaaaaattagttgggcgtggtggcgggcgtttatagttttagttatttaggaggttgaggtaagagaatggtgtgaatttagaaggcggagtttgtagtgagtcgagattgtgttattgtattttagtttgggtaatagagcgagatttcgttttaaaaaaaaaaaaaaaaaaaaaaggttgggcgcggtggtttatgtttgtaattttagtattttgggaggttgaggtgggtagattacgaggtcgggagatcgagattattttggttaatacggtgaaatttcgtttttattaaaaatataaaaaattagttaggcgtggtggcgggcgtttgtagttttagttatttgggaggttgaggtaggaaaatggtgtgaatttaggaggcggagtttgtagtgagttgagattacgttattgtattttagtttaggtgatagagtaagatttcgttttaattaaaaaaaggttagaaaattaaaatttacgatttatattaagcgggagtttttttttacgataatttgggttttgtcggattttattaatggtatgttggtaaatgtttaattattagttttggttggggttggggaaggagggttttgatgtataaattatttgtcgatttttatggtgtaaatattttttttatagttgattttaaatttttagtatgaggttattaaatatagagttgggaagtagaagtttgtaaattatttgtagtatatttttggttttatttttagattataagaagttaattagttttgtataattatgcggttaggattcgtattatttgagtggtcgggggtttataaattttgaattaggattgaggttattttagattagtagtgatttgaggggtttggtagaagtaaatataaattatttttagggggaggttttaaattatttttatgaataaattttaaaatagtgtttagtatggttaaagagaattaggtatataataaggaattatgatattatgagtaagatttagtagaaatagatttttggagattttaaatattagaattattagatataggttgtaaaattattgtgttttgttgaaagaaagaagtgtaaaaatatttgtaggagataggaaattattaaaagtgatatattagatttataaaggatatttgaagaaagttttatggttttattggggattaaaattataaatatttttaggggttagataggtaatataaatgagtaaagtggttatgagtgtattggtgatttagataattttgtttgaaagatatagatagagttttttgttttagtcgatgggtgttatgtggtattgagggtttagtttgtagatttgttggttttagagaagttgggtattttttttttttttttttttttttttttttttttttttttttttttttttttttttttttttttttttttttttttttatttttttttttttttttttttttttttttcgtttttttttttttttttttttttttttttttttttttttttttgttttatgtagtggtatgattttggtttattgtagtttttacgttttgggtttaagttattttttttattttagttttttgagtagttggggttgtagatgcgtataattatatttggttattttttgaattttttgtagagatggggttttattatgttgtttaggttggttttaaatttttggtttttagtagtttatttatttcggttttttaaagtgttggaattatagatgtgagttatcgcgtttagtttagatttttttttattatgattaaatatatataaaattgattattgtaattatttaaaagtgtataatttagcgttattaagtatatttatattgttttgtaattattattattattttattttagaatttttttattatttcgaaaggaaattttatattcgttagtagttatttttgttttttttttttttttgtttttggtaattattaatttgatatttgtttttatggattcgtttagttttagatatttttcgtaaatggatttacgtatatttatttttttgtgattggttttttttatttagcgtgttttaaggtttatttatgttgtagtatgtatttatttttttttatggttgaataatattttattgtgtggatagatatatttatttgttttttagttattatttgaattttgatataatatttttttattttaaattttaagatatatttttttaaagttttatgtggtttaaagtatatatttattgattttatatatttttgtgagatttgttttatgatttgttgttgtatatttttttagaaaattttcggaacgattttttgaagttttttttttttttttttttttttttttttttttttttttttttttttttttgttttgttttgttttattttgtttttttgagatttagttttgttttgttgtttaggttggagtgtaatggtatgattattgtatttttgttttttaggtttaagtatttttttgttttagtttttcgcgtagtttagattataggtttgtattattacgtttagttaatttttgtatttttagtagagatagggtttttttatgttggttaggttggtttcgaatttttgatttcgtgatttgtttatttcggtttttaaagtgttgggattataggtatgaattatcgcgttcggttttttttttttttttgagatagggttttattttgttttttaggttggagtgtagtggttggatttttgtttattgtaattttcgttttttaggtttaagcgagttttttgttttagattttcgagtagttgcgattataggagtttattatcgcgttcggttaatttttgtatttttagtagagacggggttttatttattatgttggttaggttggtatcgaatttttaattttaagtgatttattcgtttcggttttttaaagtgttggtattataggtatgagttatcgcgttcggttagtatttgtttttttttttattttttacgttaggagattgcgttttagaatagtaaaaagaaatgtttaggaaaaggtttgcggtttttttatttttatagtagcgtgttttttaaagattaaatttttaggggaaacgtttagaatgagtaataatttaaggttgtaattttaaatttttttaggatttagtttttttagttgtgaaatggttgttgtcgggttgttatttttaggttcggggcgttgatatttgggttattttcggtttttttttttattttgggcgcgtattagttttggttcggtcggtttcgttgtagttgaatagtaagatgcggtatttaggttattttgattatcgtagattttttttcggggttttgttttgaggttttaaaagtgttttttgtagatgggattaggggttatttgggtagtagtagcgtttggttttagtttggtattgaagttaggaatggtttaaggtgaaatcgtggttttttggtgaagtttagcgaagattttttcgttttgtttatgataagagaatttttgggggcgggaggaagagtttttgttacgatgttgattattattgagtttttgttgagtagaaaattttttagtatttaaggtcgagagtttttggtggtttgtttggtattaggtatttttttataattttagttttttaaaaggataaagtttggggtaggcgacgttttagttcgtatttgaatagggtcgcgggttagtagagatgcgcgatgtttaattttttttaagagtatttcgcgtttcgaatcggtgtttttaattcggagaagttaagagattcgtaagaaatttgtacgattgtattcgtcgtcgcgttttgggggttgggtaggggtagttgggttggttttcggggaacgcgatttttttcgcgtttcgtagatcggttgttttttatggatttttcggtatttgtagttttcgaggaagggttacgcggtgtcgtacgtttttttatcgcgcgtttagagtcggggtgtcgtgcgtttttcgttattttttaggagggcgttcgggggattttttgggggcgtaggaggttcgggggttgttcggtggtcgcgcgttcgtggagtcgatttgcggcggcggcggcggcgcggttttttttgttttgatgtagttgttttcggcgttgcgtatttgggttagggtcgcggcggtttcgggttttgtgtgtgtgtatgtgtgtgtgtgtgtgtgtgtgtgtgtgtgtgagagtgtgtgcgtgtgagagtgcgagtgtttgtgcgcgagtgagtgagcggacgggcgggcgcgagtgtggtcggcggagcgcgagtaggatcgcgggcgcgttttttagtttcgttttttcgtcggaattatgtcgggtaggtcggttcgagtcgagacgaggagtcgggttaaagatgatattaagagggttatggcggcgatcgagaaagtgcgtaaatggtaagcggaggcgttcgtcgttagtcgttttttcggtcgtttcgagttcgagcgcggttttagagagtcgcggggcgtagcgtttcggtcgtttgtttcggtttagtttcgtcgcgggtttcgggatttggcgagggcgggcggacgggcgggcggcgcgcgagtcgggttatttgcgttaggttggggtcgcggtcgttgtttaggtgcgttcgcgtttgtagtttatttggcgcggcggttcggaggcggcgggcgtcggggttaggcggttggagcggcggggcggttttcgtcgcggcgttcggttttcgggaggggggttcggggtcggttttagaagttatttcgttttgtgtaagttatatgaaagcggtttttcgcgcgtcggggtcgcgatgtcggcggcggcggggagagcgcgagttttattgtgtaggtttcgagcgggtcgtcgtcgtcgtttttttttcgcgtatttcggttcgcgtttcgtcgtttttcgttagtttcggttcgttcggtcgttcgttttcgtttttcgggttcggcgttttcgagtttgcggagtttgtagagcgcgagtcgtttaaatttagcgttttgggttgtttggagcgagggttttcggcgattaggaaagatgggggcgagcgttgggagttagcggttaggggcgcggggcgtttacgttttatttcgttttgcgcggcgtttcgggcggggggttcgggttagtcgatgtttttggttagaagtcgttcgttttgggtcgcggttgtttttttatatcgggagttcgtgtttgttttgcggagggagttgttgtttttgttttttgtatcggggagagggggatttggtggcggtcgcgcgtggttttcgggattatattagcgttcgttcggcgtggttcggtcgatattaaggggatcgaattttttcgcggtttcgtcggggtttgttcggaatcggtttttgggttaggttcgaggcgtaagtagatcgttaggttgggttagagttgttgaaaatttttcgttgtttgattttaattttattattttttttttacgtttttattggggtttcggagggagaggagtcgtcgtaacgttggttttgagtgttagcgttcgcgggttcgtttcgattttttatttcgagtttggaagttgggtaggttttgtggtaggggatgtttacgtttgggggtgtcgtttttcgagtagcgtttcggtttttaaaagttattgggggcgagttttcggtgtggcggtgttataagttagttgttttttttgagttaaatttaataaaaaaggtaagaggaaaattaataaagtttacgtgtttttcggttttttatggaaagggttggttgcgatggtcggatgttcggtcgtgggttgggtttggttttagtgggataaagaatttttagaatcgtgagaaggggaggttttttaaagttgagatttaagtcgtcggtgtttcgggagtttttttggtatatagggtgttcggtgttcgattggagttatttaaaaatggtagaaatagttgtaggttaatatatatacgttggaaaataattcgtagttttttttattgtgggatttttcgcgggaagttcggagttgtttttttttttgttttagtttttgtgtaaagaaagaattggtgtttgtgtttgggttttttttgtcgtcggtttggaggttgggaaatagtcggtaagtcgtttttttttgttcgaggaggcgtggtggggttttttattttaggttttcggttggatagaggtttttgtattttgatagttgttttcgtagagcggttagttgttttgtagggagggtagatggagagatggggttttttatttcgcgggtttcggggcggtcggtttggaggttttttagttcgttgatttcgcggggattaggtttgtagttggagtttgaggggttgtatttttgcgtttttttgggtttggggaaataatatatcgtgttttttgaagattttaggttttgggattttatggtttagtttttagtttatttcgttgtcgcgattttgggtatattattgttatttttttaattatggtgattcggggttttgtgtttggtttttaggttttttcgggttattgaggacgattgaggttatgttttcgagagtatcgcgttttgggcgtaggaggagttgttgtttagtgttgtttgtgttgtaaggtggattttgtagaaatttggttttgaggttttttgtttttttttttttttggttttttttaagcgaaagttttggatttattgtttaggtttttttggtttttgagaagttatattttatttttttcgcgttttcggattgggttttagatttagtttatgagattgtgggttgtttattaattgtgtggttattaattatgtattttattattggtgggggggtggggttgttaggtttaattagataaaaatatagtatatttagttaaatttgaattttagataaataatgaaagatttttttaaaaataaatgtttttgagtatgttttatgtaatatttgggatatatttatattaaaatattatttaatttatttgaaatgtaaatttaatagggtattttgtattttatttagagggaagtcgaagtgtttggtagattatttggttttatgagttttgggtgggtttttttttagttttagtgatttttaaaattattttttcgatttatttattgttttttgatgttttttttattttcggaaaaagttgtggttttttttttatttggggtaggttgttttttgttttttttttttggtgttttagtaaggtaggttagtggaggtgaggtgattagaagatggttaaagggaaaataaaatggtgggtttttttttgggaaattgggttagggtttgggggttttgtgttggtggaggagagaagattttagggcgatggtaggagacgaaagtttgggttgtagcgtaagtttggaggttcgttgcggtggtttacgtttgtaattttagagttttgggaggttgagataggaggattgtttgagtttaggagtttgagattagtttgggttttaaattaaaaaaaaagaaaaagaaaaaaaagagtcgggcgcggtggtttacgtttgtaattttagtattttgggaggtcgggtaggcggattacgaggttaggagattaagattattttggtaaatatggtgaaatttcgtttttattaaaaaaatataaaaaaattagttaggcgtggtggcgggcgtttgtagttttagttatttgggaggttgaggtaggagaatggcgggaatttaggaggtggagtttgtagtgagcggagattgcgttatcgtattttagtttgggtaatagagcgagattttattttaaaaaaaaaaaagaagaagaagaaaaaagaaaaattagtttggacgtagtggtttatgtttgtaattttagtattttgggaggtcgaggtaggtaggttatttgaagttaggagttggaaattagtttggttaatatggtgaaattttgtttttattaaaaatataaaaaattagttggatgtggtggtatacgtttgtaattttagttatttttaaggttgaggtaggaaaattgtttgaatttgggaggcgtaggttgtagtaagtcgagatcgcgttattgtattttagtttgagtaatagagtaagattttattttaaaaaaaaaaaaaaaaaaaaaagaagaaagaaaagagaaaaggtcgggtacgttggtttatatttgtaattttagtattttaggaggtcgaggagggaggattacgaggttaggagatcgagattattttggttaatagtgaaattttatttttattaaaaatataaaaaattagtcgggagtggtggtaggcgtttatagttttatttatttgggaggatgaggtaggagaatggtatgaatttacgaggtagagtttgtagtgagttaagattgtattattgtattttagtttgggcgatagagcgagatttcgttttaaaaaaaaaaaaaaaaaaagaaaaaaattagataggtatggtgattttcgtttgtaattttagttatttaggaggttaagtttggaggattatttgagtttaggaggttgaggttgtagtgagttacgattgtgttattgtattttagtttgggtgatagggtgagattttgttttaaaaaataaataaaaaaagtaggtttaggtttaggattttttagtatttggtttgagggtttttttaatgatttgttgtgaggattgagaaaggtttgtgtttgaagagttttcgtttgttttaggagaggtagaggtttgggtttgaggttttttttattttagtttttttagaggttttattatggagatatttttattgggtatatggtaggttaggtagatttgggtttagttagggtgaggttagttatgggttaggttttttgaggtgatagggattagttatgaggagtgagtataaggatagggagtagagtttttttggagggagttagtagggtttttttgagtggtgggtaattttaagatggttttgttggttaatttttggatttggatataggagaatattcgaaattggttttagtttggagaatttgggatggatttttgtagtttatataggagttcgtgttggggaggagtagttggggttatatttttattgttgggattttatttttttttttttttttagaagtttaagtgtaatgggaagggaaaggtgttgaagttagggtaaggtgacggggtcgttaagataggaggcgcggggtatatttagggttagttttgtagtaagttgggttgtagtttggtggttgtggggatttttgtatttggtgtttataggtgttaagagtgagggtatttgaggggggttagagagtttatttggggtaagttgtcgttttttggggtatgtgggtttaggttatgtttttaagagtagttagaagtttggatttttatgtaaagtttgttttgttgtttgtttgtttgtttgtttgaagtttggtagtagatttaatatttttaaagtattgtgtaggttaaataaaatacgtttgttgattggttgtttgttattttaaatataaagtggggtttatgtgtggtggtttatatttgtaattttagtattttgggaggttaaggtaggaagattatttgagtttaggaggtcgaggttgtagtgagtagtgatcgtattatcgtattttagtttgggtaatagagggagattttattttaaaaaaataataaataggttgggtatagtggtttatatttgtaattttagtattttgggaggttaaggcgggtgggttatttgaggttaagagtttgatgttagtttggttaatatggtgaaattcgtttttattaaaaatataaaaattagtcgggcgtggtggtatgtgtttgtagttttagttatttaggaggttgaggtaggagaatcgtttgaattcgggaggcggaggttgtagtgagtcgagattgtgttattgtattttagtttgggttatagagtaggagttcgttttaaaaaaataaaaaaaataaaaaaataagaaagtgatgagtatagtttaatatttttattggggaagaggagtaacgtttttttttggggaggggtatgtgttttgtggtgatggttttggggggtaattgtgggaaattttagttgtttcgttgaattcgtgtgtttatttagtgtgtttgtggttgtgaaattttatgtttttttgggtgtttatttggtgttttaaatttgagttttatggttttttcgggtggttgtttagttgagtataggtttagtttagaggtagaatttttaatgtttttgtttttgttttagagtttttttaatgtttatatttagaaatatagttttttattattggggtaatttgagaattcggtgaagaggttgttagttggggtaaagagaggtacgaaagtttggttgtatttagtttgtagtttgcggtggtttcgagtttcgttgggaagtagttgtaaatttgtattttggttgatttgcggtcgtaaagtttagatttttggtatattttttgttttgaaaggtgttttgtgtgttataagttaattattttttttttttttttttaaatataattaaattttgaatgggttgatttattgggaagttggtttagggtttatgagtaatgaatggttttggttaatttgtatggagttttggtaatttgttattttttttttagtttttgttattttggcgtttttttagaatgatttttggtttttatggttaatagaatagtaggaggtggtgtttggggttcgagtttaaatttaatttttttttgttattttttgtttgtgagattttaagttagtggtataatttttttgggtattttgtttttgtatttgtaaaaagggtgataatcgttttttttttgtagtttgttgggaattttagggagagagggtgtgtaagtagagtgtttggcgtggagtttggtatgtaatagtttgggtatatagtggttattgtgatggttgttttaataattgaggttttttttaggagtattcggttttttttggatattttttgattgtttagaattgaggaggggaaaggtgggtattgtggtttgtttgttttgtttataggaggtaggagacgggttagtggatttagatattcgttttttttgtatcgtttttgggtgaaaaggtgtaaggaggagggagtagagaggttggttttaatagttgtgttgggtgaagggttcgagtgttggttttgggagaatgagtttatttttatcgttttgtgtttcggtttttttatttgttaaatggggaagttgttattttttgtcggatgagtcggtatagtttttggtatatagaaggcgttaggaatggttattggtataataagaaaagtcgggtcgtagcgttttttgatggaatacgtgggattcgagcgggtagggtttttgggggtgaggtgtttgtggtttcggttggttgggtttgagtatgtttcgttatttcgtaattttcgtggtgatagggtgggagttttgtaatttgttatattagtatgtgagggttatatgttttacgagggggtgatttaaggttgagtttgggtagagaggttaaaaaaaggtgttaggtagtttacggatagaggtgttcgtgttatatagaatttttagttttgggaatttttgttattaaaattgttgaggattcgggtagttacgtcgtttgtattaggggtgcgtttgttttaatagtgtttgttgggttttttaaattcgttagttttttagttgagttattagtggttttttggtggtttcgtaggttttttgatttggtagagttttgatttaggagtttcggttttaattttagttttgtttttgggaggtttttttgagttttagtttttttaggggtgtggttgttgggttttcgtggcggtaagggataagtcggagtgtagggggttaaggataggaggtggttggttgtagtaataatcggaaaaatgatagtggttcggagtagagtggtggtggtggaggagagggtgggtattgttatttcgaatgaaaattagttttgtttgtttttgtggtttgtaagtttttttttatttataaatttgttttttatagtggggggtttggatttcgttttttaggcgtttgtaatgtagttggggtgattttgtagatagggttattaggagttttgaattaggggtgtagttttttttttatttggttgtatttatatatttaggttgtgtaattttttttcgggtcgaggttattattttttggttttttttggtcgttacgaagggtattttttcggtagagtgtgggcggtttttcggtttgtttgtttatgttttttttgattttagacgtatcgtttagagggtaggaggagtttcggggtgtttttggtgacgattttattttttatgagaggaatcggtttgttggtttgaagttttttttgttgtttagataggcgcgggtggtttagtttattggttgcgtggtattggtagtgatataggaggaatttgggttcgattcgtgttatttataggagtttttgtaatggtagttttatttttagtttttttggcgatagtttggagagggtaattattttatgtggtgtaacgggtggagaaattaggtttagatgggtgatgtggtttgtttagggtttttcgttagtgagggtggagttgggattttaatttttatttgtgtgatttggagtttgtttttagttttaagggagtgtggtttgtgttttttagggatgaagagttttcggtaataggtttttttttattttttttagg

SEQ ID NO: 204 - DNA, 14568 bp, Artificial Sequence
  chemically treated genomic DNA (Homo sapiens)
tttgaggaggatgaggaagagtttgttatcggggattttttatttttgggggatataggttatatttttttggggttgagagtaagttttagattatatagatgagggttggaattttagttttatttttattagcgggaggttttgggtaggttatattatttatttaagtttggtttttttattcgttatattatatagggtggttgttttttttaggttgtcgttaaaaaggttgagggtggggttgttattataaggatttttatgggtggtacgagtcgggtttaggttttttttgtgttattgttaatgttacgtagttagtggattgggttattcgcgtttgtttgggtagtagagagggttttaggttagtaggtcgattttttttatggggggtggagtcgttattaaggatatttcggggttttttttgttttttgggcgatgcgtttgaggttaggggaggtatgagtaggtaagtcggggagtcgtttatattttgtcggaagaatgtttttcgtggcggttaaggagagttagggagtggtgatttcggttcgaaaggaggttatatagtttgaatgtgtgggtgtagttaggtgggaggggaattgtatttttgatttagggtttttagtgattttgtttgtaaggttattttagttgtattataaacgtttgaaggacggagtttagattttttattgtgagaggtaggtttatggatgaggagaaatttataagttatagaagtaaataggattggtttttattcgagataataatgtttatttttttttttattattattattttgtttcgagttattgttattttttcgattattgttatagttagttattttttgtttttgattttttgtatttcgatttgttttttatcgttacgaagatttagtagttatatttttgaggggattgaggtttaggagagttttttagaagtagggttggggttggaatcgaggtttttaaattaagattttgttagattaggagatttgcgaggttattaaggagttattgatggtttagttaggaggttggcggatttaaggggtttagtaggtattgttggggtaggcgtatttttggtataggcgacgtagttgttcgagtttttagtaattttggtgataaaaatttttagaattgagaattttgtgtggtacgagtatttttgttcgtgagttgtttggtatttttttttggtttttttgtttaaatttagttttagattattttttcgtggggtatgtggtttttatatgttggtgtgataggttataggatttttattttgttattacgggggttgcgggatgacggagtatatttaaatttagttagtcgaaattatagatattttatttttaaaaattttgttcgttcgggttttacgtgttttattagaggacgttacggttcggttttttttattatattagtggttatttttagcgttttttatgtattaaggattgtgtcggtttattcggtaggaaatggtaatttttttatttgatagataaagaaatcgaggtatagggcggtgaaggtgaatttatttttttagagttagtattcgaattttttatttagtatagttgttgagattagtttttttgtttttttttttttgtatttttttatttagaaacgatgtaggaaagacgagtgtttaagtttattggttcgttttttgttttttgtgggtagagtagataaattataatgtttattttttttttttttaattttgagtaattagaaggtgtttagaagagatcgagtgtttttgggaagaattttagttgttagagtaattattataatagttattgtgtgtttaggttattatatgttaggttttacgttaagtattttatttatatattttttttttttgggatttttaataggttataagagggggacgattgttattttttttatagatgtagaaataggatgtttagagaggttatattattagtttggggttttatagataggaagtggtagaagagaattagatttgggttcggattttagatattattttttgttattttgttggttatgaaaattaagaattattttaaaggagcgttagggtaatagaagttggaggaagaatgataaattgttaggattttatgtagattggttaaagttatttattatttatgagttttggattagttttttagtaaattaatttatttaaggtttgattgtgtttgggaaaaaaaaaaaaaagtaattgatttgtaatatataggatattttttagggtagaaagtgtgttagagatttgggttttgcggtcgtaaattagttaagatgtaagtttgtagttgttttttagcgaggttcgaggttatcgtaggttataagttgaatgtagttaggttttcgtgtttttttttgttttaattggtaatttttttatcgagtttttaagttattttagtgatgagaaattgtatttttaggtgtggatattgaggggattttgggatagaggtaagaatattaagaattttatttttgagttggatttatgtttagttaagtagttattcggaggggttatggagtttaagtttaaggtattaagtgagtatttaggaggatatgggattttatagttatagatatattgggtgggtatacgggtttagcggagtagttgaggttttttataattgttttttaaaattattattatagaatatatatttttttttaaaaaagggcgttgttttttttttttaatgagggtattaagttatatttattatttttttatttttttattttttttatttttttgagacggatttttgttttgtggtttaggttggagtgtagtggtataatttcggtttattgtaattttcgtttttcgggtttaagcgatttttttgttttagttttttgagtagttgggattataagtatatgttattacgttcggttaatttttgtatttttagtagagacgggttttattatgttggttaggttgatattaaatttttgattttaggtgatttattcgttttggttttttaaagtgttggaattataggtataagttattgtgtttagtttatttgttatttttttgagataaggtttttttttgttgtttaggttggagtgcggtggtgcgattattgtttattgtagtttcgattttttgggtttaagtgatttttttgttttggttttttaaaatgttgggattataggtgtgagttattatatatgggttttattttatatttaggatggtaaataattagttaataggcgtgttttgtttggtttgtatagtattttaaaaatgttaaatttgttgttaaattttaaataaataaataaataaataataaaataggttttgtataagaatttagatttttggttatttttgaaaatatgatttgggtttatatgttttagggagcgatagtttgttttagatgggttttttggttttttttagatgtttttatttttgatatttgtaagtattaggtgtagaaatttttataattattaggttgtagtttaatttgttgtaaagttggttttgggtgtgtttcgcgttttttgttttggcggtttcgttattttattttgattttaatatttttttttttttattatatttgagtttttgggaggaaaggaaaaaatgaggttttagtagtaggaatatagttttaattgtttttttttagtacggatttttatataaattataagaatttattttagattttttaggttaaggttaatttcgaatgtttttttgtgtttaggtttaagggttagttaataagattattttagggttatttattatttaaggggattttgttgattttttttaggaaagttttattttttgtttttgtatttattttttatggttagtttttgttattttaagaggtttggtttatggttggttttattttagttaggtttaggtttgtttgatttgttatgtgtttagtaggaatgtttttatgatgaaatttttggaggagttgaggtgagggaggttttaggtttaaatttttattttttttgggatagacgggagttttttaggtatagattttttttagtttttatagtaagttattgagggaatttttagattaggtgttaaggggttttgggtttaagtttattttttttgtttgttttttgagataaggttttattttgttatttaggttagagtatagtggtataatcgtagtttattgtagttttaattttttgggtttaagtgattttttaggtttagttttttgagtagttgggattatagacgagggttattatgtttgtttaatttttttttttttttttttttttttttgagacggagtttcgttttgtcgtttaggttggagtatagtggtgtaattttggtttattgtaagttttgtttcgtgggtttatgttatttttttgttttatttttttaagtaggtgggattataggcgtttgttattattttcggttaattttttgtatttttagtagagatggggttttattgttagttaggatggtttcgattttttgatttcgtgatttttttttttcggttttttaaagtgttgggattataggtgtgagttaacgtgttcggtttttttttttttttttttttttttttttttttttttttttttgagatggagttttgttttgttgtttaggttggagtgtagtggcgcgatttcggtttattgtaatttgcgttttttaggtttaagtaatttttttgttttagttttaagagtagttgggattataggcgtgtattattatatttagttaattttttgtatttttagtagagatagggttttattatgttggttaggttggtttttaatttttgattttaggtgatttgtttgtttcggttttttaaagtgttgggattataggtatgagttattgcgtttagattaattttttttttttttttttttttttttttttttttgagatggagtttcgttttgttgtttaggttggagtgcggtggcgtaattttcgtttattgtaagttttattttttgggttttcgttatttttttgttttagttttttaagtagttgggattataggcgttcgttattacgtttggttaatttttttgtatttttttagtagagacggggttttattatgtttgttaggatggttttgattttttgatttcgtgattcgtttgttcggttttttagagtgttgaaattataggcgtgagttatcgcgttcggtttttttttttttttttttttttttttggtttgagatttaggttggttttaaatttttgggtttaagtaatttttttgttttagttttttaaagttttgggattataggcgtgagttatcgtagcgggtttttaagtttacgttgtagtttaagttttcgttttttattatcgttttggggtttttttttttttattagtatagggtttttaaattttggtttagttttttaaaaagaggtttattattttgttttttttttagttattttttggttattttatttttattggtttgttttgttgaaatattagaaaaagagaataggaggtagtttgttttaaatgagagggaggttatagtttttttcgggggtgggggaagtattaggggatagtgggtgggtcgggggggtaattttaggggttattagggttgaggagaaatttatttaaggtttatggggttaaatgatttgttaaatatttcggtttttttttgggtaaaatatagggtgttttgttaaatttgtattttagataaattagataatgttttagtataagtgtgttttaaatattgtatgagatatatttaaaaatatttatttttaaaaaaattttttattgtttatttgaaatttaaatttaattgggtgtgttgtatttttatttggttaaatttggtaattttatttttttattagtggtgaaatgtatggttggtgattatataattaataaataatttatagttttatgggttgagtttaagatttaattcgaaggcgcggggaaggtgagatatggttttttaggggttagagaaatttgggtaataagtttaaggttttcgtttagaaggggttaaaaaaaaaaaaaaataaaaaattttaaagttaagtttttataaagtttattttataatatagataatattgagtaatagttttttttgcgtttagggcgcggtgttttcggaggtatgattttaatcgtttttaataattcgaggggatttggaagttaagtataaaatttcgggttattatggttagagaagtgataatgatatgtttaaggtcgcggtaacgaagtgaattggaagttggattatgagattttaaagtttgaggtttttagaggatacgatgtgttgtttttttaaatttagggaggcgtagaggtatagttttttaagttttaattataggtttggttttcgcggggttagcgggttggaaggtttttaggtcggtcgtttcggggttcgcggggtgggaagttttatttttttatttgttttttttgtagagtagttggtcgttttgcgggagtagttgttagggtgtaggagtttttgtttagtcgggaatttggagtaggaggttttattacgttttttcgagtagagaaaggcggtttgtcggttgttttttaatttttaggtcggcgatagaagggatttaggtatagatattagttttttttttgtataggggttgaggtaaggaggggagtaatttcgggtttttcgcggggaattttatagtagagggggttgcgggttgttttttagcgtgtgtgtgttggtttgtagttgtttttgttatttttaaatggttttagtcgggtatcgggtattttgtgtattaggggagttttcgagatatcgacgatttggattttaattttggaaagttttttttttttacggttttgaaaattttttgttttattggagttaaatttagtttacggtcgggtattcggttatcgtagttagttttttttataggaggtcggggagtacgtggattttattgattttttttttgttttttttgttgggtttgatttagaaaggatagttaatttgtgatatcgttatatcggaggttcgtttttagtggtttttagagatcgaggcgttattcgagaaacgatatttttaaacgtaaatattttttgttatagggtttgtttagtttttaggttcgaaataaagggtcgagacgagttcgcgggcgttgatatttagagttagcgttgcggcggttttttttttttcgggattttagtgaaggcgtgggaaaaaaataataaagttgaaattaggtagcggggagtttttaataattttgatttaatttggcgatttgtttgcgtttcgggtttggtttaggggtcgatttcgagtagatttcgacgaggtcgcggaaaggttcgatttttttaatgtcgatcgggttacgtcgggcggacgttaatgtgatttcgaaaattacgcgcggtcgttattaagttttttttttttcggtgtagagaataaaaataatagtttttttcgtaaaataaatacgagttttcggtgtggagaggtagtcgcggtttaggacgaacggtttttggttaaaaatatcggttggttcgagtttttcgttcggggcgtcgcgtagagcggggtgggacgtgggcgtttcgcgtttttggtcgttggtttttagcgttcgtttttattttttttggtcgtcgagagttttcgttttaggtagtttaaagcgttaaatttaaacggttcgcgttttgtaaatttcgtagattcgagggcgtcgggttcgggaggcgggagcgggcggtcgggcgggtcggggttggcggagggcggcggggcgcgggtcggggtgcgcggggaggagacggcggcggcggttcgttcggagtttgtataatggagttcgcgtttttttcgtcgtcgtcggtatcgcggtttcggcgcgcgggaagtcgtttttatgtgatttgtataaaacgaaatggtttttggggtcggtttcgagtttttttttcgggagtcgagcgtcgcggcgggggtcgtttcgtcgttttaatcgtttggtttcggcgttcgtcgttttcgggtcgtcgcgttaggtgggttataggcgcgagcgtatttgggtagcggtcgcggttttagtttggcgtaggtgattcggttcgcgcgtcgttcgttcgttcgttcgttttcgttaagtttcggggttcgcggcggggttgggtcggggtaggcggtcggggcgttgcgtttcgcggttttttggagtcgcgttcgggttcggggcggtcggggaggcggttggcggcgggcgttttcgtttattatttgcgtattttttcgatcgtcgttatgatttttttgatattatttttggttcggtttttcgtttcggttcgaatcgatttgttcgatatggtttcggcggggagacgaggttggggagcgcgttcgcggttttgttcgcgtttcgtcggttatattcgcgttcgttcgttcgtttatttattcgcgtatagatattcgtatttttatacgtatatatttttatatatatatatatatatatatatatatatatatatatatataaagttcggggtcgtcgcggttttggtttagatgcgtaacgtcgggggtagttgtattagagtagggggagtcgcgtcgtcgtcgtcgtcgtagatcggttttacgggcgcgcggttatcgggtagttttcgggttttttgcgtttttagaggatttttcggacgtttttttgggaagtggcgaagggcgtacggtatttcggttttgggcgcgcggtgggggggcgtgcgatatcgcgtgattttttttcggaggttgtaggtgtcgaggggtttatgggagatagtcggtttgcggggcgcggggggggtcgcgtttttcgggagttagtttagttgtttttgtttagtttttagagcgcggcggcgggtgtagtcgtgtaagttttttgcgggttttttgattttttcgagttgaaggtatcggttcgggacgcgaggtgtttttggaaagagttgggtatcgcgtatttttgttggttcgcggttttgtttaaatgcgagttaggacgtcgtttgttttaggttttgtttttttggaaaattagggttgtaggaaggtgtttggtgttaggtagattattagagattttcgattttgagtattaaagagttttttgtttagtaaaagtttaatgatgattagtatcgtaatagggattttttttttcgtttttagaagtttttttgttataaataaggcgagggggttttcgttgagttttattagaggattacgattttattttaagttatttttgattttagtattagattgagattaggcgttgttattgtttaaatgatttttggttttatttataaggagtatttttgaggttttagaatagagtttcggggagaaatttgcgatgattagggtaatttgggtgtcgtattttgttgtttagttgtagcggaatcggtcggattagagttaatgcgcgtttagaatgaagagggagatcgagagtggtttaaatgttagcgtttcgggtttggagatgatagttcgatagtagttattttatagttggggaaattgagttttgggaaagtttaaggttgtagttttaagttgttatttattttagacgttttttttgagggtttggtttttggggaatacgttattgtggaaatggagagatcgtaggtttttttttaggtatttttttttattattttgaaacgtagttttttgacgtgaaaaatgaagaaaagaataaatattggtcgggcgcggtggtttatgtttgtaatattagtattttgggaggtcgaggcgggtggattatttgaggttaagagttcgatattagtttggttaatatggtgggtgaaatttcgtttttattaaaaatataaaaattagtcgggcgcggtggtgggtttttgtaatcgtagttattcgggagtttgaggtaggagattcgtttgaatttgggagacggaggttgtagtgagtagagatttagttattgtattttagtttgggagatagagtgagattttgttttagaaaaaaaaaaaaggtcgggcgcggtggtttatgtttgtaattttagtattttggaggtcgaagtgggtagattacgaggttaggagttcgagattagtttggttaatatggagaaattttgtttttattaaaaatataaaaattagttgggcgtggtggtgtaggtttgtaatttgagttacgcgggaggttgaggtaggaaaatgtttgaatttgggaggtagaggtgtaatgattatgttattgtattttagtttgggtaatagagtaaaattgaattttaaaaaaataaaataaaataaaataaaataaaaaaagaaagagagaaagaaaaagaaaaaaaagagaaagagaaagaaggattttagagaatcgtttcgagaattttttgggaaaatatgtaatagtaggttataaaatagattttatagagatatgtgagattaataggtatgtgttttgggttatatgaaattttaaaaaaatgtattttaaaatttaaaataggaaaatattatgttagaatttaaatagtgattgaggaatagataaatgtgtttatttatataatggaatattatttagttataaaagggaatgaatatatgttataatatgggtgaattttgaaatacgttaagtgaaagaagttagttataaaaggataaatatgcgtaagtttatttgcgggagatatttaaaattaggcgaatttataaagatagatattagattggtggttgttagaggtaagggggaggggagagtaggagtgattgttaacggatgtggggttttttttcggagtgataggaaagttttggaatgagatagtggtgatggttgtagaataatgtgaatgtatttaatgacgttgaattgtatatttttaaatggttataatggttaattttatgtgtatttgattataataaaaagaaatttaggttgggcgcggtggtttatatttgtgattttagtattttgggaggtcgaggtgggtggattgttagaggttaggagtttgagattagtttgggtaatatggtgaaattttatttttataaaaaatttaaaaaatagttaggtgtggttgtgcgtatttgtagttttagttgtttaggaggttgaggtggggaagatggtttgagtttagaacgtagaggttgtagtgagttaagattatgttattgtatgaagtaaagaaagagagagagagagagagagagagagaaaagaaagaacgaaagaaagaaagaagaaaagagagagggatgaggagaaggagagagggaaggaaggaagaaggaagaaaaagagggaaggagggaggaaggaaggaaggaaaaaaaaatatttagtttttttagaattagtagatttgtaaattggatttttagtgttatatggtatttatcggttagagtagagagttttgtttgtattttttagatagagttatttgggttattagtgtatttatagttattttatttatttgtgttatttgtttggtttttgaaagtatttgtgattttgatttttaataaaattataaagttttttttaaatgttttttgtaaatttagtatgttatttttagtagttttttgttttttgtaggtatttttatattttttttttttaataaagtatagtagttttatagtttgtgtttgatgattttagtatttgaagtttttaagagtttgtttttgttaggttttgtttatggtgttatagttttttgttgtatgtttggttttttttgattatgttggatattattttaaaatttatttatagggataatttgaggtttttttttagaaataatttatatttgtttttgttaggttttttaggttattgttagtttggggtgattttaattttagtttagggtttgtgagttttcgattatttaggtgatgcgaattttggtcgtatagttgtgtaagattggttgattttttgtagtttgagggtggagttagggatgtgttgtagatggtttataggtttttgttttttagttttgtgtttagtgattttatgttgagagtttggaattagttgtggagggagtatttatattatggaaatcggtaaatgatttatatattaggattttttttttttagttttagttagagttggtggttgaatatttattagtatattattggtggagttcgatagggtttagattatcgtgggaaaggattttcgtttagtgtgagtcgtggattttaattttttggtttttttttgattgagacggagttttgttttgttatttaggttagagtgtagtgacgtgattttagtttattgtaagtttcgttttttgggtttatattatttttttgttttaattttttaagtagttgggattataggcgttcgttattacgtttggttaattttttgtatttttagtagagacggggttttatcgtgttagttaggatggtttcgatttttcgatttcgtgatttgtttattttagttttttaaagtgttgggattataggtatgagttatcgcgtttagttttttttttttttttttttttttgaaacggagtttcgttttgttgtttaggttggagtgtagtggtataatttcggtttattgtaagtttcgttttttgggtttatattatttttttgttttaattttttgagtagttgggattatagacgttcgttattacgtttagttaatttttttttttttgtatttttagtagagatagggttttattatgttagttaggatggtttcgattttttgattttatgattcgttcgttttagttttttaaagtgttgggattataggcgtgagttatcgtatttagtttaattttttggttttttgttttataaaattatttatggttaagtttaaatatgttaagttggtaaaagtaaaagtggtttttttgttagattatattttagttttttttttttaattttggtttaattttttattatttttttttttatagttagtatgtagtggtttttaggatatttttaagtattttttttagtatttttagttatttcgagagttagtttgaataattgtttattagaaattggaagttaagttttttataaatgtttattattattttagttatgttaaaagagtaaaagagaggtcgggtatagtggtttacgtttgtaattttagtattttgggagattgaggcgggtaggtagattatttgaggtgagaagtttaagattagtttggttaatatggcgaaattttatttttattaaaaatataaaaattattcgggtgtggtggtaggtgtttgtaattttagttatttaggaggttgaggtaggagaattatttgaattcgggagatggaggttttagtgagtttagattatattattgtattttagtttgagtaatagagcgagattttattttaaagaaaagaaaaaaaaaaaagagtaaaagagggattttagggttataggagtgagtgagttagttatggttgtgttaaatgttttaatttttttgtgttttatttgtaaaatggggatgaaaataattatatttattttatagggtttttatgaaaattacgcgcgttagattaggcgcggtggtttatgtttgtaattttagtattttgggaggtcgaggcgggcggattacgaggttaggagatcgaaattattttggttaatatggtgaaattttgtttttattaaaaatataaaaaattattcgggtgtggtggcgggcgtttgtagttttagttattcgggaggttgaggtaggagaatggtataaatttaggaggtggagtttgtagtgagtcgagatcgtattattgtattttagtttgggcgatagagcgagtttttattttaaaaaataaaataaaaagagaattatgtatattatttgttaagtatttagagtagtgttattacgcggtaagtgttgtattagaaaggacggacgtgtgttatatagtaacgttttagttaataattgtatatacgatggtggttttagaaaattgtaacggagttgatgatattggatttatttttacgttatagtgtaattatttttatttattgatttagagacggggttttgttttcgtaattatattatttatttagagatagggttttattttgtttaggttggagtgtagtggtaggattatggtttattgtagttttttttttttaggtttaagtgattttt

SEQ ID NO: 205 - DNA, 5192 bp, Artificial Sequence
  chemically treated genomic DNA (Homo sapiens)
ttttagtgaagttggaaaaatgttttatatattgagtaaaaatttaaatttataagtatatgaaatgatttaattgagtaatttaataaagttattattataaattttaataaaggtttatattaataatggaggtgtttaagttttgttaattttttttatggtataattgaaaaggggttggagtgggggtattatgttaaaagagtttaagaatataggttttggagttatgaagatttgggttttatttttatttttgttgttttgaagttataaagatagattgtgatttttttttgagttttttttttgttagttttttttttttttttttttttgagatggaatttcgttttgttattaggttggggggtaatggtgtgatttcggtttattgtaatttttgttttttgggtttaggtgatttttttttttagtttttcgagtagttgggattgtaggtatgtgttattatgttcggtaaatttttgttttttagtagagatatgttttcgttatgttggttaggttggttttaaatttttggttttaaggcgatttgtttgttttcgttttaaaaaaattgtcgggattataggtatgagttattattatgtttagttagtttatttttttttttttttttttttttgagatggagttttgttttgttgtttaggttggagtgtagtggtgtaatttcggtttattgtaatattcgtttttcggtttaagcgatttttttgttttagttttttgagtagttgggattataggtgtgtgttagtatgtttggttaatttttgtatttttagtagagatagggttttattatgttggttaggttggttttgaatttttgatttcgtgatttgttcgttttagttttttagagtgttgggattataggtgtgagttatcgtgttcggtttattttttttttttttttttttgagacggggttttgtttttgttgttcgggttggagtgtaatggcgcgattttggtttattataattatcgttttttggtgattataggtgtgagttattacgtttggttttggtttatttttttttataaggattttagttattggattagagtttattttaatttagtatgatttaattttaatttgattatatttgtaaagattttttttttaaataaagttatagatattggggattaggattcgaatatatttttttgggggatataattttattattatagggaataaataggataagaaaattatagaatttagtaggtggtaggtgatataagttaaggggtgttgttatgttgtttaggttggttttaaatttttggttttaagggatttttttattttgttttttaaagtggggatgaaagtttgtttggggtattgtagttttagataggaagattagggaaggttttattgagaaggtgatatttgagttaagatttaaaaaggtacgaaagtgagttatgtggaagtttgggggggaggagtgaattaggtagaggtatagttgggtaaagggtttgaggtgtgattatgtttatggatttgaggaattttaaagaggttgtgtgttgtaggagagtgaagggtagggagtggtaggaaatgaaggtagataggtagtagtggggaggacgtaggggtttagtttatgtaggttttgattggatatagtgagttttagatgatagttttttgttttatggggtagttttaaagttataggagtttggtgattttttttttttttattagatatttatgttatcggggtgggtaagttggatgtggattggagagaattgaatgagttagggtttaagaaggatggtgagaggtatgtttttattttgtaggatataaaggttttgtattaggtttttgaatatatgttgggtgagtgagttttgttttttttggtgtggggaggatggtgaggagttcgttagaggttcgtgttgggaatttggatatagtgttttttatttgtttttttttttatttgatttttatatttatagatgtttttaagtttatagatattatttgcggggtggggaatatgttagtaaacgtttttgattaggagaggatattttggtatgttattattaaggtattaggaaggaggggtagggtttggattttagaggtaaaagcggttatgggttagatatattgtaatttttgaaaattatttgtttttttgtagtttaagagttaagagatttgtcggggggtttttattttcgattaatgggttttgatagtagtttattgttttcgcgatggtaacgattattttttgtggagggttaatgtgggtaaggtaggggatgtattagttttttgattttgaagttatagattttattattttatttagtttttggtttttgtaggagttttggtttagtttaatttagtgtattatttttaggagattttaaattttagtggggtaaagaattttttattgagaaggcggtgatttttttagggtttgatgtttttgttaaaaagaattagggaattttggagttttatggtgatgatatagttttgttgaagttggtttagaaagtaaagatgtttatttatgttaggtgtttggagtttgggatgggagggtgttttgtagggaagagtgttttggagatttttggaagagatattggggataggttggtgtgatttttgtttttttttttaggtttatttgttttttttgtacgatggaggttaatttggttttgcggagattttaaggtagtatttgtagggattatggtgagtgttgggatttatggtgtttgagagttggggtcggggtttgggggtgataataaggattaggttgtagtttttaagttaggaatttggattttgggtaaaaggattagtattaatattttttttttttgattatagagaatgaattgttgaataaatagagtgtttttgtttattttgtcgttttgaatgggagtaaattgaatattaattttaagatgggagtggaggtgagggttttaggttggggatgttgggatttttttgtgatagtttttagaatgttttttttttttttttaggtttggttgttttttttttttgacgcgggttatttttttttttaagttttataaatttgttaggtgtttttgggtttgtttattttttttttgttgttattgagatgaagttttgttttgttttttaggttggagtgtagtggtacgattttagtttattgtaatttttgttttttgggtttaagcgatttttttattttagtttttcgagtagttgagattataggtgtttattattatattagttaatttttgtatttttagtagagacgggatttcgttatgttggttaggatggttttgaatttttgattttaagtgatttgtttgttttaattttttaaagtgttgagattataggcgtgagttattgtatttattcgggtttgtttattttatttttttttttggttttatttttgttgtagtggataagttgtgtcgaggttgttttttaagaaaaaattatgttttttaatttgatagatgttagggaggtggtgatagattagtttttatgtagtgggatttaggaggatgagagtttttgtaagggtgagttttttattatgtttggatttttaaggggaaggttatttgtgtttttgtggttagtatgtatgttagaatattagtttattgttttagatgatattgttttttgttattttttgttggtaggagaatttgggggagtagttttttttgagcggagatttaggtttttttaggtgagaaggtagaagtttgtaggatttaggggttataggattttagttttgttggggggatgagggaggtttttgagggatttagggaggttggggtttatagttggggttgtggtagttttttagttagttttttttttttttttaggtgggtttggtgagttggggtttttataatttttgttttggttttgttgataaaaattttcgtaaaagggtttttcgtagtaaggtttcgtcgttacgagatttttatattaatttttttcgtatgtagttttggttgaggtagtatttgggggatgttttgaattttttatttttttagttatggttattgagttttttgttgttttgttagaatttgtcgtttttttattttttatttttgaatggttatttttagattttgtgatttatttttttttttagttgagtaaattcgggtttttaggatgttagaggtagcgtatataagttgggaaatttttagggtttttattagtaggattgtttcgttgttttatttttcgttttttggtttgtttttagattttttttttggttgatttgatttatgtttgttttatttttatatggaattttttagttatgaaattaataaaaattaatggtttttatattttttagtgtttttatttggaggttaggtagggttggttttgggggagggggaggttagaatgattttaagagttataggaaggtaggttagagattttattggataaatagtggttggattttgtattataatatataattaataggggagtgagttggatttttatttttggtttttaagtgggtggtttgggtttattggggaggagttaaggtcggagaggaggtattgaaggggagagttttggatttttggtagtaaagggtgggatttttgtagtttttgtttttttgattggtagtttagcggggttttttcgtttggatgtttcgggaaagtgatgtgggtaggataggcggggcgagtcgtaggtgttagaatatagattgtataaaaggttgggggttggtggggagtaggggaagggaatgtgattaggtttaggtttggagttttagtttggatattgagttaagtagataagtaaagtaagttaggatatattattttgttttaggtttagttttttttttgttttttaacgttatggggagtaattttagtttttaattttgtttgatgttttttattttgggttttttgtttggaggtaagcgagggtaattttttttttttgttgtttttagtatttttttttggttttttggggttaggttttattagtttttttttttagg

SEQ ID NO: 206 - DNA, 5192 bp, Artificial Sequence
  chemically treated genomic DNA (Homo sapiens)
tttgaagagaaaggttgatgaagtttggttttaaaaggttaaggagggatgttggagatagtaggaagggaaggttattttcgtttatttttagataagaggtttaagataaagggtattaggtagagttgggggttgagattgttttttatggcgttggaaggtaggagagaagttgggtttggggtaggatggtgtgttttggtttgttttgtttgtttgtttggtttagtgtttaagttgaaattttagatttagatttggttatattttttttttttgttttttattagtttttagttttttatataatttgtgttttggtatttgcggttcgtttcgtttgttttatttatattattttttcggaatatttaagcgggagggtttcgttgagttgttagttaaggaaatagaaattgtagaagttttattttttgttgttaaaggtttaggatttttttttttagtatttttttttcggttttagtttttttttagtaagtttaaattatttatttagggattagaaataaggatttagtttatttttttgttgattgtgtgttatggtgtagagtttagttattgtttgtttagtggggtttttgatttgtttttttgtagtttttggagttattttggttttttttttttttaaggttagttttatttggtttttagatagaggtattgagagatgtggaaattattgatttttattaattttataattgggaaattttatgtgaaagtgaaataagtatgagttaagttaattagggaaggaatttggggataggttaaggagcgggaggtggggtagcgaggtagttttgttggtaggagttttgaggattttttagtttgtgtgcgttgtttttggtattttagagattcggatttatttagttaggagagaggatggattatagggtttaagggtggttatttagaggtagaagatggaggggcggtagattttggtagggtagtagagggtttagtggttatggttagaggggtaaaaaatttaggatattttttaggtgttgttttagttagggttgtatgcggaagagattgatgtgaaagtttcgtggcggcgggattttgttacgaggggtttttttgcgggagtttttgttagtagagttaaggtaggggttgtaaagattttagtttattagatttatttggagaaaaggagagaattggttgggaggttgttatagttttaattgtaagttttaatttttttagattttttaaaggttttttttatttttttaataaggttgagattttgtaatttttgggttttgtaagtttttatttttttatttgaaaaaatttgaattttcgtttaaggaaaattgtttttttagatttttttgttagtaaagggtgataggagatagtgttatttagggtagtggattggtgttttggtatgtatgttggttatagagatataggtggttttttttttgggaatttaggtatggtgagggatttatttttgtagggatttttatttttttgggttttattgtataggaattggtttgttattatttttttgatatttgttaagttggggaatatggtttttttttgggagataatttcggtatagtttgtttattgtagtaggggtggaattagagagaagggtagaataagtagattcgggtgggtgtagtggtttacgtttgtaattttagtattttgggaggttgaggtaggtagattatttgaggttaggagtttaagattattttggttaatatggcgaaatttcgtttttattaaaaatataaaaattagttggtgtggtggtgggtatttgtaattttagttattcgggaggttgaagtaggagaatcgtttgaatttaggaggtagaagttgtagtgagttgaggtcgtgttattgtattttagtttgggagatagagtaagattttattttaataataataaaaaaagaataagtagatttagggatatttagtaggtttgtgaggtttgggaggaggggtgattcgcgttagagagagaaagtagttagatttggagaaggaagagagatattttgggagttgttatagggggattttagtatttttaatttgagatttttatttttatttttattttaaggttaatgtttagtttgtttttatttaaggcgataaaatgagtaggaatattttgtttgtttagtagtttattttttatagttaagagaaggggatgttggtgttggtttttttatttagaatttaggtttttggtttggggattgtagtttagtttttgttattatttttaaatttcggttttagtttttaagtattataagttttagtatttattatggtttttataggtgttgttttgaggttttcgtagagttagattggtttttatcgtgtagggaaggtagatgggtttggggagaagagtaagggttatattagtttgtttttagtattttttttagggatttttagagtatttttttttgtagggtatttttttattttagattttaggtatttggtatgggtggatatttttattttttgggttagttttagtagagttatgttattattatagaattttaggattttttggttttttttggtaaagatattaaattttggggagattatcgtttttttaataaggaattttttgttttattgggatttggggttttttggaaatgatatattagattaggttagattagggtttttgtaggggttaaaggttgggtgaggtggtaggatttgtggttttaggattaggaggttggtgtattttttgttttatttatattgattttttatagggagtggtcgttgttatcgcggaagtaatgagttgttgttaggatttattggtcggagatgagggtttttcggtaggttttttggtttttgggttgtaggggaataggtgatttttagagattgtagtatgtttggtttatggtcgtttttatttttggaatttaagttttgttttttttttttggtattttaatagtgatatgttagggtgtttttttttggttagaggcgtttgttgatatgttttttatttcgtagatggtgtttgtgagtttggagatatttgtgggtgtgaggattagatggggaaggaggtaagtgaggggtattgtgtttaggtttttaatacgggtttttggcgggttttttattattttttttatattaaggagggtaaagtttatttatttagtatatgtttaaagatttggtgtagagtttttgtgttttgtagaatgaaggtatgttttttattattttttttggattttagtttatttagttttttttagtttatatttagtttgtttatttcgatggtatagatgtttggtggggaagagggaaattattagatttttgtggttttggggttattttatgagataggaggttgttatttgaaatttattgtgtttaattaagatttatatgagttggatttttgcgttttttttattgttatttgtttgtttttattttttgttattttttgttttttatttttttgtagtatatagtttttttgaagttttttaaatttataggtatggttatattttaggttttttgtttagttgtgtttttgtttagtttattttttttttttagatttttatatggtttattttcgtatttttttaagttttggtttaaatgttatttttttagtgaggttttttttggtttttttgtttaaaattgtaatgttttagataaatttttatttttattttgggaggtaaggtgggaggattttttgaagttagaagtttgagattagtttgggtaatatggtaatattttttagtttgtgttatttattatttgttgggttttatggtttttttattttgtttattttttgtaatggtggaattgtgttttttagaaagatgtgttcgagttttaatttttagtatttgtgattttatttggaaaaagggtttttgtagatgtaattaagttaagattaagttatattagattagggtgagttttaatttaatgattgaggtttttataagaagaggtaagttagagttaggcgtggtggtttatatttgtaattattaggaggcggtggttgtggtgagttaagatcgcgttattgtattttagttcgggtaataagagtaaaatttcgttttaaaaaaaaaaaaagaagaggtgagtcgggtacggtggtttatatttgtaattttagtattttgggaggttgaggcgggtagattacgaggttaggaatttaagattagtttgattaatatggtgaaattttgtttttattaaaaatataaaaattagttagatatgttggtatatatttgtaattttagttatttaggaggttgaggtaggagaatcgtttgaatcgggaggcggatgttgtagtgagtcgagattgtattattgtattttagtttgggtaatagagtaagattttattttaaaaaaaaaaaaaaaaaaaaaagtgaattggttgggtatggtggtgatttatgtttgtaatttcggtagtttttttgaggcgaaggtaggtagatcgttttgaggttaggagtttaagattagtttagttaatatggcgagaatatgtttttattaaaaaataaaaatttgtcgggtatggtggtatatgtttataattttagttattcgggagattgaggaggagaattatttgaatttaggaggtagaggttgtagtgagtcgagattatattattgttttttagtttggtgatagagcgagattttattttaaaaaaaaaaaaaaagaggaaattaatagagagaaggtttagagagaagttatagtttgtttttatggttttaaaatagtagagataggaatgaagtttaggtttttatgattttaaaatttgtgtttttaggtttttttgatatgatgtttttattttagtttttttttaattgtattatgggaaaagttgatagggtttgggtatttttattattaatataaatttttattaaagtttataatagtgattttattaggttatttaattgggttattttatgtgtttgtaggtttaaatttttatttagtatgtgaaatatttttttaattttattaaag

SEQ ID NO: 207 - DNA, 5340 bp, Artificial Sequence
  chemically treated genomic DNA (Homo sapiens)
ataaggttttttttagttattttgtaatatggagtatattgttgttaattatagttgttttatattattgttgaatagaatttatattttttatttaattgtatgtttatgttattaaattatttttttttattttttatttttttttttagtttttgttaattattattttattttttatttttatgagattaatttttttttgtatttttattagtatgttattttttgtttttttttttttttttttttagatagagttttattttgttgtttaggttggagtgtagtggtacgattttagtttattgtaatttttattttttaggtttaagttatttttatgttttagttttttgagtagttgggattttaggtatgagttgttatatttagttaaattttgtatttttaatagagatggggttttattatgttggttaggttggttttaaatttttgggtttaagtaatttatttattttagttttataacgtgttgggattatagatttgagttattatatttggttttagaaatgttttattttaattttgtttttgagatagttttgttttgttgtttaggttggagtgtagtgatatgattttggtttattgtaattttcgttttttgggtttaagtgatttttttgttttagttttagttttagtttttcgagtagttgggattataggtatttgttgtgacgtttggttaattttgtatttttagtagagacggggttttattatgttggttaggttggttttgaatttttggttttaggtgatttatttgttatagttttttaaagtgttgagattatttattgtttgtttttgatatttttgtcgataattagttggttataagtatatggatttatttttgagtttgtattttgttatattattggttatgtgtttgtttttataatagtattatgttgttttggttattagagttttgtataatttgaagttaggtattgtgatgtttttagttttgttttttgtgtttaggattattttgattatttgttattgtttaatatttaaataacgtgtatattagaatgatttgtagagtttttatatatttaatatatattttttatgttataattgtgtgttttttgagggcgaatttaatttttgaaagtggttcgatattatttggggttatattgggtgaagaaaggagaagatgatgattaagttgaatgatatagtagtagtttggttgtattataatgagatagatttttttatgggtttaaagtgtatttttaagagaagttttttagtagggtttaagtggcggtatttttgtcgaattttttttattttttatgttagtatttaatgtatatttatttatagttatttgatagttttttttttggggtaaatatttatatttttgagggatataggtttttaaatttatggtttttggatttttttggttttttttttttaatattagttagttgtagtttgaaggttttgttgtagtttgggaagggtttcggttgggaggtagtgataagtggaaggtcggtagtcgttttgttttttattgtttttattttttttgttttttttatattatagattggtttgggggattgggtagtaggcgcgaaagtggtggtgataaaggttttttttttaagtttggtgttattttgtagggtatagtttcgagttgtgttttgggtatttttagggttttttgttgagtttttaggtaaggcgttgttttattatcgttatttagttattatgaggttatgggttatttttgtttttgggttttggtttttaaattggttagataatgattttagggttttattagttttgagatttagtgttattttaagaggaataaagttttttgtttttaaagttatgttttatttattttagttatagatttttacgttgtttgatatgggtaatttttatgtttgtaatttaattgaaagtgtatttaatttaagaaagtttttcgttagaaagttttgttgaggttagaggattgaagggttattttggggatttttgttgaagatgatgggttttgttttggggatgtttagtttaggtggttatagaatttagtttgttataaatatttgtcgaatggtggggattttttgatgtgtttttattttaatatgttttgtagggtttatgatttagttatagattttatttatattgttttgggggaaattttaggtttggagttagggatagtggagggtaaggatttgggtttttttagattttagtttgtttgttgttttttattgattttaggttttatatagagaatagagggagttggttgttgtgttgagggagtttgagtgaggagatcgttagttttagaagtagagggtagttaaggttaagagtttgtggtttagtatgtttggtttgggcgggttatttttgagaacggttgaaatggtgtttagtttattagtagtgatggaatttgttggaggattaggttagagtaagttttattgttattgtgtttttggggtatttttggggttggatatatattttttttagatttttttgttttttttatttggataatttttggttatgtttttttttttttaggtttaggttagttttgttttttcgttttttttttgttggttttttagtttttttttttggttttggtttggagaatttgtttttaatttttattgattgtttttttgttggttagtttaggggtttttattatgttttttttatattcgtaaataaattttttttattatattgtaatttgtgagtatgttttttttgttttggttttttttgggttaagatttgtttttgggtttttaaatgttggttttagttaaggttttagtcgtggttttttgggagtatttaggttggggtggtttggtaaggggtttattagattattatgtgtagagagtagtagagttttttgtataaaaattaggatttttgggttttttgtggataggatgagttgttaaggagatgttatttttggtattttttaagaattattacggtcgggtgtagtggtttatgtttgaaattttagtattttgggaggtcgaggcgggtgaattatttgaggttaggagttcgagattagtttggttaatatggtgaaattttgtttttattaaaaatataaaattagttaggtatggtggtatgtgtttgtaattttagttattcgggaggttgaggtaggagaattatttgaattcgggaggcggaggttgtagttagttaagattgcgttattgtattttagtttgggtaataagagtgaaattttattttaaaaaaaaatatagaattagttaggtatggtggcgtgtgtttgtagttttagttatttaagaggttgaggtaggagaattatttgaatttgggaggtagaggttgtagtgagtcgagatcgtattattgtatttttgtttgggcgatagagcgagatttcgttttaaaaaaaaagaatcgcgagtattttgttttttttgttttttttattttatttttttttagttagggtagttaaaggtaggatgggtgtttttcggatttattagagggggaaaggggttgggcgtgtatgggggtagaatttttttttagtgagagttttggtgaggtttgttggaggtatattggggatataggtaagtattaggtggttttaattttttattttttttttataaacggtatttggtttagtttttttttgtttattttgttattatggagttgtggtatttaagtatttaaatgttttgtttttgttaggtttgtttcgtcgggtgttttgtttatttgttaggttgggtagatggttttaagttttggttggtgggtgggtgagtgaggagataggttagataggggaaggttttaggatatgttttttttttttgggttgatttgaggtagtggaggtttttaggtgtgggatggggtttttaggttgggatgttttgtatcgtagaggataggtttttttattatttatcggagtattacgggagggtaggtttttttttagggtgtttaatattggaggttgtagggttaggaggagaatcgtggggttaggagggtagaggtatattttattttcgtgttttttataggttttgtttttttgtttgttaaggatatagggaagggggtttttattttagtgtttgttttttttttttgtgtttgtgtatttggtagttatagttatttggcgtgttttagaaattaatcggttgattttattttttgttcggttttatttttattggttttggtttttggcgtttgtgttgttcgatttttttttttgttcggatgcgtagggtagggtttgagtcgtcgagttgtatttatagtaggttgtttttggtgatttatcgggtgaacgggggtattgcgaggtattttttttttgggtttggtttttgtttacggggttgatagtagaaattataggttgtgagatagttggagtttagttttgtttgaatttattttaggtttttgattttcgttttttttttagatttttttagagtttagttagtgtttaatttgaggttgggggtttttgaggaagagtgagttggagttgaggggtttggggttgttttttgagagaggggttagaggtagtgttaagagtcgggtagtttgattgtggtttattttttattatttttaggggtttttggtttagtagtcgtagtttttaattataatattttttggggtttggtttacggagttggggcggatgatttttaaatagttttggtagattttttttagattcgttcgtattatggttaggtatgtttttttttatcgttgggtatagtttagagggtataaatagtgttggaggttggcggggtaggttagttgagttttgagtagtagtttagcgtagttatcgagatattatgagagtttttatatttttcgttttattggttttggtcgtattttgtatcgttggttaggtaggtgagtgtttttatttttttttaggtcgtattgtagtgggggttgagaggaggaagtattatggtttatttttttttatttttttggttggtagtttttttgtagtttaattattttgttgtaggtttaatttatttgttttagttttgtttttgtagagggagaggagggaagagtaagttgttcgagacgtaggggaaggaggatgagggttttggggatgagttggggtgaattaggtttttttttttttgtagg

SEQ ID NO: 208 - DNA, 5340 bp, Artificial Sequence
  chemically treated genomic DNA (Homo sapiens)
tttgtaaaggaaagggagtttggtttattttagtttatttttagggtttttatttttttttttttgcgtttcgggtagtttgttttttttttttttttttttgtaagggtagagttggggtaaatggattgagtttgtaataaggtggttagattgtaaagggattgttagttaaaggggtgagaagaggtgggttatggtgttttttttttttagtttttattgtaatgcggtttgaggggaggtgggggtatttatttgtttggttagcgatgtaaagtgcggttagggttaatagggcgaggagtgtgagggtttttatggtgtttcggtggttgcgttgggttgttgtttaggatttagttggtttgtttcgttagtttttagtattgtttatattttttgggttgtgtttagcgatgaggaggggtatgtttgattatggtgcgggcgggtttagggggaatttgttagggttatttgggggttattcgttttagtttcgtaggttaaattttaaaggatattgtggttgggagttgcggttgttgggttaggggtttttgggagtgatggagggtgagttataattagattgttcggtttttgatattgtttttggttttttttttaggggatagttttagattttttagttttaatttatttttttttagagatttttagttttaggttgagtattggttgagttttaggggagtttaaagaggaagcggggattagagatttaaaataggtttaagtagagttgggttttagttgttttatagtttgtgatttttattgttagtttcgtgggtaggagttaaatttagggaggggatgtttcgtaatgttttcgtttattcggtgagttattaaaggtagtttgttgtgggtgtagttcgacggtttaggttttgttttgcgtattcggataggagaaagggtcgggtagtataaacgttaaaagttaaagttaatggaggtggggtcgggtaggagatgaggttagtcggttggtttttgggatacgttaggtggttgtgattgttaggtatataggtatagggaagggaggtaggtattgaggtggggatttttttttttgtgtttttagtaggtagggaggtagggtttgtgaggagtacgaagatggagtgtgtttttgtttttttggttttacgattttttttttgattttgtagtttttagtgttaaatattttggggagggatttgttttttcgtagtgtttcgataagtaataggaaggtttattttttacggtatagaatattttagtttgaaaattttattttatatttgagagtttttattgttttaggttagtttagagagggaagatatgttttgggatttttttttgtttaatttgtttttttatttatttatttattaattagggtttgagattatttgtttaatttgataagtaaataaagtattcgacggggtaggtttgatagaagtagggtatttggatgtttgaatgttatagttttatggtgataaggtgggtagagggagattgagttaagtgtcgtttatgggaggggggtgggaagttgggattatttgatgtttgtttgtgtttttagtgtgtttttagtagattttattaaggtttttattagggaaaagttttgtttttatatacgtttaatttttttttttttttggtggattcgggaagtatttattttgtttttggttgttttggttgaagaagagtgaagtggaagaagtaagagaaataaagtgttcgcggttttttttttttgagacggagtttcgttttgtcgtttaggtaggagtgtaatggtgcgatttcggtttattgtaatttttgttttttaggtttaagtgatttttttgttttagttttttgagtagttgggattataggtatacgttattatgtttggttaattttgtatttttttttgagatggagttttatttttgttgtttaggttggagtatagtggcgtaattttggttgattgtaattttcgtttttcgggtttaagtgatttttttgttttagtttttcgagtagttgggattataggtatatgttattatgtttggttaattttgtatttttagtagagataggattttattatgttggttaggttggtttcgaatttttgattttaggtgatttattcgtttcggttttttaaagtgttgggattttaagtatgagttattgtattcggtcgtaatgatttttggagggtgttaagagtgatatttttttggtagtttattttatttatagggaatttaggggttttggtttttgtataaggggttttgttgttttttgtatatgatggtttagtaagttttttgttaaattattttagtttggatgtttttagaggattacgattgaagttttgattggagttagtatttgggagtttaggagtaggttttggtttaagagaggttagggtagaggaagtatgtttatagattatagtgtagtgaaggaagtttatttacggatgtggagagaatatggtaaaggtttttgggttggttagtaagggggtaattagtggagattgaaaatagattttttaagttagggttagggaaaagggttggggaattagtaggaggggggcggaggggtagagttgatttgaatttagagaagagagaatatggttaagaattatttaggtagaagaaatagaggaatttaaagggggtgtatgtttaattttaagggtgttttaaaggtatagtggtagtgaggtttgttttggtttagttttttagtaaattttattattgttgatggattgggtattattttagtcgtttttagaggtagttcgtttaggttaggtatgttggattataggtttttgattttgattgttttttgtttttggggttggcggtttttttatttaggtttttttagtatagtaattagttttttttgttttttgtgtagagtttgaaattaatgggagataatagataaattgggatttaagaaaatttaaatttttgttttttattgtttttgattttaggtttggggttttttttaggataatatggatggagtttgtggttaagttatgggttttgtagagtatgttaggatgaaggtatattaggaagtttttattattcggtaagtatttatagtaagttgggttttgtgattatttaggttgggtatttttagagtagagtttattatttttagtaagggtttttaaagtggttttttaattttttgattttaatagagttttttagcgagaaatttttttgaattaagtatatttttagttgagttatagatatggaaattgtttatgttaaataacgtgagggtttgtagttggaatgggtggggtatggttttaagagtagggggttttgttttttttaggatagtattgaattttagagttggtgaggttttgggattattatttagttaatttggaagttaggatttagagataggagtgatttatggttttatggtgattgagtggcgatagtggagtagcgttttgtttgaggatttagtagggggttttgggagtgtttaagatataattcggagttgtgttttgtaagatggtattaggtttggggggggggtttttgttattattattttcgcgtttgttgtttagttttttaggttagtttgtgatgtggggagagtagagggagtggggatagtagggagtagagcggttgtcggttttttatttgttattgttttttagtcggggttttttttaagttgtagtagggtttttaggttatagttaattggtattgggaagagaagattagggagatttaggagttataaatttggggatttgtattttttaggaatatgagtgtttgttttaggaagggggttgttaagtggttataagtagatgtatattggatattgatatgaaggatggagagagttcgatagagatgtcgttatttgagttttattagaaagttttttttggaaatgtattttgagtttataggaaaatttgttttattgtggtgtagttaagttgttattgtgttatttagtttgattattatttttttttttttttatttaatgtggttttaagtgatgtcgggttatttttaaaagttaagttcgtttttaaaggatatataattgtggtatggaggatatgtgttagatgtgtgaaggttttataagttattttaatatatacgttatttaaatattgggtaatggtagatagttaaaataattttgagtataaagaataaagttggaggtattatagtatttgattttaaattgtataaggttttagtaattaaaatagtatggtattgttataagaatagatatataattaatagtataatagaatatagatttagaaataaatttatatatttatggttaattgattgtcggtaaaggtgttaagaataaatagtgggtaattttagtattttgggaagttgtggtaggtggattatttggggttaggagtttaagattagtttggttaatatggtgaaatttcgtttttattaaaaatataaaattaattaggcgttatagtaggtatttgtaattttagttattcgggagattgaggttgaggttgaagtaggagaattatttgaatttaggaagcggaggttgtagtgaattaagattatgttattgtattttagtttgggtaatagagtaagattgttttaaaaataaagttgaaatagaatatttttggggttaggtgtggtggtttaagtttgtaattttagtacgttgtgaggttgaggtgggtgaattgtttgagtttaggagtttgagattagtttggttaatatggtgaaattttatttttattaaaaatataaaatttagttgggtgtggtagtttatgtttggaattttagttatttaggaggttgaggtatgagaatggtttgaatttgggaagtggaggttgtagtgagttgagatcgtgttattgtattttagtttgggtaatagagtgagattttgtttaaaaaaaaaaaaaaaaaaagataaaaaataatatgttggtgaggatgtagagaaaagttgattttataaaggtaaagagtagaatgatagttaatagaggttgggggaaagggtggaggatgaagagaggtagtttaatggtataaatatatagttaggtaaaaggtgtaaattttgtttaatagtagtgtaaggtaattatagttaataataatgtattttatattgtaaagtggttaagaagagttttgt

SEQ ID NO: 209 - DNA, 5975 bp, Artificial Sequence
  chemically treated genomic DNA (Homo sapiens)
ttgtattagtcggggtttttagagagatagagaaaacgggataaagatatagttgtagatatagaaatagatttaaatatatgaggggatttgttagaggaattggtttgtgtgaatacggaggttgagaagttttatgattagttagttatatgttggaaaattagggaagttggtagtatggtttagttttgattaaagaagttatggtgtatttttagtttatggttaaaggttaaataatttggagttttaatgtttaaagataaaaggaaaagggtgttttagttttaggagagagaaagagagaatttattatttttttgtttttgtgttttatttaggtttttagttaagtggatggtgtttatttatagtgagtgagggtaggttttttttattgagtttattgattttaatgttagttttttcgggaaatattttgatagttatatttagatataaggttttattagttatgagggtgttttttaatttaggtaaattgatatttaaaaaattatagtatttttgttaaagattaattgattgtaaatgtgagggtttatttttagattgttaaatttaatttattggtgtaagtgtatttttatgttagttttatattttttagattatagtaattttgtagtaaatttttttttttaaaaaatgtgtataattatagggtataagtttaattttgttattttgatatattgtattgtggtaaagttaaggtttttagtgtattcgttattggagtaaggtatattgtatttattatatagtaagttttcggataaggaaatgtgagttttggttaggcgcggtggtttacgtttgtaattttagaattttgggaggttgaggtaggtagattatttgaggtcgggagttcgagattagtttgattaatatgaagaaatttcgtttttattaaaaatataaaaaattagtcgggtatgttggtgtatgtttgtaattttagttattcgggagttgaggtaggagaatcgtttgaattcgggaggcggaggttgcggtgagttgagatcgtgttattgtattttagtttgggtaataagagtgaaattttattttaaaaaaaaaaagaagaaagaaagaaatgtgagttttttagtttttttttttaagattgttttagttattttatttgtttttattttttgttaatgtattttaatagtttttaatggggattattttttgatttgtttttagggaaatttggtaatttggagatttttttaggaatttgaattaagtagaaaaaatattttttttttttttttttaagatagagtttcgttttagttatttaggttggaatgtaatggcgtagttttggtttattgtaattttcgttttttgggtttaagcgatttttttgttttagtttttagagtagatgggattataggtgtttattattacgtttagttaatttttgtatttttagtagagacggggttttattatgttggttaggttggttttgaatttttgattttaggtgatttatttattttagttttttaaagtgttgggattataggtatgagttatcgcgtttagttaatatttttattttatttgttgagttgttatgttaaagtgtgagttgtttgttatgaatgaatgaagagatatttaaagtatttgtttgtatgacgatgtgtattattttttttttttttttgttttgtgtttttaggttttttttatttaggtttaggtggttttatttagtggtttttataaatggatttttttttaagttggtttatagattttttttttagtaagtgatttatttgtaattttttttatatatttgagttagcggtttttagtttttttttgaggttttttaggaagggtgatgattttatgtaggtttattcgtattaggtgatatatttttataaataaattggtttgtgtagtaaagtatatagttataatttttgaggatgttttgttattgttaagtgttgttatgagatgagaggtaagaaaataatattttatattatgatttagttttaaatgatttttttaattgtattttttaattgatatttaataattgtatatatttatgggtttatagcgatgtgatatatataaggtatagtgataaggttagggtgattagtatatttattattttaaatatttagtatttttttgtgttaggaatatttaatattttttttttagttatttggaattatatattattgttaattatagttaggtcggttgtagtgggttatatttataattttagtattttggaaggtcgagacgggaggattgtttgagtttaggagttcgagattagtttgattaatataataagattagtttttataaaaaaattaaaatatttggttgggtatggtggttgtaattttagaattttgggaggtttaggcggaggattatttgagtttaggagtttaaggttagtttgggtaatatagtgatattttgtttttttatttaaaaaaaaattgaaaaataaaataaaaaattagttaggcgtggtggcgtgtatttatagttttagttatatgggagattgaggtaggaagattatttgatcgtaggaggttgaggttgtagtgtattttagattttgttttaaaaaaaaaaaaaaatttgtagttattttatagtggtatagaatattagaatttatttttttttttatttagttgtatttttttttttttttttttttgagacggagtttcgttttgtcgtttaggtcggattgcggattgtagtggcgtaatttcggtttattgtaagtttcgttttttaggtttacgttatttttttgttttagtttttcgagtagttgggattataggcgttcgttatcgcgttcggttaattttttgtatttttagtagagacggggttttattttgttagttaggatggtttcgattttttgattttatgatttattcgtttcggttttttaaagtgttgggattataggcgtgagttatcgcgtttggttttatttttttttaagatggagttttattttgtcgttatattgaagtgtaatggtgtaattttggtttattgtaatttttgtttttcgggttttagtgatttttttgttttagtttttaagtagttgggattataggtgtttacgattatatttggttaattttttgtatttttagtagagacggggttttattatgttggttaggatggttttaattttttgattttatgatttattcgtttcggttttttaaagtgttgggattataggtatgagttattgtgttcggtttatttagttgtaattttatattttttaatatatttttttttgtttttttttttttttattttttttagtttttggtatgttttgttttattttttttttttatgagattaattgtttttaggttttatatattagtaagaatatgtgatgtttaattttttgtttttagtttatttttatttatgttgttatatgtgataggattttatttttaagtttttaaaggtattttattgggtttttgtttttttgttttgttttgtttttgtttttgttttttaaatttttgggatagatggttttttttaaggtagtttatttttttggtggatagttttttttaattttgatagaagttttttggataatttacgttttttttttgggtttattttgtatcgtatggagttgggtagtttggggattcgtagtgaataggatttggggtgatttgattttgaagtttggaggttagagtttatatttgtttaggggttagggttagtttatattatgtagattttggttagtatttttggggtagtttttgataaggttgtaggttttgttttgttttttagggggagatattgtatatagataatatttaggaaatatttttttggttatgaatttggttttgttaaggaggtgaaggtagagtttattttttattttttgttttaaaatatttttttaggtttttttatgtatttgttttgtttttttttgggttttttgaggattttgttttgtgaggggtttttgtgtagttttttatttttttttggtattatttgtggggaaggtgcggtgattataggataattagtttcgtagaggatagagattatttaggatggttagggagaatatggataggttttgagttttagtttaagggagggagggtttttttgaagttttttttaaggatagtagagtttagagttatttatttttttttattatagttttttttttttaggatatataggatatttttttttttatattcgggagttgtagttttatttgagatttttggatttgggtttttgtttttgggttagaggttaggttggtgatattagagatagagggttggtttttttttagttattttttagtgagtttttttttattttttagagttatttttgttatttttttgttgggtgtttttttatttttttagtatattgaagagtatggggagatttggtagtttattgtgttgtaaagaaaataattattatatttggatatgttagggttttttgtgtgttgttgatagatttatagttaggatataatagaggttagtgttggagaggggggattttttttttttgatggggatagaggttttattagttttgatttttaaagtgtggtttgggaaattaaaatgtagatagaaaggaaagagaaagtaaggataaaggtaggaatgagaggagaggaaatagagttttttggataaatttcgttttagtatatatgattagataaagttttgggttttagggaggaggtttagtatagagagtggaaaatagtagaggtgatagagtagtcgtgttcgaagcgtttttggagtttaagtttttttttataggtgaagatagggttagtaggagatattatggggtattttttagttttattttatagagtgcgtgtattttggtaggggtttttgtttataggtgaggggaggatattttgggaaggggcggaaagagggcgtatagagaatggttagggttttttggggaggatggagttttaagaggggatagagggttttttttggagttaaataggagagaggatatgaaagggatagagattataaaaggaaagttttagtgatttgaaattgttagtgaataaataattttttattttttattttttttaattgaattattaatgagtaataaattttaaaaattgttgataataattataatttaagttagcgtgataattaaggaaaatattttaaaaggggtattaaatagagttttgagttattaattttagatattggtaaataaattttaggatatgaagagttttgggaatgtttattaatttatttataggagtttgtagtttattttaggtattggggtgtaattaatattatataaatttttgtttttacggagtttacgtttttatgggtggggaagatagataagtaaagagatttagaatgtgaggttaggtgttgataagagttttggagggaatagagtagaaaaaggttagaaagggaatatttagggtttttaggggaggtgttagggaaaggattttttaagagtattttgatgtgattaagatttgagggtagtggggagggagttatgcggatttttggggaagggtattttagagaaatgataaggttagaggtattaagggaatgggagttatattgttgattttgatttagtaggatatatatatatatatatatatatatatatatatatatatatattttaaggtggaggggtgaagatatttgtttaggatttaaggttttatttttttattttaatgtataggttttaatattgattgatgttttttttttttttttagt

SEQ ID NO: 210 - DNA, 5975 bp, Artificial Sequence
  chemically treated genomic DNA (Homo sapiens)
gttaggagagaggagagagtattagttaatattgggatttatgtattagggtagaaaaatggggttttgggttttgagtaggtgtttttatttttttattttggagtgtgtgtgtgtgtgtgtgtgtgtgtgtgtgtgtgtgtgtgtgttttattgggttaaggttagtagtgtgatttttatttttttagtgtttttgattttgttatttttttggaatgtttttttttagggattcgtatggttttttttttattgtttttagattttgattatattagggtgtttttgggagattttttttttgatattttttttagagattttgggtattttttttttgatttttttttgttttgttttttttagggtttttgttaatatttgattttatattttagatttttttgtttgtttgttttttttatttatgagagcgtgagtttcgtgagggtagggatttgtgtgatgttggttgtattttagtgtttgggataggttgtagatttttgtggatgagttagtgagtatttttagggttttttatgttttggggtttatttgttaatatttgaggttggtggtttagggttttgtttaatgttttttttaaaatgttttttttaattgttacgttgatttaaattgtgattattgttagtagtttttgaaatttattgtttattgatgatttagttggaaaaggtaaaaaatgggagattgtttatttattaatagttttagattattgagattttttttttatgatttttattttttttatgtttttttttttatttggttttaagagaagttttttgtttttttttagagttttattttttttagaggattttagttattttttgtgcgtttttttttcgtttttttttagggtgttttttttttatttgtgagtagaagtttttgttagggtatacgtattttgtgaagtggggttgagaggtgttttatggtgttttttgttggttttgtttttatttgtggaggagagtttgggttttaggaacgtttcgagtacggttgttttgttatttttgttgttttttattttttgtgttgagttttttttttggggtttagagttttgtttgattatgtgtgttggggcggggtttgtttaggaagttttgttttttttttttttatttttatttttgtttttatttttttttttttttttgtttatattttggttttttagattatattttgagaattaaggttgatgagatttttgtttttattaggggaggaggattttttttttttagtattgatttttattgtgttttggttatgggtttgttagtagtatatagagaattttggtatatttaaatgtggtaattattttttttgtaatatagtgagttgttaggtttttttatgttttttagtgtgttgggaaggtaggaagatatttagtaggaaggtgatagaggtggttttgggggatggaaaggggtttattgggggatgattggggagggattagttttttgtttttagtgttattagtttggtttttaatttagggatagagatttaagtttaggggttttaggtggagttgtagttttcggatatggagggggaggtgttttgtgtgttttgggaagagaggattgtgatagagggaggtgggtggttttgggttttattgtttttggggaagattttagggggatttttttttttttgagttgaggtttaaggtttgtttatgttttttttgattattttgggtggtttttgttttttgcgaggttgattgttttgtggttatcgtattttttttataggtggtgttaggagggaatggggagttgtatagggattttttatagaatagggtttttagaggatttaggaagggatagagtaggtatatgggagggtttggaagggtgttttggagtaagggatggaaagtgggttttatttttatttttttagtaaagttaggtttatgattaggggaatgttttttgagtgttgtttgtgtgtaatgtttttttttggagggtaagataaggtttgtagttttgttaagggttgttttagggatgttgattagggtttatatgatgtgagttggttttgatttttgggtagatgtgggttttgatttttaggttttaaggttaagttattttaggttttgtttattgcgggtttttaggttgtttagttttatgcggtgtaggatgagtttagggagaggacgtgagttgtttagaggatttttgttaagattggagagaattgtttattagggggatgggttgttttagaaggagttatttgttttagaggtttgaaaaataaaagtaaaaataaaataaaataaaaaaataaaggtttagtgaggtgtttttgggggtttgagaatgaaattttgttatatgtggtaatatgaatggaagtgggttaggaatagaaagttaaatattatatgtttttattaatatgtggaatttaaaaatagttgattttatggaaggaaaaagtagaatagagtatattagaggttgggaagggtagaggaagggagggatagggaaagatgtgttaaaggatataaaattatagttagataggtcgggtatagtggtttatgtttgtaattttagtattttgggaggtcgaggcgggtggattatgaggttaagagattgagattattttggttaatatggtgaaatttcgtttttattaaaaatataaaaaattagttaggtgtggtcgtgggtatttgtagttttagttatttggaggttgaggtaggagaattattggaattcgggaggtagaggttgtaatgagttaagattgtattattgtattttagtgtggcgatagagtgagattttattttaaaaaaaaataaggttaggcgcggtggtttacgtttgtaattttagtattttgggaggtcgaggcgggtggattatgaggttaggagatcgagattattttggttaataaggtgaaatttcgtttttattaaaaatataaaaaattagtcgggcgcggtggcgggcgtttgtagttttagttattcgggaggttgaggtaggagaatggcgtgaatttgggaagcggagtttgtagtgagtcgagattgcgttattgtagttcgtagttcggtttgggcgatagagcgagatttcgttttaaaaaaaaaaaaaaaaaaaaatatagttagataggaggaggaataagttttaatgttttatattattgtaggatgattatagatttttttttttttttgagatagggtttggagtatattgtagttttaattttttgcgattaggtgatttttttgttttagttttttatgtagttggaattataggtgtacgttattacgtttggttaattttttgttttattttttaatttttttttaaataaagagatagggtattattatgttgtttaggttggttttgaatttttaagtttaagtgatttttcgtttaggttttttaaagttttaggattatagttattatgtttagttaagtgttttgatttttttgtagagattgattttattatgttggttaggttggtttcgagtttttgggtttaagtaattttttcgtttcggttttttaaagtgttaagattataggtgtgatttattgtaatcggtttgattatagttaataataatatatagttttaagtagttagaaaggggatattgaatgtttttaatataaagaaatgttaaatgtttgagatgatggatatgttaattattttgattttattattgtattttatatgtattatatcgttatggatttataaatatgtataattattaggtgttaattaaaaaatataattaaaaaagttatttagagttaaattatgatgtgaaatgttgtttttttattttttattttatgataatatttggtaatggtaaaatatttttaggagttgtggttgtgtgttttattgtatagattagtttgtttgtgagaatgtgttatttaatgcgagtgaatttatatgagattattattttttttgggggattttagagaagaattgagaatcgttggtttaggtgtgtggaggaggttgtaggtgagttatttgttggaaggaaggtttgtgggttagtttgaggaggaatttatttgtagaggttattggatggggttatttgggtttgggtgaagagggtttgagggtataggatagggggagagagaaggtggtgtatatcgttatgtaggtaagtgttttaagtgtttttttatttatttatggtaggtaatttatattttaatatagtaatttagtaaataaaatgaggatattgattgggcgcggtggtttatgtttgtaattttagtattttgggaggttgaggtgggtggattatttgaggttaggagtttaagattagtttggttaatatggtgaaatttcgtttttattaaaaatataaagattagttgggcgtggtggtggatatttgtaattttatttattttggaggttgaggtaggagaatcgtttgaatttaggaggcggaggttgtagtgaattaagattgcgttattgtattttagtttgggtgattagagcgaaattttgttttaaaaaaaagaaaaaaaaatattttttttatttagtttaagtttttaaaaaggtttttagattgttagatttttttggaagtaggttagggaatggtttttattaagaattattgaaatatattaataaaaaataaagatagatagaatagttgaaatagttttgaaaaagaaaattggaggatttatattttttttttttttttttttttttttgagatggagttttatttttgttgtttaggttggagtgtaatggtacgattttagtttatcgtaattttcgtttttcgggtttaagcggtttttttgttttagttttcgagtagttggaattatagatatgtattaatatgttcggttaattttttgtatttttagtagagacggggtttttttatgttagttaggttgatttcgaattttcgattttaggtgatttgtttgttttagttttttaaagttttgggattataggcgtgagttatcgcgtttggttaggatttatatttttttattcgaaaatttattatatggtgggtatagtgtgttttgttttagtgacgaatgtattgaaggttttgattttattataatgtaatatattagaatagtaaaattggatttgtattttatgattatgtatattttttaaaaaagaaaatttattataaagttattgtaatttgaagagtgtggaattggtataaagatatatttatattagtggattagatttgatagtttggaagtaaatttttatatttatagttagttgatttttgataagggtgttgtggttttttaggtgttaatttgtttggattaagagatatttttatagttggtaaagttttgtatttgggtatgattgttagggtgtttttcgaagagattggtattggagttagtgaatttagtaaggaagatttgtttttatttattgtgggtgggtattatttatttggttgagggtttggatagagtataaaggtagagggatggtgaatttttttttttttttttttggagttgggatatttttttttttttgtttttggatattagaattttaggttgtttggtttttggttatggattgagggtatattatggtttttttggttagaattgagttatgttgttagtttttttggttttttagtatgtaattggttaattatgggattttttagttttcgtatttatataagttaatttttttaataaatttttttatatatttagatttatttttatatttataattatatttttatttcgttttttttgtttttttgaggatttcgattagtatag

SEQ ID NO: 211 - DNA, 6222 bp, Artificial Sequence
  chemically treated genomic DNA (Homo sapiens)
ttaaatatgttattttattattttttagttatcgttatttttgatgagaagttaattattaattatgttgtttttaatgtgatgtatttttgttttttttttttttttttagtgtttgtaatgttattttttttatttggtttttggtattttgattatgatatttaggtgtgattttttttaagtttttttttgttttgtttttgtttttgttttttattttgggtttatttagttttttgattttgtaagttaatggtatttatttatatggagattttttaattttttaaaaaaataattgttttgtgttttttttttttttttttttttttgggatttttattatatttgtgtttgaatattttatattgtttggtaggtttttaaggttttgtttatttaatttttcgttttttgttttttggattgtataatttttgttttatttttaaatgtatagttttttttttttgtcgttttagattcgtttttgaatttatgtagtgaatttttgtaatttttagttgtagaaattttatgtgattttttttttataatttttatttatttatttaaagtatttattggtttattgttaataaaattttttttaattttttgaatatttttttttaattttttgagtatagttataataatttttttgaagttgtgttttaatttattgtttgtgttggtttttttggttatatttttttgttttattgtatgtttagtaatttttggttgaaaattagatattgtagtgattttagattttatttatttttttaaaagttgttggttttttgttttagtaatttttttggatttaaattgtagaattaattttttttatggtgtgtagttattgatattatagtgtagtttttattataatatttttttttgttttttagtttggttttttaaaggtgttttttatttttgtattatatgatgatgagataattatttagatagaagttatgtttaggtattttgaataattaagttttttattttttgttgttagagttgtgtgtggtcgaagaaatatatttatatgtataagtttttacggaaggtgggagggtgagataggggtgagggttgaaaaagtatttatttgtttcgataggtattttttgtggtaaaattttgtttttataaaaaatataaaatattagttgggtgtggtggtatgtgtttgtggttttagttatttggaggttgagatgagaggattatttgagtttaggaagttaaggttgtaatgagttgtgattatattatggtattttagtttgggggatagagtgagattttgttttaaagaaggaaaaaaaaaattatttattgggtataatgtttattatttaggtgatgggtatattaaaaatttagatttcgttattatgtaatatatgtattgtaagaaatatgtatttgtattttttaaatatataaaaataaataaattttaaattaaataaaaaaatttttgtatatcgttaggttttttttggtttttattttttgttgtttttttgggttttttttttagttagagatgtgtagggagtttattgttttagtttttttatggtttgtttatttttaagtttttattataattttggttgattttttgtttattatgaaaagaagttataattttaagttagtaaagttgtagatttttattttttttttagaattgattttatgaattttaatttataaaatgtagatttttattttttttattttagattaaatttattaatttttgttggtatagttattagttttttttttatttatttatttatttaatttatgtttgaggtggagtttcgttttgttatttaggttggattgtagtggtgcgattttagtttattgtaatttttgtttttcgggtttaagcgatttttgtgttttagtttttttagtagttaggattataggtatttattattatatcgaaataatttttgtatttttagtagagatggggttttattatgttgtttaggttggtttcgaatttttgattttaagtgatttgtttcgtttttagttttttaaagtgttgtgattgtaggtttaagttatcgttttttgtttagttattggtttttagtgatagtttttaaattaagtttattatttttattaggtaatttgtgtttttttttatttaggttaggggttggggagttttaggtaagatgttcgtagatttatggttattttgatgtaggttatttttaagattaaatatttattagattattgtttgtttttggtttttttagtatttagaaataaatattttttagtatttagaaattgttgtttttgataattttgtttagttttatatttgttttttttaaaaagaaattggttaattttttagatttttttgaggtgaattttggattggattggttttatgttttttttatttattttattgtttatagtttttgattttgattagagatgtattgatattaggaggttggtgaaggtatatggaaggagagttgaattttgtataagttattttaaatgtataaaaataaatggtagaattagtgatgttgaacgttgaattgggcgttttagagttagggtttagttttagtttcgttttgagaaaatcgttttgaggttttttattaaaaggttttttagttttttttaataagtgttattgtttttatttttttttcggggttttttttttatttttttttcgttttttttatgggttcgtgattgtgagggtgaaaatggttgaaattaatttttatttttgtttagatatttggaatttatgagtaaagttatttttttgttttttttttgagtggttgttggaatcgtgtgtgtgtgtgtgtgtgtgtgtgtgtgtgtgtgtgtgtgtgtgtgtttggtattgttattttttaatttttgtttgttggggtgggtataaaggtgatgttttattatagattatataagggttagtatatttttttgtaaatttttatatttttttttattttaattttgggtagatagattatgtattttttttgtaggatgttgggttttttgttttttattatattttttatatttttaagtttaagtatataaaagttgtttaaacgttagttatttaggttttattgaaaaaatgttagaggcggtttaggtagcgttataatattttggtttagtaaaagatttagtttagggatttgtttttgagagtttgtaggagttttagttacgaattatgtttaaagttttttttttggtagttttttttagtgatttttgatagaattattgttttcgtttttggtttagtattgtgtttcgttgaggtttttgtggttatatttattacgttttattgtagtgatttgtttattaggttttttttttaagttttttaggttgagatttttagaggaggatggagtgtagttgcgttggtatttttagtttttagtaggtgtttagtatagagtaggtgtttagaaaaatagtgttgtattaattgaattgaaataggaagattaagttattttattttaaattagttattttttaaattagaagttcgtagagtttggaatttatgttttatgtttggatttatgtagtaggtattaggaagtgaatgtaagagtaaattaataggagttgttatggattgagtaggtttagggttttggatattgttgtgagttttttgttattacgtggagaagattagttttgggatttaaagtaattagttatatttatattagtttttaggtatttgtagtttattatgtgttaaatattgtaatagatattttttatgtatgaatttatttatttttataaaattttttggggaagtgaaatagattatttttatagtgttttaaaattttagaattttgcgttgttgcgtttattgatatgaatatttgttaaatttgtaatttatagtttagtattgttttagtttaatttaaggaaatgaattttttgagaaagttgatattttggattatggggtagaagttattttgtttgttttttatatttatttttaaggatttaagattatgaagggagaagagagagtttatcgagtgatttttttttataagttaatattaagatattagtggaaaggaattagttgattagtggtttattgtgtttggttggattagtaagattttgacgttattatagaagtttttttggttttattggttttttgattgttgtgtataggatgttatttattattttagatattatttattattttagatgttgggatttttttttcgttatttttattatttttgttttttatttttttgagtttttatagttaagtaaatttttattattgaagaggttttgagatttaagttaattaattattggttagggtattgtaaaatatatgggaaattagtttttattaaatattaattttatgtttattatttatatttattttattatttaatgttgatagtattttgtgagttagttattattagtattatttaaagataaagtaaaattagtgaggttgaaagaacggttgttttggtgtatatagatggtatatggtagagtttaagttttttttatgagatttgtagcgtttgtttatacggtagggtaaattattttgtagagttagtatggaggtttgttaattttgtcggatttggtgtagaaaaaatattagtcgtgttgttaaattaaaattttaggagaaaattttttggtgatagaagggtattgtgatttacgttgtttagggttagggatagggtagttgtttatggtttttttttacgagtttttttggagtagagggatatttttaaatttagggagtttataggagttttagaagggttcggttggagggcggggtttttgttgtatttgtttattggggattggggaggttttgatcgtagatcgggggtgttgttatttttgtttgttgtcggtagaaagttataagttatgaaaattgattgagatgagaagaatttatttgggattggtttttgttttaggatggtgttggaagttgttcgttgtcgttaggagtttgttttattgtaagggtgttaggatttgaagagttatggtgaaatattattgaagtattgttaaggtgaggttttgcgtttttcgggttttttatcgtttttttttaaattgtgtaaatggtgttgtaaggtttgtagtggggtaagtaagtaaggatattgttgtgggtgttatagacggaggaagaggtatgaatggatcgttgttttagttatgaatagattgttttatggtttgtgtatttttagttttgagaatttttaatttataaaaggttatttatttagggtagattttgttttttggaaaaggtagtgaatgtgttatagaggagagaagggacgtgggatgtagagagggggttgagcgggtatatataggttattgttgcgttttcggcgagttattcggttttttgataggaggtgatattgattgtgtagagttgatagaggttagtggttataggcggggagtatttggtttaaggtaaatgattgttgttttcgttttatttgtttgtttttgaatgaagttgttttattttttaggtatttaggaatggggtaattgaatagatgtaatgatgatttttttgtttaagagatttattttattaggaaatattaattgtgaaaaggaaagtatagttgattatatattttgaaaggatttgtgtaaattgtaaggttttgataacgtttttatttatttggtaatgcgggtggatgaagtttatttttatttatttatattattaaggaattaaggaattgtgcgtttgtagtaatagaagaaattgttgtgatatgtgtatatttttttttttcgggagagtgggatttaattttttttattttgagtgaggtttggattaagagtatggaaagggagaaatagtagttttgtagaggagaaatttgtagatgttagttttattaagggattaagtttagtattatcgggaataagttgggttgttattgtgaattgttacgatagtgcggttttttttattaatttataattttagttaaattatgagaaaatattagataaatttaa

SEQ ID NO: 212 - DNA, 6222 bp, Artificial Sequence
  chemically treated genomic DNA (Homo sapiens)
ttggatttgtttgatgtttttttatgatttgattggggttatgagttggtgggaagaatcgtattgtcgtggtagtttataatagtagtttagtttattttcggtgatgttaagtttggttttttggtgaagttggtatttgtaggttttttttttatagagttattatttttttttttttatatttttagtttaaattttatttaaggtgaggggaattaagttttattttttcgagggaggaggatatgtatatattatagtaattttttttgttattgtaaacgtataattttttagttttttggtaatgtgggtggatgagggtgaattttatttattcgtattattagataaatggaaacgttgttaaaattttataatttatataaatttttttaaaatatgtgattaattatgtttttttttttatagttggtgttttttggtgaaatagattttttaaataagaagattattattatatttatttagttattttatttttgaatgtttgaaaaatggaataattttatttagaaataaataaataaaacgaaagtaatagttatttgttttgagttagatgtttttcgtttgtgattattaatttttgttagttttgtatagttaatattattttttattaagaggtcgagtgattcgtcgggagcgtagtagtggtttgtgtgtgttcgtttaattttttttttatattttacgtttttttttttttttgtggtatatttattgttttttttaaaaagtagaatttattttggatggatgattttttataaattaaaaatttttaaaattggaaatgtataaattatggagtaatttatttatagttgaggtagcgatttatttatgttttttttttcgtttgtggtatttatagtaatgtttttgtttgtttgttttattataggttttatagtattatttgtataatttaaaggaagacgataaagaattcggaagacgtagggttttattttggtaatgttttagtggtgttttattatagttttttagattttgatatttttatagtggagtaggtttttagcgataacgagtaatttttaatattattttaaagtaaaagttagttttagatgaattttttttattttaattagtttttatggtttgtggttttttgtcggtagtagatagaggtggtagtattttcggtttgcgattagagtttttttagtttttagtgagtaagtgtaataggggtttcgttttttagtcgagtttttttgaagtttttgtgggttttttgggtttgggggtatttttttgttttaggaaaattcgtgaggaaggattatgagtagttgttttgtttttggttttgggtaacgtgggttataatgtttttttgttattagaaagtttttttttggggttttggtttaatagtacggttggtattttttttgtattaagttcggtagagttagtaaatttttatgttgattttataaggtaatttgttttgtcgtgtggataaacgttgtagattttatggagagggtttgggttttgttatgtgttatttgtgtgtattagggtagtcgtttttttagttttattggttttgttttgtttttaaatgatgttaataatagttagtttataggatattattagtattaaatggtagaatgggtatgaatggtgggtatagaattggtgtttggtaaaagttaattttttatgtgttttatagtattttagttagtagttagttgatttggattttagagtttttttaatggtggaaatttgtttggttatgaaaatttagaggagtagagaataagaataatggaggtaacgggagaaggattttaatatttagagtggtgagtggtgtttggagtggtgggtggtattttgtatatagtagttaaaggattaatgggattaagaaggtttttgtgatgacgttagagttttgttggtttagttagatatagtgagttattggttagttggtttttttttattagtgttttgatattggtttataagaggaagttattcggtgggtttttttttttttttttatagttttggatttttgagagtgggtgtgggaggtagatagggtagtttttattttatggtttagaatgttagtttttttaaggagtttatttttttggattggattgagataatattgagttatgagttgtaggtttgataggtgtttatgttaatagacgtagtaacgtagagttttggggttttaagatattatggaaataatttgttttatttttttaaggggttttgtgagaataaatggatttatgtataaaaagtatttattatagtatttagtatataataaattgtaaatatttggaagttgatgtgaatgtggttaattgttttaaattttaaagttgattttttttacgtggtagtagagggtttataataatgtttagaattttgggtttgtttagtttatggtagtttttgttaatttatttttatatttattttttgatatttattatatggatttaaatatgaaatatgagttttaaattttgcgagtttttgatttaaaaagtgattgatttgagatgaggtaatttagtttttttattttaatttaattaatgtagtattgtttttttgaatatttgttttgtgttaagtatttgttggaggttggggatattaacgtagttatattttatttttttttgagagttttagtttaaggagtttggagaaggggtttgataagtagattattgtagtggagcgtagtagatgtagttatagaggttttaacggggtatagtgttagattagaggcggaggtaataattttattaggggttattgggggaagttgttaaggagaaggttttgaatatgattcgtgattaagatttttatagatttttagagatagatttttaggttgagttttttattgaattaggatgttgtgacgttgtttgaatcgtttttaatatttttttaatagggtttaaatagttgacgtttggataatttttatatatttggatttgagggtatagagaatgtagtggagagtaggaaatttagtattttataaagaaaatatatggtttgtttatttaaggttagagtgggaggggatgtgagagtttgtagggaggtgtgttggtttttatgtgatttgtgataagatattatttttatgtttattttaatagatagaggttggaaaataataatattagatatatatatatatatatatatatatatatatatatatatatatatacgattttagtagttatttagaaagaaaataaggaaatgattttgtttatgggttttagatgtttgagtagaagtgaaagttaattttagttatttttatttttatagttacgggtttatgagaaaggcggaagagaggtggggaaaggatttcggggagaagatgggaatagtgatatttgttaggggaggttggggagttttttggtagaaaattttaaagcggtttttttaaggcgggattgagattagattttagttttgaaacgtttagtttagcgtttagtattattggttttgttatttatttttgtatatttgaggtgatttatgtaaaatttagttttttttttatgtgtttttattagttttttaatattagtatatttttgattaaaattaaaagttgtaggtaataaagtaagtggaagaaatataaaattaatttagtttaagatttattttagaagggtttaagaagttggttaatttttttttgaagaaaataagtataaaattagataaaattgttagaaataataatttttgggtattagaaaatgtttgtttttgggtattagaaaaattaaaagtagataatgatttgataagtgtttaattttaaaaatggtttgtattagaatggttatgagtttacggatattttgtttgaagttttttagtttttggtttgagtgaggaaaagtataggttatttaatgggaatggtggatttggtttgagggttgttattgaaaattagtagttaggtagggagcggtggtttaagtttgtaattataatattttgggaggttgagggcggggtagattatttgaggttaggagttcgagattagtttggataatatggtgaaattttatttttattaaaaatataaaaattatttcggtgtggtggtgggtatttgtagttttagttattagggaggttgaggtataggaatcgtttgaattcgggaggtagaggttgtagtgagttgagatcgtattattgtaatttagtttgggtgatagagcgagattttattttaaatataaattaaataaataaatagataaaaagaaaattagtagttatattagtagaagttggtagatttggtttgggatgggggagatgagaatttgtattttatgggttaaagtttatggaattagttttagggagaaaataaaaatttgtagttttattggtttgagattatagtttttttttatggtagataggagattagttagaattgtgatgagaatttggaagtaagtaagttatgagagggttgggataataaattttttgtatatttttgattagggaagaaatttaaaaaggtagtaaaaagtgagagttaagggagatttgacgatgtgtaaaaatttttttgtttagtttaaaatttatttgtttttatgtatttaaggggtataagtgtatgttttttataatgtatatattgtatagtggcgaagtttgggtttttagtgtgtttattatttaaatggtaaatattgtatttaataggtagttttttttttttttttttgagatagggttttattttgttttttaagttggagtgttataatgtagttatagtttattatagttttgattttttgggtttaagtgatttttttattttagtttttaagtagttgggattataggtatatgttattatatttagttagtgttttgtattttttgtagagatagggttttgttataaaaagtatttatcggaataaataggtatttttttaatttttatttttgttttatttttttatttttcgtgaggatttgtatatgtgaatgtgttttttcggttatatatagttttggtagtagaagatgggaggtttagttgtttaaggtatttgagtataatttttgtttaaataattgttttattattatataatataagaatagaggatatttttagggagttagattgaaaaataaagaaaaatattataataaaaattgtattgtagtattagtggttgtatattatggaggagattaattttgtaatttaagtttagaaaagttattaaaatagaaaattaataatttttaggaaagtgaatggagtttagaattattgtaatgtttagtttttaattagaaattattagatatataatgaaataggaaagtgtgattagaaaaattaatatagatagtagattaagatataattttaaagaagttgttatagttatgtttaaggaattaaggaaaaatgtttaaagaattaaagaaaattttgttaatagtgaattaatagatattttggatagatagatgaaaattataaaaaaggaattatatgggatttttatagttgaaaattataaaaatttattatatgggtttaagagcggatttgagacggtagaagaaagaagttgtatatttgaagatagagtagaagttatgtaatttaaagaatagagaacgaaaagttaagtaaatagagttttagagatttgttagataatataaagtgtttaaatataaatgtaataggagttttaaaaggagaggaaagagaaagaggtatagaataattatttttttaaaaagttgaaaagtttttatgtgagtaaatattattaatttatagagttaagaaattgaataaatttaaggtaaaaaataaaaataaaaataaaataaaaaaaaatttaaagagaattatatttagatgttatagttaaaatgttaaaagttaaataaaggagataatattgtaagtattaagagaaagagagagaaatagagatatattatattaaagataatatgattggtggttgattttttattagaaataacggtgattggaaggtggtggaatgatatgtttaa

SEQ ID NO: 213 - DNA, 6070 bp, Artificial Sequence
  chemically treated genomic DNA (Homo sapiens)
gttataggaatacgttattatgttcggttaatttttttgtatttttagtagagatagggttttattatgttggttaggttggtttggaatttttgattttaagtgatttatttattttagttttttaaattgttgggattataggtgtgggttattgtgtttagtttattagatatattatattttgtttatttatttatttgttaatgaatatgtgggtgaaatatgttaatttttatttgttgtaaaaataaaatatattttttttttttttttttttttttgagatggagtttcgttttgtgttttaggttggagtgtagtggcgcgatttcggtttattgtaagttttattttttaggtttatgttatttttttgttttagtttttcgagtagttgggattataggcgtgtgttatgatatttggttaatttttgtatttttagtagagacggcgttttattatgttagttacgatggttttaatgttttgatttcgtgatttgtttgtttcggttttttaaagtgttgggattataggtatgagttatcgcgtttggttaaaatatattattgttaaataattttttaggttatttttttttatgggaaaatgtagagtaaattaatagatttttaatagtaaaatggttaaggaaaaagtaggatagagataacgtaaagatataaataatttattaaatgaataaagttattaatgttatttaggtttaaatagtattttttaaagtgagaggttggatatttataattcgataaagggtgatatttatttgatattgttgttgttttatatggttttaattattttattgtttttgtttttattgttttttaattttgtgtttttttttagtgttagttattgtggtaggttttgaagaatatttttatggagagtatattttgtagaggaagataggtatattaatagtattaatataattaatataaatgttgattgttgttatgggaaaatttaggagggatatataggtagatttggaggattaggtaaggttttttaattttttaatttttttaataatttgtagagaagttgttttgagatttgagagatgaatgagaggtatgatttggaggtaaaggttaggaaattggaaagattataaaatattttgaggaaatgataggaaaatggggatgagggatagatgatatatgagaggaagtagggatttaatcggagtttggtatttattttgaaggtaaatgggagttgttggaaggattttgtgttttttttttttttgagatagatttttattgttgtttagggtggagtgtagtggtgtgattttagtttattgtaatttttattttttatttggaaggtagatgttagcgtagggtggtgaaaggtttgtgtatttattttaattttaaatatatattttggttaggtaaggaggtttacggttgtaattttagtatttttggaggttgaggttggtagatcgtttaaggttaggagtttgagattagtttgggtaatatggtaaaattttatttttattaaaaatataaaaattatttaggcgtggtggtatgtgtttgtggttttagttatttaggaggttgaggtgggtgaattatttgagtttgggaggtggaggttgtattgagttaagatggtattattgtattttagtttgggtaatagaggtagattttgttttaaaaaataaaaataaattttaaaaaattgaaaaaatatatattttaatgattgtatgtatataatgattttatatataaatgatttatatattattttatttatattaaatgtttatataagatagatatgtaatttttagtattttataagatttttttgggagtttttttatttatttttgtttttaggggtaatttggtatgtattatatatttttttttttttttttttttgagatggagttttgttttgtcgtttaggttggagtgtagtggcgtgatttcggtttattgtaagtttcgttttttaggtttatattatttttttgttttagttttttgagtagttgggattataggcgttcgttattatgtttgattgatttttttgtattttttagtagagatagggttttatcgtgttagttaggatggttttaaattttttgatttcgtgatttatttatttcggttttttaaagtgttgggattataggcgtgagttattgcgttcggttttatatatttttttatttatttttttttgtgtttagtatagtgtttgagttttatttatattgtatgtattagtagtttatttttttattattttgtaatatagaaaaaaattgagaaaagttttgaaatggtttaaaatagattattggggttaggtatggtggtttaagtttgtaattttagtattttgggaggttaaggtaggtagattatttgaggttagaagtttatgattagtttggattatatggtgaaattttatttttattaaaaatataataaattagttaggcgtggtggtacgtatttgtagttttagttgttcgggaagttggggtaggaaaatcgtttgaatttgggaagtggaggttgtagtgagttgagattatattattgtattttagtttgggtgatagagtaagattttatttaagataaataataaaaaaatgattattgggtgttattgaaaaataaggtgtttagttgtttagtttatttttttaggatgtttgattttatgaagattttaaattttttattgtttttgagttatagaataattatataaattatagatattttttgtttatagaaatgtaaattgtggtcgggtacggtggtttatgtttgtaattttaatattttgggaggttaagataggcggattatttgaggttaggagttcgagattagtttggttaatacggtgaaattttgtttttattaaaatataaaaagttagttgggtatgatggcgggtgtttgtaattttagttattcgggaggttgagacgggagattttattgaatttgggagatggtggttgcggtgagtcgagtttgcgttattgtattttagtttgggcggttgagtgagatttcgttttaaaaaaaaaaaaaaaaaaagaaatgtaaattgtttttagtagaatgtaattgattattaagttgtggattttattagttttgttagtttttgtatatatttgtagttattttattattttttatttgattatgtgtgtggtattttgaattttttattgaagtagttgtaatttttttggatattttatttattaatgagttaaataaaatttttaatatttattttatatttgtattatatttgatattaaaattattttttaatagtagtatatagttatatgaataagttgtaatttatttatttatttattggtggatatttgggttttttttttttggttattatgaataaagttgttatgagttttttggtgaataaaggtatttattttttggggtaaatatttagaaatgggatttttggggtatagggtaggggtaaatttgattttagtagagattgatgtttttaaagtggttgtattattttatatttttattaatattgtatgagagttttatttttgtatttttgtaattaagggaattgttagtttttttattttagttattttatggagtgtttaatagtattatattttggttttaatttattatagaagatttttaggagggaggtaatttgaatagatttttatattttagaaaattttttttgcgtattatgtggagaatgattatttgtatattaaagtttatagtagtattatttataatagttaaaaggtgggaataattaagtatttatttatatggatgaatggataaataaaatgtagtatatatgtataatggaatattatttagttttaagaaggaagaaattttgatatatgttataatatagatgttttttgaagatattatgttaagtgaaataagttaattagaaaagagtaattattgtatgatttaatttatatgcggtatttcgtatttatagatagaaagtgtaatatcggttataaggggttgtgagaaacgggtaacggggagttattgtgtaataggtagattttttatttgggataatgaaaaagttttggagatggatagtggtgatggttttataataatgtgaatgtatttaatgttagtgaattgtatatttaaaaatggtgaattttatgttagatagattttattatatatataaagaggagggagggcgggagggaaggagagagggaaggaagtagagaggggagaagagaggaagaaaggaaagaaagtaagatttggtattatagggtttatattttcgcgtgttagtaataggttgaaatagaagtatggttttttacgtgtttatggaggtatttgagtgtgtgtttattttttcggtttaatgataatttgtatttgttcgtgtagaggggtacgggtgaaatagagattagtattattaaggggatggagaggagagatcgttaaaatatcgtagagatatatcgtcggagttaagagaatggggtgtagacgtttggtttggtttgtgggaattggtaagttttagtttttaaacgttcgggttttttaattcgttatagtcgggttttagttgtttattttttttaaagtttttatcgattttaaaatattaaaaataaagatttaattagtttcggaagttcgagatgtaatcgtagttatttgattttttcgttcggattttgattgggttttggagatacgcgtttttttcggcgttgtacggcgatttcgttttagtagtttgagggggcgggaatagatgttcgagtgcgatagtattggtcggtttttttaggaagtagttaatcggaataggtaagttttcggcgggaagtgagttagggtttggcgcggcggtcgtggttgcggcgcgggaagtttggattttggtttcgttcgttaggagtttgcgtgcgaggtgagtatcgcgcgcgtaattacgggtcggttcgtattgatttagttttgttttggcggttcggttcggagttggaggtcgttcgggttttttcgttttttgtattggttcgtttcggttcgttgagttttttagtttggttaatattttgggaggatagtagatatataaatacgtttttaaatggggaaatagaggttcggggcgggggcgaattttgttaaggtttttcggggcgtcggaggtcgagtatgggttaggatttggtatgttgttgtttatatattttagtgcgtaatatgatgttttgtatagagtaattttagtttagatttttggtattattattttcgtgttttttttgaggaataacgaaaatattttgtattttttttgtggttttttataattacgagttgggttatttttgtttttgagtgtttattgtgtgttatgtttttggtatttttgattttataattgtagttttacgatattttagtaaagcgaagtgtttaagaatattgtattagattgtttgggttcgaattttggtttttttatatttagttttgtgtttattgtacgttattgaaatattaagtgttttggttttcgtttgttatatgggggaaatggttttttttattttttggcgtttttgttaggattaaacgatttaatatatgtaataataaatgtttcgaaggttatttgttatatagtatatagtaagggttttgttattattatttagagaagcggatgaaattgtttttattttagatatggagaatttgaagtataaagaggttgttttcgtatagaaagagtatttggtgattaagtgttagagatataggatttgaattaagcgtttgattttaaagtatgttttataatattaggtttttttttatagtttttatttgtttttaggttatatagaattttaggtattttatggcgtgagatggagtaggtgattgatagttttttg

SEQ ID NO: 214 - DNA, 6070 bp, Artificial Sequence
  chemically treated genomic DNA (Homo sapiens)
taaggagttgttagttatttgttttattttacgttatgaggtatttaaagttttgtgtgatttaaggataggtgagggttataggagaaagtttaatgttgtgggatatattttaaaattaggcgtttagtttaaattttgtatttttagtatttaattattaaatgttttttttgtacggagataatttttttgtattttagattttttatgtttaaaatggggataattttattcgtttttttgggtaatgataatagaatttttattgtgtattatgtaataggtagttttcgaagtatttattattgtatatattaagtcgtttaattttaataaaaacgttaggaagtagaagagattattttttttatatgatagacgaaaattaagatatttagtgttttagtaacgtgtagtagatatagagttaaatgtgaaggagttagaattcgaatttaagtaatttgatgtagtatttttaagtatttcgttttgttgggatatcgtaaagttatagttgtaagattaagggtgttaggaatatggtatatagtagatatttaaaaataagagtagtttagttcgtgattatggaaggttatagaaaaagtataaagtgttttcgttgttttttaggagggatacggaggtagtagtgttagaggtttgggttgggattattttgtgtagggtattatgttacgtattggagtatatgggtaataatatgttaggttttagtttatgttcggttttcgacgtttcgggagattttggtagagttcgttttcgtttcgggtttttgtttttttatttgggaacgtatttatgtatttgttgtttttttaggatgttggttagattagaggatttagcgggtcgaggcgaattagtgtaggaaacggaagaattcgagcggtttttagtttcgggtcgggtcgttagagtagggttagattaatgcggatcgattcgtagttacgcgcgcggtatttatttcgtacgtagatttttagcggacggaattaggatttaaatttttcgcgtcgtaattacggtcgtcgcgttaagttttggtttatttttcgtcggaagtttgtttatttcgattggttgttttttggggaagtcgattaatattgtcgtattcggatatttgttttcgtttttttaggttgttggggcggggtcgtcgtatagcgtcgggagggacgcgtatttttaaagtttaattagagttcggacgggagggttagatgattacggttatatttcgggttttcggagttagttgggtttttgtttttggtgttttagagtcggtgaaggttttaaaggaagtaggtagttggaattcggttgtggcgggttgaaaagttcgggcgtttgagagttgagatttgttagtttttataggttaagttaggcgtttgtattttatttttttggtttcgacggtgtgtttttgcgatgttttggcggttttttttttttatttttttaataatattggtttttgttttattcgtatttttttatacgagtaggtgtaaattgttattgaatcgggaaagtgggtatatatttagatgtttttatggatacgtgagaaattatgtttttgttttagtttattgttgatacgcgggaatgtgggttttgtgatgttagattttatttttttttttttttttttttttttttttttttttatttttttttttttttttttttttttcgtttttttttttttttgtgtgtgtgataaaatttatttaatataaaatttattatttttaagtgtatagtttattggtattaagtatatttatattgttgtgaaattattattattatttatttttagaatttttttattattttaaatagaaaatttgtttgttatatagtaatttttcgttattcgttttttataattttttatagtcgatattgtattttttgtttgtaagtgcgaggtatcgtatataaattgaattatataataattgtttttttttgattggtttattttatttagtataatgtttttaaggagtatttatgttgtagtatgtattagaatttttttttttttgaggttaaataatattttattatatatgtatattatattttgtttatttatttatttatataaatggatgtttggttatttttattttttggttattgtgaataatgttgttatgaattttggtatataaataattattttttatataatacgtagaaagagttttttaaaatgtaaaaatttgtttaagttattttttttttgaaaattttttatggtaaattgaaattaaaatatgatattattaaatattttatagaatagttgaaatgaaaagattgataatttttttagttgtaaagatgtagaaatgggatttttatatagtgttgatgggagtgtaaaatggtataattattttggaaatattagtttttattgaaattaaatttatttttattttatattttagaaattttatttttagatatttattttaaaaaatgaatgtttttatttattaaaagatttatagtagttttatttataatagttaaagggaaaaaatttagatgtttattaatagatgaatagataaattgtagtttatttatataattgtatattattgttgaagaataattttaatattaaatataatatagatataaaataaatgttagagattttatttaatttattaatgaatgagatatttagaaagattataattgttttaatggaaaatttaaagtattatatatatagttaaatgaggaataatgaaataattataaatatatataaaaattggtagaattgatgaaatttatagtttagtaattaattgtattttattgaaaataatttgtatttttttttttttttttttttttgagacggagttttatttagtcgtttaggttggagtgtagtggcgtaagttcggtttatcgtaattattattttttaggtttaatagagtttttcgttttagtttttcgagtagttgggattataggtattcgttattatgtttagttagttttttgtattttagtagagatagggttttatcgtgttggttaggttggtttcgaatttttgattttaggtgattcgtttgttttggttttttaaagtgttaggattataggtatgagttatcgtgttcggttataatttgtatttttatagataagaagtgtttatagtttgtatagttgttttgtagtttaaagatagtgaaaggtttagagtttttatagaattagatattttagaaaagtaagttggatagttgggtattttgttttttaatgatatttagtaattatttttttgttgtttgttttagatggagttttgttttgttatttagattggagtatagtggtgtgattttagtttattgtaatttttattttttaggtttaagcgatttttttgttttagtttttcgagtagttgggattataggtacgtgttattacgtttggttaatttattgtatttttagtagagatggggttttattatgtggtttaggttggttatgaatttttgattttaggtgatttgtttgttttggttttttaaagtattgggattataggtttgagttattatgtttggttttagtaatttgttttagattattttaaagttttttttagtttttttttgtattataaagtaataggaggatgaattattggtatatataatatagatgaagtttagatattatgttgagtataaaaagaggtagataaaagagtatatagggtcgggcgtagtggtttacgtttgtaattttagtattttgggaggtcgaggtgggtggattacgaggttaggagatttgagattattttggttaatacggtgaaattttgtttttattaaaaaatataaaaaaattagttaggtatggtggcggacgtttgtagttttagttatttaggaggttgaggtaggagaatggtgtgaatttgggaggcggagtttgtagtgagtcgagattacgttattgtattttagtttgggcgatagagtaagattttattttaaaaaaaaaagagaaaaagagtatatagtgtatattaggttatttttggaggtagaggtagatgaggaagtttttaaggaaattttatggagtgttggaaattatatatttgttttatatagatatttaatatagataaagtaatatataaattatttatatataaaattattatatatatataattattgagatatgtatttttttaattttttaaaatttatttttattttttgagatagggtttgtttttgttgtttagattggaatgtagtggtgttattttggtttagtgtaatttttattttttaggtttaagtaatttatttattttagttttttgagtagttaggattataggtatatgttattacgtttgggtaatttttgtatttttagtagaaatggggttttgttatgttgtttaggttggttttaaatttttggttttaggcgatttgttagttttagtttttaaaagtgttgggattatagtcgtgagtttttttgtttggttaaggtatatatttaagattaagatgagtgtataagttttttattattttacgttaatatttattttttaggtgggaggtaaaggttgtagtgagttgagattatattattgtattttattttgggtagtagtgagaatttgttttaaaaaaaaaaaaaatatagaatttttttagtagtttttatttgtttttaaggtgaatattaaatttcgattgagtttttgtttttttttatatgttatttgttttttatttttatttttttgttatttttttaaggtgttttatagtttttttagttttttggtttttgtttttaaattatattttttatttattttttaggttttaggataatttttttgtaagttgttggagaagttgggaagttggaaagttttatttaattttttaaatttgtttgtgtattttttttaggtttttttataatagtagttagtatttgtattggttgtgttgatattattagtgtgtttgtttttttttatagaatatgttttttatgagggtgttttttagggtttattataatggttggtattagagaagggtataaaattgaagaatagtgaagataaaagtaataagatgattaaggttatgtgagatagtaataatattaggtgaatgttattttttatcgagttgtgagtatttagttttttattttgggggatattgtttgagtttaagtaatattagtggttttatttatttggtagattgtttgtatttttgcgttgtttttattttgttttttttttggttattttgttattaaaaatttgttgatttattttgtatttttttatagagaagggtagtttgaggaattatttaataatgatgtgttttggttaggcgcggtggtttatgtttgtaattttagtattttgggaggtcgaggtaggtagattacgaggttaggatattgagattatcgtggttaatatggtgaaacgtcgtttttattaaaaatataaaaattagttaggtgttatggtatacgtttgtagttttagttattcgggaggttgaggtaggagaatggtatgaatttgggaggtggagtttgtagtgagtcgagatcgcgttattgtattttagtttggggtatagagcgagattttattttaaaaaaaaaaaaaaaaaaaaaaggtgtgttttgtttttgtaataagtaaaaattgatatattttatttatatgtttattaatagatgaatgaataaataaaatgtggtatatttaataagttgggtatagtggtttatatttgtaattttagtagtttgggaggttgaggtgggtggattatttgaagttaggagttttagattagtttggttaatatagtgaaattttgtttttattaaaaatataaaaaagttagtcgggtatggtggcgtgtttttgtaat

SEQ ID NO: 215 - DNA, 5391 bp, Artificial Sequence
  chemically treated genomic DNA (Homo sapiens)
tttttttgagatagcgttttgttttgttatttaggttggagggtagtggtatgattatgatttattgtagttttaatcgtttaaatttaagtaatttttttattttagatttttaagtagttgggattaaggtgtatattattatattggttaatttttgtattttttatagatatagggttttgttatgttgtttaggttgatttttaatttttgagtattttgtttgttttagttttttaaagtgttgggattttaggtatgagttattgttcggttagtttaaaaattttaaattattatgtaggttaaataaaacgttttaaagttgaatttgttttagtagattattaatgtgtgaattttgaagttgattattatatttagtgaaatataaggaggttttttgattaaggtaaattttggagttagtgggataatatttaagtatgaatgagttttatagaattggagaatgtttgtgttagattttagtttagatttttatttaatataaaaatttggttttttttattgaaatagaagtagttgcggtcgggtatagtggtttatgtttgtaattttagtattttgggaggtcgagttaggcggattatttgaggttaggagttcgaaattagtttggttaatatggtgaaatttcgtttttattaaaaatatataagttagttgggtatggtggttaggtgtttgtaattttagttatttgggaggttgaggtaggagaattgtttgaatttgggatgtagagattgtagtgagtcgagattacgttattgtattttagttcgggggataagaacgagattttattttaaaaaaaaaaaaaaaagaagtagttgataaatatatgttaaagattggtggatagtaaaggaggagatatagggtggaaaatttgttttgagattggttttgtttgttttaatttggtagagtggtatggaagtaataggtagaaggtatatttgtagtggtaaatggtgttgttttataggatttataaagatttttttttttttttttttagagagagttgagtatagtagtgtgattatagtttatcgtagttttaaatttttgggtttaagtgattttttcgttttagttttttgagtagttaggtttaaaagtgtttgttattatatttagttaattttttataaaattttttttttttttttttttttttttttttgtagtggtggagttttattatgttgtttaggttggtttttaatttttggttttgaatttaaggtaggaatttttttattttagttttttaaagtgttgggattataggtaatatttttttttttaatattagagattttatattagaattttgtttttggttgttttgttttacgaggtgttatcgggttgtataatattttttttggttggaataagaaggatagaatatagaattttttttttggagaaatgtttttttgggtaggttatttgggggtaattattgggaaatcggttttattttgtatttttttattatgtttatatgggggttgagtgtatgggtgtgaattgttgggtggaaatttggtaataagggtgttattttgatgatgaggatagagtaggaggttagtaaagagatgatgatagaaatttttgggtatggggtggagaaatgtaatcgttagtatggaaagggtggtaatagttgtaaaattggttttttttattttttttagtgattttatttttttttgagtttttatttttgtaattgtattttttttgatatatatttaattttttatttgtattggttttttttttttattttttagtagatataaatttattttttttttttaaagagtttttttaatatttattttttttttaatttattacgatgtggtttttgtttattttttttttttattaaaattgttttttttaaggttgtttgtaatttagttgttaaaattaattttatttgattttttgtagtttttaatttaatttattgttttttttttgtttttttgggattttaggatataatttttcgggttttttatttcgttgattgatttttttatttttgttggtttttttgtttttatttatattttaaatattattatttttagagttaatattatttttatatggtatttttataagaagttgtgaaaggggttaggcgtggtggtttatgtttttaattttagtattttgggaggtcgaggtgggtagattacgaggttaggggtttaagatcggtttggttaatatggtgaaatttcgttttttttaaaaatataaaaattagtcgggtatggtggtgcgtgtttgtaattttagttatttaggatgttgaggtaggtaaattgtttgaatttaggaggtggaggttgtagtgagtcgagattatgttattgtattttagtttgggtgatagagtgagatttattttaaaaaaaaaaaaaaagtagtgaaaggtatattatattttgtgtatagtttgggttagggtgtatggtttggtaagtagagtttggattgtattttagtttttatttattatatttagtttggtgtttttgtgttatgaatattttgtgtaattgtatattgtagtttagggtattatttgtggtttttatttttttattgttttattttttttttttttgtaattttgttgatttttattgttttatttcgaatttatgtgttttatttaatttttagatatttttttatttacgttttgaatttttttttttgggtgttttgtggggtattttaattttgttatggtttaaatttagtttagatttgtatatttgtaaatatgtaaatatgtttatttttttgtatgtttttttttggttaatgatattattttttatttttttatttcgttgaaaattttaagattattaatgtttttttttttttcgtaatgtaaggtttttgtttttttttaagtttattattggaagaattttttaattagtttttttatttttagagttttttttttttaaattattttttttattgttattaggtttttttttttatatagatttgagtatattttttttttgttttaaaatttattttgttttttaattaattataagataaagtttagatgtttaggtattgaatataaaattttttatattttggtttaaatttataaaatttttttagttttatattttgtttttgtttttaaaatatgttttgtttttagttatattcgattatgatgtatttttttttgaatatgattttatttattgcgttttcgttggtgttttgaatgttttttttttgttttttgatttgtaaaaattttatttattttttaagattatgtttttttgttatttttatttttaggtattttttggttttaattgatagtgttttttttattgtttttatagtttatagtattattggtatgttattatagatagtttaaaagttgtttagtattttttttttattatattgagttttttaacggtaagattaagttttgttcgtttttatgttattagtagtttgtttagtgtttagtatatgttagatattgaataaaaatttatgatttgaattgggtaggatgtttgaatattattttgtgaaaggattagtgatttttttttgtataatttttagtttttttttttttagatattgaaagaattttagaataggatggttgatgggtttatttaagatagttgttatgttatagttttaatttttagtcgagtttttttagggatatagaaatcgtgtttttttaaatgattgattggtgtttgagtatggatttttttagatattagagttttttagaattgcgatgatttttaatttaagaagatttagattttaggttatatatatatatatttaattttatcgttttgaatagtagatatagggttttagtgtttttgttttattttttgtgggttttattttagtattttattaagggttgagattttagggtatgaaatacggaattaataaaaataaggtttttataattttaaaattttgggaaattgttgagttattttgaaagtttagagggggagtattagttagttttgtagagaattcggcgaaataatattgatgtatacggttagtttttgttatttttttgagttaaatttaacgggatatgttggattatataggagttattcgtggatttcgtgaagattagatgggtagtgtttttgaaatgagtagatgtttatttgtagaattttggtagtagttttggagtgggtggggaagagtttggtttttatttttttttaaagataattatttgtttttgatgagaatttaagtaataagttgttattgagaatgtagtgattggttagtaaacgaagtttataggaagagttttcgggtgtattttttgtgatatatcgattcgttttaagttcgacgtttaattatgggattttttagtttttttttttcgtttcgagtttttttttggttttttataaggttttttggggacgatttttcgatgttagagtattgggggtttgggtttatagggaattcgttagtttttttttttggagcgggtttgatttcgggaggcgttcgcgcggttcggaggcgggaatttagggggagaaggcgtcggcgtcgttttggcgcgtagattatttgtgcggttttgcgcgggggtaggcgcggttttagttttcgggcgttggcggatttagcgcgttagttaggtcgttttcgtcggtttttttcgggcgggttagtttcgacggcgttgatttagtaacgcgaggggggagttttgttttttcgcggatttcgttttttttagttttagttttttcgtcgtcgtcgtcgtcgtcgtcgtcgagtcggtttttttttttcggcgtttcgggtgcgagagataggtcgggttttttaggtagcgagtcgtagcgtaatttcggcgttcgtttaaggattttggaagttatcgttatttcgtcgggtagcgtgggcgttatgagtagttcgggtgaggtgtcgtcgtttttcgtcgcggttttttggaggagtttcgcggttttcgtgaggttcggcggcggggaaggtcgggggttgggatttttggcgatggcggggagggagttttcggggtaggttggatcggtttggagggagatagttttttggaggaggatgtcgtttatgggttttttcgttgtagcgggtattttaggatgcgtttacgaagttagattcgggacgcgggagttttagattagttttttttttttttttttgcgttaaaattttgtttggttttttaatagg

SEQ ID NO: 216 - DNA, 5391 bp, Artificial Sequence
  chemically treated genomic DNA (Homo sapiens)
tttgttgggagattaaataggattttaacgtaaaaagagggggaaagggttgatttggggttttcgcgtttcgaatttaatttcgtaagcgtattttggggtgttcgttgtagcggggaaatttataagcggtatttttttttaaggagttgtttttttttaggtcgatttagtttgtttcgaaagtttttttttcgttatcgttaagggttttagttttcggtttttttcgtcgtcgggttttacggggatcgcggagtttttttagaggatcgcggcgggggacggcggtattttattcgagttgtttatggcgtttacgttgttcggcggggtaacggtagtttttagggtttttgggcgagcgtcgggattgcgttgcggttcgttgtttagggggttcgatttgtttttcgtattcggagcgtcggaaaaaggaaatcggttcggcggcggcggcggcggcggcggcggggaggttgaggttgggagaaacggggttcgcggagggataaaatttttttttcgcgttgttgagttagcgtcgtcggggttggttcgttcgggggaggtcgacgggggcggtttagttgacgcgttgggttcgttagcgttcgggggttgaggtcgcgtttgttttcgcgtaggatcgtatagatggtttgcgcgttagggcggcgtcggcgttttttttttttaggttttcgttttcgggtcgcgcgggcgtttttcgggattaggttcgttttaaggagggaggttgacgggttttttgtgggtttagatttttagtattttagtatcggggaatcgtttttaggaagttttgtgagaagttaaaagggagttcgaggcgggagggaggagttgagaggttttataattaagcgtcgggtttaggacgggtcgatatgttataaggaatgtattcgaaggttttttttataggtttcgtttgttgattaattattgtatttttaatggtaatttgttgtttggatttttattagaagtaaataattgtttttgagggggaatgggaattaagtttttttttatttattttaaagttattattagagttttataaatagatatttgtttattttaagaatattatttatttggtttttacggagtttacgagtggtttttgtatagtttagtatgtttcgttgggtttaatttaggaggatgatagaggttagtcgtatgtattaatattgtttcgtcgagttttttataaaattaattgatgttttttttttaggtttttaagataatttaatagttttttaaagttttgagattgtaaaaattttgtttttgttgatttcgtgttttatgttttgaaattttagtttttagtaagatgttgggatagaatttatagagagtaaaataaaaatattgaaattttgtatttgttatttaaaacgatgaggttgagtgtgtgtgtgtgtaatttagaatttaggtttttttagattgaaaattatcgtagttttaaggaattttgatatttggaaaaatttatatttaggtattaattagttatttgagaaagtacggtttttatgtttttagagagattcggttaaaaattggggttataatatagtaattattttaagtgggtttattaattattttattttgaggtttttttaatatttgaaaaagaagaggttgaaaattatatagaaagaaattattggtttttttataaaatgatgtttaagtattttgtttaatttaagttataaatttttatttagtatttaatatgtattaggtattggataaattgttgatgatatagagacgaataaagtttaattttgtcgttaagaaatttaatgtagtaggaaagagatgttaaataatttttagattatttgtagtagtatattaatagtgttgtagattgtagaagtaatgaggagagtattgttaattagggttaaagggtgtttgaaaatagaagtgataagagagtatgattttgaagagtggatgagatttttataagttaaagaataggagaagggtatttaaggtattagcgaaggcgtagtgaataaaattatgtttaagaaagggtgtattataatcggatgtggttaagagtaaggtatgttttgggagtagaggtaaggtgtaggattggaaaagttttgtaggtttgggttaagatataaagggttttatgtttaatgtttgagtatttggattttattttatggttaattagaagataaaatgggttttgaaataaaggaaaaatatgtttaagtttgtgtaaaaaaagaaatttggtggtagtggggagagtaatttggaggggaggggttttggagatagggaaattggttagaaggtttttttagtagtgaatttgggagaggataaaagttttatattgcggaaagggaagaggtattgataattttgaagtttttagcggaataagaagatggaaggtggtgttattaattaagagagggtatatagaaaaataggtatatttgtatatttgtaagtgtgtagatttgaattgagtttgggttatagtaaaattaggatgttttataggatatttaggaagagaagtttaggacgtagatgaaaagatgtttagagattagatgagatatataggttcgaggtggaataatgaaagttagtagggttatagagggaaagaggatagagtaataaagagatgaagattatagatagtgttttgggttgtaatgtgtagttgtatagggtgtttatggtataagggtattaggttgagtgtggtgagtagggattaaaatgtagtttaggttttgtttgttaagttatgtattttggtttaggttgtgtatagagtatgatgtattttttattattttttttttttttttgagatgagttttattttgttatttaggttggggtgtagtggtataatttcggtttattgtaatttttattttttgggtttaagtaatttgtttgttttagtattttgagtagttgggattataggtacgtattattatattcggttaatttttgtatttttaggagagacggggttttattatgttggttaggtcggttttgaatttttgatttcgtgatttgtttatttcggttttttaaagtgttggaattaaaggtatgagttattacgtttggttttttttataattttttataaggatgttatatgggagtagtattagttttgaaaatgataatgtttaaagtatgggtgaagatagaggagttagtagaaatagaaagattagttagcgaagtaggagattcggggagttatgttttggaattttaggaaggtaaggagaggatagtgaattgaattaaaagttgtagaaagttaagtaagattggttttggtaattgggttataggtaattttagagagggtagttttagtggaagggaagggtgggtagaagttatatcgtaatgagttgagagggaggtaaatattagggaagttttttggggagaaagggtaaatttgtgtttattggaggatgagaggaaggaattagtatagatgagagattaaatatgtgttagagaggatataattgtaagagtaagagtttaggaggagatggaattattggggaaggtggaggggattagttttatagttattgttattttttttatattggcgattatatttttttattttatgtttagagatttttattattatttttttgttggttttttgttttgtttttattattagggtggtatttttattattagatttttatttagtaatttatatttatgtatttagtttttatatgggtatggtgaggaggtatagaataaaatcggttttttagtggttatttttaaatgatttatttaggaagatatttttttaagaagaaaattttgtgttttattttttttattttagttagaagagatgttgtatagttcggtgatatttcgtgggataaagtaattagaaatagaattttagtatgaagtttttaatattaaaaaagaaaatattgtttgtaattttagtattttgggaagttgaggtgggaggatttttgttttgagtttaaggttaggagttgaagattagtttgggtaatatagtgaaattttattattataaaaaaaaaaaaaaaaaaagaaagaaaaagttttataaaaaattagttgaatgtggtggtagatatttttagatttagttatttaggagattgagacgggaggattatttgagtttaggagtttgaggttgcggtgagttatgattatattgttgtatttagttttttttaaaaagaaagaaaagaaaatttttataaattttgtgaggtagtattatttgttattgtagatatgttttttgtttgttgtttttatgttattttattaagttaaagtaaataaggttagttttaaggtaaattttttattttgtgtttttttttttgttgtttattaatttttgatatgtgtttgttaattattttttttttttttttttttgagatgaagtttcgtttttgtttttcgggttggagtgtaatggcgtgatttcggtttattgtaatttttgtattttaggtttaagtaatttttttgttttagttttttaagtagttgggattataggtatttggttattatatttagttaatttgtgtatttttagtagagacggggttttattatgttgattaggttggtttcgaatttttgattttaggtgattcgtttggttcggttttttaaagtgttgggattataggtatgagttattgtgttcggtcgtaattatttttattttaatagaaaagattaggtttttatgttgaatggaagtttaggttagaatttaatataaatattttttaattttatgaaatttatttatatttaagtgttgttttattaattttaagatttgttttggttaggaagtttttttatattttattagatgtgatagttagttttagagtttatatattggtagtttattggagtaaatttagttttgagacgttttgtttggtttgtatggtaatttaaaatttttgagttggtcgggtagtggtttatgtttggaattttagtattttggaaggttgaggtaggtagaatgtttaggagttggagattagtttgagtaatatggtaaaattttatgtttataaaaaatataaaaattagttagtgtgatagtgtgtattttagttttagttatttgggagtttgagatgggagggttgtttgagtttgggcggttgaggttgtagtgagttatgattatgttattgttttttagtttgggtgatagagtaagacgttgttttaaaagaa

SEQ ID NO: 217 - DNA, 5388 bp, Artificial Sequence
  chemically treated genomic DNA (Homo sapiens)
aatatggtgaaattttatttttattaaaaatataaaaattagtttggcgtggtggtatatatttgtaattttagttatttaggaggttgaggtaggagaatcgtttgaatttgggaggtggaggttgtagtaagtcgagatcgtattattgtattttattttgggcgagagagtaagatttcgttttaaaaaaaaaaaaaaatattataaaaagttattataaatatgtaaatttattaaagagtaagttgttttatttgtatatttggttttataatagtaaagtggtttattttatttttagaagttgataatgcgaatattgtcgataaagttttaattttttggtttgtaagttttatttttatgattaaattgggatagaaaaaattgtaataatttagggtgagttttattagagttatttattgtgtttttgtattcgtatagaatatttgtagaatagtttttatttttattgttacggggagtttgtttttggtacgaaattatttggtatttgatgatatgatattttttaagtgtttttaagttgtttgtgtgatgtttttttatatggatatgtaattttttagggtaggaaaatttttttttataacgattatgtggtgttatgaatagtgtttagtatataggagtattcggtgtttaatgattaatagacgttttgaaatattgtattttgattttaaaattatttttagattttatgtttaaatatatttatttttaaatggatttttattgtttagatttttggatgaattgtattggtttttggttagtgtagatttttagttatagaagaagtgattagagtatttgttgatgattagaataagatatagattaggaaagaaaatatattatggggaaatgttagataattgtattagtagaattttgaatggaattttttagaaatgtgttattttaaagatttatagggttttgttttgtagttgtatgaattataatgaagtaattagtatatatttattaaatatggagatatattatttatataatttttatgaaggttttttttaataaatatattgtatttaagaggtttttaaattaatgtatataaattagatagtaatttaattatacggttgaaatttttgtaataatagttttattaattaatagtatttatttttatttgtttaaaaaatttgtttaaatttgttagtgggatattgaaattaaattttagttttttttgttaagaagttttttttttttgaaggatagaattatgtaatagaagagagtttttttattgttttttttatgggaattgttttaaattatttttttaaagattgaaagttaaagtgtagtatttgggaagtgtattttttaaagggtatgtttttttgtttggaggatgagagatttttagtagagtattagtaaatattgaatggtttattattatttagatttttttgtggtattaaattatggtttatattaataattatatttttattaaattttagataatttacgttattagttggttggaaattggtattgtttttgagtgtcggtttaataaaggaattttattgattgtatatgatatagtatataatatttgaagtggtggtttagtgagattatgaaaatagattttttaagtttggtttttaattttttgttttttttattttaggtattttataattagtatttatagtttaaagaaatagaaattttattaaaggagatagaaaaattaaaaattaaacgtttatataaattattagaggtaagtttaaatttgttttgtattgttaagtatagtttttgttttgttttgtttttatttttgttttatattaaagttttttgtttttttaagatttggatagaatttggacgtattaagtttttttaaggttattatttaaatgatatagaaaaagagtgggggaaatttattattgttatgttagagagagagaaggtttttcgtttagaagtagaaaggtaggttagaggtgttttttgttatgaatattaagtggggagggggtttttgtgtttttgtgaaagaatttaagttaaatttttgtttatttggttttggataagttttttaatttttttgattttttatttttttatttagaaatttttttaagagattttaaggaggtaattagtgaagtaatgtatataaatgatcggttaggttggattggtatgtgaagttttatttaataaggttttatagttttaaaattagttaaaattatttgtaattttttatattgattttaagttattagggtttggatttaaaagtttataggataatagttgattttattttttattatatttttttgttatagttttttttttaaggggtattggaaattaaaatttagtttgtttttatttaaagggtgttggatggcgtttagaatatatttagtaaatgttagtttaggttttttttttgttacgtttttataagtggatttattttatgaaattattattagttttttgttattttgttttttattatatttagttgtttaggaaggtattatttagtttttaggaaatgtttgttggatgaatttgttttttttatagttttaatttggtatttgggaattgtgatttgtgttttttattagttatgaagtttataggatttagattttgtagggtgtattagtttatttttacgttgttaataaagatatatttgagattgggtaatttataaaggaaagaggtttaattgatttatagttatatatgattggagaggttttataattatggtggaaggcgaatgaggagtaaagttatattttatatgttagtaggtaagagtttgtgtaggggaatttttatttataaaatcgttagattttttgagatttatttattattatgagaatagtatgggggaaatcgttttcgtgatttagttatttttatttggttttatatttgatatatgaggattattataatttaagatgagatttgggtggggatataggtaaattatattatagggtaaggtttgtgtggttagatatatttttttagtttttttgttttttgtatagtagttatattggttgttttatatttaaatatttttagattttagttttaatattattttttcgagaaattttttatggttttttaggttagtttagatattttgtttagaatttttatgtttttatgtattgtttttttatagtgtttattttggttgtatttttatatttatttcggtgattgtttaagttttgtttattttatagatatgagttttaagaatgtggagagaaatttttgttttttttttgttttttgcgttgttagtgttttatatagcgtttgatataatattagaggtgtttagtattgttatgttttttgtgttttatatattgattttaggatttaacgttgtgaaataatgtataaaataaatatatgagagtatgtttaatttgttagttttttattaaattattgattatatttatgttaaagtataataatatgtgtatataattggattattaaaattaaaataagttataaatatataggatgtagtttttacggaaaaggtaatttgagtgattgaaatgagatattatgttaattatttgaaataatggaaaagtattttagaggatatagagtagatttttagttattagaatagtagttgaattttaagatatgtttataaaagaaagtagagagtggttgagagtttagggtttagaagttatttaattttaaattagattattagtttagtttgtaaagttgtatgatgttagataagttttttaatcgtttaagttttagtttttttatttgtaaataggatgtaatagtgtttattatattgggtggttatgagtatgagatgagttatgtatttaaaatgattaattttttgtatataataattatttaataaatgttaggtgttattgttattgttttgagttattttgtttatttattatatttgatgtggtatttttatatttgattttagttaaaaggttaagaagtaattggtgtggtatttttaaatttttttttttttgatttttgaaaagaaaaatatttatttttagagtggagaagtaatagtattattggaggtaggaaaatatttaggaggttggttggataaatgtttttatgtttttttatgcgaattttttggtattgtttatgtattgcgagtaatagttatgtggtatggaagtgtatgaaaaataaatgggaaagagttagtgtttttatgttatgtaatattttatagaatggaaaaataagtatagataaattaaatttgtaagtattgtattagtattttatttggtattttatagtaggtttagaagtaatattattgggagcgtgttatataaagaaaggtaaatggatattttttttattaatttaatttaataaataaatgatatggtggttaaaatggaagcgtattttgttttttattaaatttatttgtttataggtattttataatttttagttgtttgttttttttatattatttagtatagatttggttttttgtagaagttagattatgattggatatttgtgtttttttagttaatgattggtattgttagaataatttttattagttgttttggatatttgtgaggtatttgagttgttttttaggtggttgtaattggatgatttttagtgtaaatatttggtatattttttttagtgacgtttaatttgtttgttttgtttatatttgtagggttttaatataagttataaaaggtaaattttagttagtaaacgaatggttttaggttagatttttttgaatagttattagtatattatttgttgtgtgttgtatatgtatgttgaagtatatttaaggagttattaaaagttgtaatatttagttgttattttttatcgttagaagtagagttttttttagattttttattttttagtttattttgaaaggtgaaagaaagaatatcgttttaggaataaaaatgtatagtagtagttatagttatcgtagtagtgattttgtgtttagtaatattattagtattcgaattagttttgatttaaatgaaaatttttttttggtttattgtggtttaatattgattaatttttgtattagtttcggtagtgaattttttgatggatataggtattgaattattggtgtgggattgtgttttattttttgatgggtagtattttttaggaatggtgagttttttgattttaaagggagaagttttattttattttgttttattttttagg

SEQ ID NO: 218 - DNA, 5388 bp, Artificial Sequence
  chemically treated genomic DNA (Homo sapiens)
tttaaaagatgagataaaataaaataaagtttttttttttgaagttaaagagtttattatttttgaaaagtgttgtttattaaaaagtaaaatataattttatattaatgatttaatatttgtgtttattaaaggatttattgtcgaagttaatgtaagagttgattagtgttggattataatgaattaagagaagatttttatttgaattaagattggttcgagtgttggtagtgttattaaatatagaattattgttacggtaattataattattattgtgtatttttatttttgaaacgatgtttttttttttattttttaaagtagattaaaaggtaggaggtttggaaaaagttttatttttaacggtgaaaagtggtagttgaatattatagtttttagtggttttttaaatatgttttaatatgtatatgtaatatatagtaaataatatgttgataattatttaaaagaatttagtttaaagttattcgtttgttagttgaggtttgttttttgtagtttgtattaaaattttataagtatgaataaagtaggtagattgggcgttattggaaaggatatgttaaatatttgtattaagagttatttaattgtaattatttaaaaaataatttagatgttttatagatgtttaggataattagtaaagattattttggtaatattaattattagttaaaagaatataaatatttaattatagtttgatttttgtaaaagattaggtttgtgttgaataatgtaaggaaggtaaatagttagaaattatgaagtatttataaataaatgaatttgatgagaagtaaagtacgtttttattttaattattatgttatttgtttattaggttaaattaatggaaaaagtatttatttatttttttttatatgatacgtttttagtaatgttatttttaaatttattataaagtgttaagtagaatattgatgtaatgtttataaatttaatttgtttgtgtttgtttttttattttataggatattatatggtataagaatattggtttttttttatttgttttttatatatttttatgttatatagttattattcgtaatatatagataatgttaaaaaattcgtatgaagaaatatgaaggtatttatttaattagttttttaaatatttttttatttttaataatattgttatttttttattttaagaatagatatttttttttttaggggttaagaaaggggaaatttgagagtgttatattaattgttttttggttttttggttaagattaagtgtgagagtgttatattaaatatagtgagtgaatagaatagtttaaaataataatagtggtatttggtatttattaagtaattattatgtgtaagaaattaattattttagatatataatttattttatatttataattatttaatgtagtaggtattattatattttgtttataaatgaagaaattgaggtttagacggttaaagaatttgtttaatattatataattttgtaggttgagttaataatttaatttaaaattgagtggtttttaggttttgaatttttaattattttttgtttttttttatgaatatattttaaaatttagttattgttttgatgattaaaaatttattttgtattttttggaatatttttttattattttaaatgattaatatagtattttattttaattatttaaattatttttttcgtaaaagttgtattttgtatatttatggtttgttttggttttaataatttagttatgtatatatattattatattttaatataaatgtaattagtaatttaataaaggattgataggttagatatgtttttatatatttattttatgtattattttataacgttgaattttgaagttaatgtgtaaggtatagagaatatgataatattgagtatttttaatgttgtgttaggcgttgtgtaaagtattggtaacgtaagggatagaaaaaaaataagggtttttttttatatttttggagtttatatttgtggaataggtaagatttaagtaattatcgaaataaatataaaaatataattaagataagtattatgaaggaataatatatggaaatatgagagttttaagtaagatatttgaattagtttagggaattatggaaagtttttcgagaaaataatgttggagttgagatttgagaatgtttaggtgtaaggtagttagtgtggttattgtgtagagagtaagggggttggagaggtgtgtttggttatataggttttattttgtaatatggtttgtttgtgtttttatttaaattttattttgaattgtaataatttttatgtgttaagtgtggggttaggtggagataattgaattacgggggcgattttttttatattgtttttatggtaatgaataagttttaagagatttgacggttttgtaaatgggagtttttttgtataagtttttgtttgttgatatgtaagatgtgattttgttttttattcgttttttattatgattgtgaggtttttttagttatatgtaattgtgagttaattaaattttttttttttataaattatttagttttagatatgtttttattagtagcgtgagaatggattaatatattttgtaaggtttaggttttatagattttatggttaatgaggaatatagattataatttttaggtattaggttaagattgtaagggagataaatttatttaataagtattttttgaagattaaatggtatttttttgggtaattggatgtagtgagagataaaatgatagagaattagtgatgattttatggagtaaatttatttgtagaagcgtggtagaaagggaatttgaattaatatttattgagtgtgttttagacgttatttaatattttttaaatgaaggtaagttagattttggtttttaatgttttttggaaagagaattatagtaaaaaaatgtaataagaaataaaattagttgttgttttataagtttttagatttaggttttggtgatttaaggttaatatgagaaattataagtaattttgattggttttaaaattgtaaagttttattagatgagattttatatattaatttagtttagtcggttatttatatatattattttattgattgtttttttaaaattttttagaagagtttttaggtaagaaaatggaggattaaaaggattaagagatttatttaaggttaagtaaatagaggtttaatttaagtttttttataagaatataaaggttttttttttatttgatatttatggtagaaaatatttttggtttatttttttatttttggacgaagggttttttttttttttagtatggtaataatgagttttttttattttttttttatgttatttggatgataattttgaaggagtttgatgcgtttaaattttatttaaattttgagaaaataaaaaattttaatgtgaagtaaaaatgaaaataaaataaaataaagattatgtttgataatataaagtaaatttgagtttatttttaataatttatatagacgtttaatttttgatttttttgttttttttggtggaatttttgtttttttaaattgtaaatattgattataaagtgtttaaaataaaaaggataagaaattaaggattaaatttaaaagatttgtttttatgattttattaagttattattttaagtgttatgtattgtattatatgtagttagtggaatttttttgttaaatcgatatttaaagataatattaatttttagttagttggtgacgtgggttatttaaaatttgatgagggtgtaattattgatgtgagttatgatttagtgttatagggggatttggataataataaattatttagtgtttattagtgttttattaaaaattttttattttttaaataagaaaatatattttttaaaagatgtattttttaaatgttgtattttagtttttagtttttggaaaaataatttgaagtaatttttataaagaaagtaataaaaaaatttttttttattgtatggttttattttttaaaaaaaaaaaattttttagtagaaagggttaaaatttagttttaatgttttattggtaaatttaaatagattttttgaataaatgaaggtagatgttattagttgatggggttattattatagaagttttaatcgtgtaattaagttattatttagtttgtatatattaatttgggaattttttaaatatagtgtatttattaaaagggatttttataaaaattatgtagataatgtatttttatatttaataggtatgtattaattattttattgtaatttatgtagttataaaataagattttgtaaatttttaggatgatatatttttgaaggattttatttaaagttttgttaatgtaattatttggtatttttttatgatgtatttttttttttaatttatgttttgttttagttattagtaagtattttgattattttttttataattaagaatttatattaattagaagttagtataatttatttaagggtttggataatggaaatttatttggaaataagtgtatttgaatatgaaatttgaaaatggttttgaaattagaatgtaatgttttaggacgtttgttggttattaagtatcgaatatttttgtgtgttaaatattgtttatggtattatatggtcgttgtagggaaaagtttttttgttttggaaaattatatgtttatgtagggaaatattatataaatagtttgagaatatttaaaaagtattatattattagatgttaagtaatttcgtgttaaggataaatttttcgtggtaatgagaatgaaagttgttttatagatattttgtacggatgtaggagtataatgaataattttaatggagtttattttaggttattatagttttttttattttagtttgattatgaaaataaagtttataaattaaagaattaaggttttgtcggtaatattcgtattattagtttttagaaataaagtagattattttgttattataaaattaaatatataaatgagataatttattttttaataagtttatatatttgtaatggttttttgtaatgtttttttttttttttgagacggagttttgttttttcgtttaggatggagtgtagtgatgcgatttcggtttattgtaatttttattttttaggtttaagcgatttttttgttttagttttttgagtaattgggattataagtgtgtgttattacgttaggttgatttttgtatttttaatagagatggggttttattatgtt

SEQ ID NO: 219 - DNA, 8387 bp, Artificial Sequence
  chemically treated genomic DNA (Homo sapiens)
tttattagtttttaggtatcgatgtagatgttttttttcggaagcgttgggggtttgttaggttagattgagtttgtttttagtttttaagtatttagggtttagaattatgttttgattttttttttaatttatttattattgagtaaattttgtgttttattttgggattgttgtgataataataattaatattagtattaataataatgaggaagtttagtttttattttgtgttttttggaggtttatatttttttgattagattatttaaaggagtttttttatgagacgtgaagttgggaaggagatagatagtgttttttagtataataaagtaggggagatatttttttaagagtttatgttataatataaaattaatataaattgtataaaatgtttgatttttttttttttttttttttttttttgagatagagtttcgttttgttatttaggttggagtgtagattatagtttattgtaaatttcgttttttaggtttaagtgatgtttttattttaattttttaagtagttgggattataggcgtgggttattatgttggttaatttttgtattttttgtagagacggggtttcgttatgttgtttaggttggttttaaatttttggatttaagcgatttgtttatttcggttttttattatgttggtttgattgttttttttatattgtattttgaggttggatttttaggtgggtttgtttttttttttttttttattttttagtatttattataagttttttttttatttgtaatttttttttaggatgaaagaatggttggtagtatagtttggaagtcggatatatagaggaagggggattttggtgggtgagggagggaaagggttagaaaattagagttgaggggagggagagtatagggttttaggtgattatagaggtgattttatgttaaatttaggtaagatttgtgtttgaggatggagcgtggggataaacgaggaaataggtttagtaagtttaagtagtaagtttatagttatagagcgaggaagtggtagagttgggatttgggtttaggtttgttaggttttaaattatgtttttaatagttttgttgtgttgcgggggtttatataaggtagggagtggttgttttttttttaagtttttggcggagtggaaggtttatagaggtaatgtaagttatagatttttttatttttgtttttatttagtttaaatttagaggttagagggttaagagtttagtttttagtgtttttggtttgtttttttgggggttttgaggttttttagttagttagtgatgaaggttgatttacgattatttattgagtattttttttgtgtaaatcgatttatatttattattttattttatttttaggaataattgttatgatgagtattgtttttttatttttaaatgaggaattttaattttagaaaggtggaggaatttggttaggtttatagaatagggtagtatggttgggattatgaatttaggattgtttggttttaaatttaatttatttttttttggaaaaagtcgttagtttaaggacggaagagtaggaaaatagatagatttagtttttgaattgattaatttttgatttattttatttgtgaatttttattgagaagaatatattttttttatgatttaagttgtattaaattgaaatagtaggagaagagttttgggggatgataggatttttttatattttgattgtggttttggttataatatatagttatatatgtattaaaatttttagaattaaaaggaattttaggaagtaaatatggtagaatgttaaggttttataaatttatgtggtttattttttttttaggtttgaaatattttataataattttagggaaaagaaaaaaataaaaagtaggaggaggaggaagaggaaaaggatatttggggaaagtttgtttagatgggatggttggagttgttgcggttattttgtaattatgaaagaagttagtgtaagagtaaatttgagatacggggatgggagagtagagagatggaaagatgattttgtagatgtcggttagttgttgaattaattagaattttaaatttgtttttttttttttggattttttttttgttataataaatttgtttatcgttgaagtaatgtgagttgatggtttttgatatttgggttgaagatattgttattgatataggatacggggttagatttgaagtagtggggtagttttatggttagtagtagtgttgataaggagattgtggaaagttattgatgtggtttatttagatgtggttgggtatgagatatcggggaagttagtggggttgtttgtttagaaatttgttagttgggtttttttttttttttggtgggaggttgtggggggatagagttttgttttattatttaggtttgagtgtaatggtgtgattttgatttattgtaatttttgttttatgggtttaagagagttttatgttttggttttttgagtagttgggattataggtgaatattattatgtttggttaatttttgtatttttagtagagatagggttttattatgttggtttgtttggtttcgaatttttggttttaagtgatttatttgttttggttttttaaagtgttgggattataggtgtgagttattattttcggtcgttagttggttttaagattttaattttatagtaatgtaggttattgttatgtgattttattttaatgttttttttttagttgatatttttacggatattatatttatttgggttttggggaatttaggaatttcgagtaattaagagttggaagtgtttaaaaatgtgtaagataattttttaaaaatttaatttttgtgataagttattaatttatgtgttttggttgttatttagagtaatttttttggtatagatgtagatatttgagtttgggggtttaaattatttggaaaaagggagagttggggtgagggtttatagttatgagtttttttggtatttgttttaggtaagggaaaattttttttgcgtgaaaggaggaatgattatgatagtgatgtgatcgttgtattttagtttttttgtttttaaaatggtgaagaggttaggtacggtgtggttcggttttaattttaatattttgagaggttgaggtaggaggattgtttgagtttaggagtttaagattagtttggataatatagtaagattttattttaataataataataataataataataataataataataaaataaaatggggaagaattattttttttttagggttgttttttggtttggagatgatgtatatgaagtatttggtatatagtggatgttttatatacggttattgtttttattttgaagtaagttagaagaattttagttgttgtagatggaagtaggaggggagatttttttagaattaaacgaagagaggaagaaaaaaatttttaagaaaaaaagaagaaaattttagaaggttttacgtttttcgagtttagcggattttattagatttttataaagtttaaagtcggggagatagggtattagggggttgatgaggatttagcgggagagaagttggttgttttttttgtagtttcgtttttttttttattattatggagacggagtaggttgtttagtggggtttttgtttattcgaggtttgaggttgttgtagagggaggggtaggggttgagtagatagggatttgtttggaaagttgggttggcggtggggagtgtttatatttttttaatttttaaggcgttgagggattcgggttggtgtgggatgtatttggagggttgtgttttgattttcgttttgttagtagtttgttgagtgatcgtgggaagaacgttttttttggtgaagttttaggttttatatttgttaaaggaaggagtaaaaatgtataaaaatagaagtttggataagaaagttgtgggatgaggaagtaatgaaatatttaatgttggagaagaatatttgttatttattgtttttcgaaaaaagggaattttattaaattgattaggtgattttatattggttaataaataaatatggattttttatttatgtttattaataaaagagggagaaaagaaatattttaaaatatattttggtttgttttcggaagagggagttatatgtaatttgtatttttttgttttttttttaaattttggttaataaatatgggttatttttaaaattaggataatattaatagttagtatttggatatttattttgtacgggtagtatgttaaatgttttacgtggttttaagtttattttattttttttataatttagagagggagtagtattatgtattttttttttgtagaagagaaaatcgaggtttagagaggttaaagggtttgtttgaggtcggattattagagaatgatagggttaagatttaaaattatagttaagatattagattttaaaatgtgagtattgaattattattattattgttttttaggataagaaaatacgaaagtatttgtttttttaaatgttttattattaaaaatataaaagaaattaaaagtagaaagaaaaatatgaatttttatgtttgtgttatttatttttaagggagtttgtagatgggggtatttgggtggggatatagagcggggaatggggtgtttagggaggggaattaatttatatatatatatatatatacgtacgttcgcgtatatatacgtatgtatatatggatatgcgagttttttaggttgtatttttttttgtttgtggggttttaattataatggaaaattatagcggtttttttttttttttatttttattaggttttttttttttttttatattttattgatttgtatttttttagtcgatttttttatagttttttggtttaattttaaggttttgaggttttggtagttttggaggatgagagagaatatggttaggggtttttgtaacgcgtcgagatgggcgtttttgatggtgttggtcgttataggtatcgtcgtgatagcggtcgttaattttggcgtcgtggttaggattttttagaagggtttggattacggtaattggatgtttttttttttttttttttatttttgaggagtatttatttagtatttattgtgtgtatttttttagatttagtatttggtatatttatagtattttagggtaggtttttttgtttttattttatatatgaagaaattgaggtaaagcgagttgtttaagattgtagggttgggatggtagagttgggattggagtattggtttagaggattttaagtttagtgtttagatttttgagggtttttatggttttttttttttttttatgtaatttttatttttgatttataagttttttttttttttttaaagttagtttttagttttgttatttgtttttcgttgttgaggaggttgagtagggttagagggagagtgtgggaggatttttttatttcgtgttttttttattgtaggggttggcggttatattgtgtatagtgttttattgggtgatataaagagggtttttttagattatttattttagtttaggtagaggagagaaagatttgttttaatttgtgttaggtattgagttaggaattttatatatatagttttttttatttttattttagttttgtgtaagataaattgttgttatttatatttatacgtgagaagtgggtagtttggatttgagttttggttttgtttgatgttttagtacggggttgttcgatgttgtttttcgatggtagagagatgatttgtaaaatagtgggtgatatttagttttagggaaattagattaaggggaaggtagagttttattagttggggtgcgttgggaaaatagataggatttaggggatttggtattttatttttgaatttttattttagtttagtaggatattattgaattttagagttgtagatagaaggttatagaagatagaagagttagggggaaggagtatggttttgaagtttgtcgatatagaggtttagttagggtttttaagtttagtggtttttatgtttcgttatagtagtttgagtttttttttttatttaggttttttgtgttaatcggagtgagttttttgaaatgtagtaaatttttatatatttttttttggtttatattttttatggttttttattgtttttagaagttattttgattttttggtatggtatttgagatttttcgaggtttggtttttgttaatttatagattttggttattgtatatttttttttttttttatatagtgattagttatgtgttatttatttttgaatttttagaaagttttttttagggtatgggttttgggattagaaggtttgggtttaaattttgttttttgttcgttgtgtggtttttagtaagttattttagttttttgagttttagtttttttatttgtgaaatgggggtagtgataggatttattttttaggattgtataaatttatatatatacggagtttagaatagtgtttggtatagagtaaagttcgatatattttattgatattattattttttaattggtttcgagaaaatttaaagtttgggtttttttattttattatttatttttttttaggtaatgtgtttgttttttaattggttttttgatgttgttagttatattataattggtggtagaatttttgttattaggatattatttatttatttaataaatttttttttgttttgttttgagatcgagtttcgttttgtggtttaggttggagtgtaatggtgttattttagtttattgtaatttttgttttcggggtttaagtgatttttttgttttaattttttaagtagttgggattataggcgtgtattattatatttagttaattttttgtatttttagtagagacggggttttattatgttggttaggttgaatttttgaatttttgatttaaagtgatttatttgttttggttttttaaagtgttgggattataggcgtgagttatcgtatttagttttatttaataaattttaagtgtttttaaagtgttaggtataatgggaatgtaagggatatacgagtaaataaaatagattgttgttgattttagggggtttatatgtaataggggagagatattcgttagagttacgtgaataaatgtataattataaatggtaataggggtttcgaaagagtagtttatagtattatgagaataatatagggcgttgttttgatttattaagttagggagggtttttagaggaagtgatgaatgagttgattagaagttgatcgggtgaatatgggagggaagaattttttagggagtaagaatagtatgtgtaaaggttttggggagatagtttaaaatttagagaggtgggagatttgtgggggtgtagtatagagtaaataataaattaagtatttaataaaaattagtaggaggtataattgggtgttttaggggtgatattttagattaggggttagtaaattatagtttttcgtttttgtatggtttataagataaaaatggttttaatgtttttaaatgatgggaaaaaaattaaaagggtcggttatggtggtttatgtttgtaattttagtattttgggaggttgaggtgagaggattatttgagtttaggagttcgaaattagttgggtaatatggtgaaattttagatttttgtaaaaatgttaaaaaaaaatttttaaaaagttagtttggtgtggtggcgaatatttgtgattttagttgttagggaggttgaggtgggagaatgatttaagtgtagcgggtcgaggttgtagtgagtcgtgattatgtttttgtattttagtttgggcgatatagcgagattttgttttaaaataataataaaagaagaaaaatattattttataatatgtgaaaattatatgaaatttttattttaatgttaataaataaagtgttattggaatataggtatatataagaatatgatattgtttatggttgttttgtgtagtaatggtagagttgagtatttgtgatagaggtaatatggttttttataaagggttagtttattatttggttttttttaggaaattttaattgatttttgtttttgatttttttagtgttattgtttatgttacgaataggggtttagggtttagagtttgttttgtttttttgttttttgttttaggttgtgttttttattgttatttttgttttttttttttagt

SEQ ID NO: 220 - DNA, 8387 bp, Artificial Sequence
  chemically treated genomic DNA (Homo sapiens)
gttgaagggagaaggtaggggtgatagtgagaggtatagtttggagtaggggatagaggggtagggtaggttttggattttgggtttttgttcgtagtatggatagtggtattggaagggttaaaaatagggattaattaaggttttttagaaaaggttaaatagtaaattgattttttataggaaattatattgtttttgttataaatatttagttttgttattattgtataaaatagttatagataatattatgtttttatatgtgtttgtattttaataatattttatttgttggtattgaaatgagaattttatataatttttatatgttgtgagatagtatttttttttttttgttgttgttttgagatagggtttcgttgtgtcgtttaggttggagtgtagaggtatgattacggtttattgtaatttcgattcgttgtatttaggttatttttttattttagtttttttagtagttgggattataggtgttcgttattatattaggttaattttttaaaaatttttttttaatatttttgtagagatttggggttttattatgttgtttagttggtttcgaatttttgggtttaagtgatttttttattttagttttttaaagtgttggagttataggtatgagttattatgatcggtttttttgattttttttttattatttaaagatattaaggttatttttgttttataagttatataaaaacggagggttgtagtttgttgatttttggtttaaaatattatttttgaaatatttagttatgttttttgttagtttttgttggatatttaatttgttatttgttttatgttatatttttatagattttttatttttttgggttttggattgtttttttagggtttttgtatatgttatttttgttttttaagaaattttttttttttatatttattcggttagtttttagttagtttatttattattttttttgggaattttttttggtttagtagattagagtaacgttttgtgttatttttatgatgttgtggattgttttttcggagtttttgttattatttgtaattatgtatttatttacgtgattttgacgaatgttttttttttattatatgtaagttttttgaagttagtagtaatttgttttatttattcgtgtgttttttatatttttattgtgtttgatattttgaaggtatttaagatttgttagatgaggttgggtgcggtggtttacgtttgtaattttagtattttggaaagttaaggtaagtggattattttaggttaagagtttaagagtttagtttggttaatatggtgaaatttcgtttttattaaaaatataaaaaattagttgggtgtgatggtgtacgtttgtaattttagttatttgggaggttgaggtaggagaattatttgaatttcggaggtagaggttgtagtgagttgagatggtattattgtattttagtttgggttatagagcgagattcggttttaaaataaaataaaaaaagatttattagatgaataaataatgttttaatggtaggaattttattattagttataatgtggttaatagtattaaagaattaattaaaaggtagatatattatttgaaaaggagtaagtagtaagatgagggagtttagattttgggttttttcggagttagttaggaaataataatattaatgaaatgtatcgagttttattttgtgttaagtattgttttaggtttcgtatatgtatgaatttgtataattttaggaagtaggttttgttattatttttattttatagataaggaagttgaggtttagaaagttgaggtgatttgttaggggttatatagcggataaggggtagaatttgaatttaggttttttggttttagagtttatgttttagagaaggttttttgggggtttaaaagtaaatgatatataattggttattgtgtggagggaaaaaaaaatgtgtagtggttaggatttgtaagttgataggggttaggtttcgaagggttttaaatgttatgttaaagggttaggatagtttttgaaggtagtagggagttatggagaatgtgagttaggggaggatgtgtagggatttgttgtattttagaaaatttatttcgattggtataaggggtttgggtagaaggggaaatttaggttgttatgacggagtatgaagattattgaatttaaagattttgattgagtttttgtgtcgataggttttagggttatattttttttttttagtttttttgttttttgtggttttttgtttgtagttttaggatttagtgatgttttgttgggttggggtgggaatttaggggtgggatattaggttttttgagttttgtttgtttttttaacgtattttaattggtgaggttttgttttttttttggtttgatttttttggggttgggtgttatttattgttttgtaggttatttttttgttatcgggaggtagtatcgagtaatttcgtgttggggtattaggtaagattagagtttaaatttaggttgtttattttttacgtgtaaatgtggatagtagtagtttgttttatataaggttgaagtgagggtaaaagagattgtgtgtgtaaagtttttagtttaatgtttggtataggttagagtaggttttttttttttttgtttgggttggggtgagtggtttggggggattttttttgtgttatttagtggagtattgtgtatagtatggtcgttagtttttgtagtggggagagtacggggtggggaggtttttttatattttttttttgattttgtttagtttttttagtaacgagaggtaaatggtaaggttgagaattggttttggaaagaagagaagggtttataagttaaaggtggaggttatatagagggaaggaggggattatgaggatttttaggggtttgagtattggatttggagttttttagattagtgttttaattttagttttgttattttagttttgtaattttaggtaattcgttttgttttagtttttttatatataaaatgggggtaaggggatttgttttgaggtgttatgagtgtgttaggtgttggatttaaaggggtgtatatagtagatgttaagtaagtgttttttaggggtggagaggagggaagggaggtatttagttatcgtagtttaggtttttttgggagattttgattacgacgttagggttgacggtcgttgttacggcggtgtttatggcgattagtattattagggacgtttatttcggcgcgttgtaagggtttttggttatgtttttttttattttttagagttgttaaaattttaaggttttgaggttgaattagggagttataaaagagtcggttggggaaatgtaagttagtagaatgtggaaaggaggaaggaatttggtgagggtgggaaagagggagggtcgttgtggttttttattgtggttagggttttataggtagggagaagtgtagtttgggaggttcgtatgtttatgtatgtatgcgtgtgtgtgcgcgggcgtgcgtgtgtgtatgtgtgtgtgtagattggtttttttttttaggtattttatttttcgttttgtgtttttatttaaatgtttttatttatagatttttttgaaggtgggtggtatagatataaggatttatatttttttttttatttttgattttttttgtatttttgatagtaaaatatttaagaaaatagatgttttcgtgtttttttgttttgagaggtagtagtggtaatgatttaatgtttatattttagagtttagtattttggttatggttttaaattttagttttgttattttttagtggttcgattttaggtaagttttttaatttttttgaatttcggtttttttttttgtagaagagaaatatatagtattgttttttttttggattgtggagaagataaaatgagtttaaaattacgtaaagtatttagtatattgttcgtgtaaaataaatatttaaatgttagttattaatgttattttgattttaaaagtaatttatgtttattggttaaaatttgagaaagaaataagagaatataaattatatataattttttttttcggagataagttaaagtgtattttagagtatttttttttttttttttttgttggtaagtataggtagagagtttatgtttgtttgttaattaatatgggattatttggttagtttggtaaagtttttttttttcgagaaataataggtagtaaatgtttttttttagtattaaatattttattgtttttttattttatagtttttttatttaagtttttgtttttgtatatttttatttttttttttggtagatgtagaatttgaggttttattaggggaagcgttttttttacggttatttagtaagttgttagtagagcgaggattaaaatatagttttttagatgtattttatattagttcgaattttttagcgttttgggagttggggggatgtagatattttttatcgttaatttagttttttagataggtttttgtttgtttagtttttgtttttttttttgtagtagttttaggtttcgggtgggtaggaattttattgggtagtttgtttcgtttttatggtgatgagaggaggggcggggttgtagaaggggtagttagtttttttttcgttgggtttttattagttttttagtgttttgttttttcgattttggattttatgaaagtttaatgaagttcgttgagttcggaggacgtgagattttttgaagttttttttttttttttttaaaagttttttttttttttttttcgtttggttttaaaagagtttttttttttgtttttatttgtagtaattagaatttttttggtttgttttagaatgaaagtagtggtcgtgtgtgaagtatttattgtgtgttagatgttttatatgtattatttttaagttaaaaaataattttgagagagggatgatttttttttattttgttttattattattattattattattattattattattattgagatgaggttttattatgttgtttaggttggttttgaatttttgagtttaagtaatttttttgttttagttttttaaagtgttgggattaaggtcgagttatatcgtgtttgatttttttattattttggaaataaggaaattgagatgtagcgattatattattgttatggttatttttttttttacgtagagaagatttttttttatttgaggtaggtgttaggaggatttatgattgtaggtttttattttagttttttttttttttaagtgatttgagtttttagatttagatgtttgtatttgtattaggaagattgttttaagtagtagttagaatatatagattgatgatttgttataaaaattagatttttgaaaaattattttgtatatttttgaatatttttagtttttagttgttcgaagtttttgagttttttaaggtttaggtagatgtggtattcgtgagggtgttagttaggaaaggaatattaagatgaaattatatgataatgatttatattgttataaaattagaattttaaaattagttgacggtcgggggtggtggtttatatttgtaattttagtattttgggaagttaaggtaggtggattatttgaggttaggagttcgagattaggtaggttaatatggtgaaattttgtttttattaaaaatataaaaattagttaggtatggtggtgtttatttgtaattttagttatttaggaggttaaggtatgagatttttttgaatttatgaggtagaagttgtagtgagttaagattatattattgtatttaagtttggatggtagaataagattttgtttttttataattttttattaaaaaaaaaaaaaaatttagttggtaagtttttgaataagtaattttattggttttttcgatgttttatgtttagttatatttagatgagttatattagtgattttttatagtttttttgttagtattgttgttggttatggggttgttttattgttttagatttgatttcgtattttgtattagtaatagtgtttttaatttaagtattagaaattattaatttatattgttttaacgataaataaatttattatggtagagaggaagtttagagggaggaggataggtttgagattttgattgatttagtaattgatcgatatttgtaggattatttttttatttttttgtttttttattttcgtgttttagatttgtttttatattggttttttttatggttgtaagatggtcgtagtagttttagttattttatttaaatagattttttttaaatatttttttttttttttttttttttttgttttttgttttttttttttttttaaaattattataaaatattttaaatttaagaaaagaatagattatataggtttataaaattttaatattttgttatatttgttttttagagttttttttagttttaggaattttgatatatgtatagttatgtgttgtaattaggattataattaggatatagaagaattttgttattttttaaaattttttttttgttattttaatttgatgtagtttaaattatagggaaaatatattttttttagtagaaatttatagatggggtggattaagagttggttagtttaagggttggatttgtttatttttttgttttttcgtttttaggttgacgattttttttagaagaaagtgaattgggtttagagttaggtagttttgggtttatagttttagttatgttattttattttgtgagtttggttaagtttttttatttttttgaaattggggttttttatttaaagatgaggaaatagtgtttattatggtagttgtttttgaggatgaaatgagataataggtgtgaatcgatttgtatagagaaggtgtttagtaaataatcgtaagttaatttttattattagttggttggagagttttagagtttttaggaaaataagttaggggtattggaaattgagtttttggttttttggtttttgggtttggattggataggggtaaagatagaggaatttgtggtttatattgtttttgtgagttttttatttcgttaggggtttggaggagaagtagttattttttgttttatgtgagttttcgtagtatagtaaggttgttaagggtatggtttggaatttgataaatttgggtttagattttagttttgttattttttcgttttgtgattgtgagtttgttgtttaaatttgttgaatttgttttttcgtttgtttttacgttttatttttaggtataggttttgtttgggtttaatatgaggttatttttgtggttatttgaggttttgtattttttttttttttagttttgattttttagtttttttttttttttatttattagggtttttttttttttgtgtgttcggtttttaggttatgttgttagttatttttttattttgagagggggttgtaggtgaaggaggagtttgtggtagatgttggagggtgaaggggaggagagaagtaggtttatttggagatttagttttaaggtgtagtgtggaaaagataattaggttagtatggtgggaggtcgaggtgggtagatcgtttgagtttaggagtttgagattagtttgggtaatatggcgaaatttcgtttttataaaaaatataaaaattagttagtatggtagtttacgtttgtagttttagttgtttgggaggttgaggtgggagtattatttgagtttgggaggcggagtttgtagtgagttgtgatttgtattttagtttgggtgatagagcgagattttgttttaaaaaaaaaaaaaaaaaaaaaagagaattagatattttgtataatttgtattaattttgtattatggtataaatttttaagagggtgttttttttgttttgttatgttaaaaaatattgtttgttttttttttagttttacgttttataaaagggtttttttgagtaatttggttagaaagatatgagtttttaaggggtatagggtaggggttgagtttttttattattattaatattaatattaattattattattatagtaattttagagtgggatataagatttatttaatagtgaataaattaaaagaagagttagagtatagttttagattttaagtgtttggagattaaggataagtttagtttggtttggtaaatttttaacgttttcggggggaggtatttgtatcggtgtttgggggttgatgga

SEQ ID NO: 221 - DNA, 5240 bp, Artificial Sequence
  chemically treated genomic DNA (Homo sapiens)
ttatataatataatggaagtaggtattttggggtgatttattatgttatgagtggtgatggggttagataggttattggagtttaggattttgttttggtttaagtagttaggtataggatatagagataggaggttggttaatattaatgtatagggagattttgtatgtagttaattttattgttgggttttagtttttttatatgtataatgaaggttagttgtggttttagtttttattagtgttgaattttaggatttttgttttgttagggaagtaaaaaggattttttttttgaaaagaaggttagttacgaaaagaattaaaagaatgggggaaggaattgttttggattttagtttttagggtagaaaattagttttgattagttaagatttttttttaagtagattaaggaggtagtgtttagatatttgtgggattttttggaaagttatatttttgttattattattttttttttttagagattttatttttaaaataaatgttttgaggatgaattggtttttttgggaatatggattttttatggttatttttatatatacgtaaatatatatatatatatacgtatatatatttttttatatgtaattttgtagtttgtgtagtttggatttagtagtatttttatatgttgagttgttgtttgaaatatgtttttatttattttatagatagggagtgaatttttgttatatgttaattattgttgtagatattgaggatgagtaagatagatatttatagatatagatagattatttataatgtatttttaaataaatatgaaaatgtataatttgaggttgttgtatatataatgaataaattaaaatcggtggtaatatagagagggattgttgttgggcgtatgttcgtgggattagaattggatggtgaatattggagtttaggtttattgaggagaagagggttgtttgttagtttttggggaggagtattgtaggtggaggggttagtgagtataaagattttgaggtgggaataggtttggatgtttgaaggtaagataaggtagagtatttggagtatagtttgtggggagtatggtaggtgttggttatgattgggtgcgtattgttggggatttggtttttattttgtatgagatcgggagttagtaaagggtttagagtagggattttttttaggagattattgtgtgagtagtagggattatgaagggttaggagtggttttttttttgtggttattggttaatttttttttattttttatatttaatttaatggtttttttttttaggaatttgtttttatttcgttattttgttagattttttgatgagttttttagtattaattattttttaggatattgatttttgtaggagttttatattgatttttgtggtttatagttaatgtttgttttttttattagattttgagttgtttggggataggtatatagttgttttggtttattttaaatttttagtatttcgtataacgtttgggatatagtgggtgtttaataaatgtaaagagaagaaataagtaaatttttggggttttagtaaaatttttatttttttaaggagtgatgttttgtttttatttttttttttttttgtgtttttatattttacgtttattttttttgtagaatttagtatgattatgaatgtgttgatatttgtatatatgtatatatatatataggtaaggtatgtgtgttgttttttattgtattttagggatttttttgaagtagatagtgttattgtataaagaacggttttatatatgtttatttgtttagaggttttcggtttgggtttattagatagtttgtgttttgaaggtgtgttaggggttaagtttttttttttatttagttaggtagtattttttatagatttgttggtagtaggggttttatgtttttttgtattatggttttagaagaatttatataaataagggtttagttttgtttgtatagtggttgttttttgtaaattagagatttgtatatatagattgaggagtgtaattgaggataaaatattgggacgtttgatttttggtttagtttaagaagttggggaacgttggtttatatttttagagttaattatttttttttgtgaaaatttagtgtttacgatcgttggtgttgttagattttagttaattaattaatatatttttgaaataaatatgttagaaataaaatcgttaataaaaaataatattttatatgttttaggaaagtttggtatttaagaaatttttttgtagtataaaatatatttttttggaaagtaattggtaatttttatgaaaagttttaaaatgggtatgtgttatggttttatgattttatttttgagggttgatttaatgtattaaaatttattttaaaatggagttataagaatatttgttaaatagtattggttgtaagagggtaaggttgaaaataatttaaatgtttagtaaggagtagttaaattaattttggtatatttgtatgacggaatattttgtagttaaaattatgataatcgtaatggttagtatatattaaatatttattttgtgttggggattatattaaaagtattatatgtattattttatttaattttgtttatgttgtatatattattattatttttattttatagatgaggaaattaatattaaatagagttaaggtatttgtttaaagttatatagttagtttttaggatgtatatttaggtaatttgattttagatattagttttttagttattatattattcggttttagatgaaattattaagggagttattgttgtagtaaggttagttatatggagcgatgtttataatatgttaataggtatagtaagtaggttattaaagattatatgtagtttgattttatgtgtatatgtgtatataaagtaaaaagaggatgttttgggaagattttatttaagattttatttgcgtgaaaatgttagtttttttttgtttgggttttttgatttttttgggtaaacgtgttgtttttatattttaaaaaattatttttagagttaaaaattaatataaatgttaaaagttatttttttatatttattttatgtataaatgtaaatgtttagttattggttttgttttaggtataggtataatagtacgtataggcgttgtttgttttttatggtttagtttttttttgaagtagtaagggttttttagttgggaagagacgatatagattttttttattgtattttttagtagattgtttttattatttagaagttttttgggtatttttgtttttagggaattgttaggttgatggtatagagttgggtgagtttttttttgatagttaagtttagggattttaagagtttgagatgatttattttttgtttttgggttttttaaggtagtaagaagtgaagggtagataggttttaaagtaatagagtggtttagggataggagttttagttttgtagtcgtatatattgaggatttttttggtttagttatttgttttttagttttgtgattttggataagttatttttttttttagagtatgtttttatatttgttaaataaagaaattaaaagtattaatttggaagaaaagtattaattggtaagaattaaagtaatagataaattagatataaaacgatggtgttaataagtaatattttttgggtattgataatatgtatgatttttatagtttttatagttattttattagaaatattgtgatgatttgtattttatagatgatgaaataaaagttgagagcggtaaagttatttgtgttggaaagtagtgaggagggaatttttgttattatggttgggtttatattattatatttcgtattttggtataatgtttagaatatgggaaggtttttatttagatggttattattgttatcgttttttattagggttttttatttggttttggagagtagtgtgagagtgaggattttttttggttttttttattatttagatatttatatagttattaggttattgatttattttaaggagtttttttttgggagttattaaaatttttttttaatattcgtttttattttcgtatatatatatatattttttttgagttagttttagtgattatagttaatgattttgttgttggatagtttatgataagtttttgtttagaattggttttgtgttttggtttagtaggggtttttgggggttaggtttgtaggtatttatatttggtatttgttttaaaatttttttaggtttttgaggatttgagttttgggtttgggtttttcgtcggttcggaaaagttggtttgtcgggttagagagagaattatacgatttagaaaagtagtgttttttagtagtttttttatcgtttgggttttttaaaggtagagcgggacgttggaaatgtgtgcgcgttgtggtatgggtgtgtaagtgtgcgaaggcggcgtgttgtgtgagcgagagggtagcggatgtgtgtgtgcgtgtgcgcgcgtggtttcgggtgtgcgtcgttgcgatagcgggttttttttcggggcgggcgacgggcgggttgggaaggttttttttttttattatattgagaaattttagtgagttatcgagtggttttgtatattaatgagttcgttcgttgcgagggtaggagcggatttaaaagaggttagggcgggcggagggaggttgtggagagagcgcggagataagcgtagagcgtagcgtacggttatagatagttttgggtatttatcgacggcgtagtcggagttagtagagtcggaaggcgcgtttcgggtagagaaagtcgagtagagttgggtggcgttttcgggtcgtcgtttcgacgggttagcgttttttttatgtttttgtttttacgtcgcgttttttcggttagtatgaggtttttggcggtcgcgttgtttttgttgttgttggcgttgtatatcgcgcgtgtggacggtgagtgcggggagttttttttgtcgtcgtttcgttttgttttgttttggggaatttaagcgttaatttttaggtattttgggatttcgcggggggtggtttgggtgggtattaaggtggtcgaggggtaggagatcgtttagtaattaagtcgttgtttcgcgttcgttcgtagg

SEQ ID NO: 222 - DNA, 5240 bp, Artificial Sequence
  chemically treated genomic DNA (Homo sapiens)
tttgcgagcgagcgcggggtaacggtttagttgttaggcggttttttgtttttcgattattttggtgtttatttagattatttttcgcgggattttaggatgtttagaaattggcgtttgggttttttaggataggataagacgagacggcgataaggggagtttttcgtatttatcgtttatacgcgcggtgtatagcgttagtagtagtaggagtagcgcggtcgttaggagttttatgttgatcggaggggcgcggcgtgggagtagggatatggggagggcgttggttcgtcggagcggcggttcggagacgttatttagttttgttcggttttttttgttcggggcgcgtttttcggttttgttggtttcggttgcgtcgtcggtggatgtttagggttgtttgtggtcgtgcgttgcgttttgcgtttgttttcgcgttttttttatagttttttttcgttcgttttggttttttttaaattcgtttttgttttcgtagcgagcgagtttattaatatgtagaattattcggtgatttattgagattttttaatgtggtgaggggaggagatttttttagttcgttcgtcgttcgtttcgggaaaggattcgttatcgtagcggcgtatattcggagttacgcgcgtatacgtatatatatattcgttattttttcgtttatataatacgtcgttttcgtatatttgtatatttatattatagcgcgtatatatttttagcgtttcgttttgtttttggggagtttagacggtggagaggttgttgaagggtattgtttttttgaatcgtgtggttttttttttggttcggtaggttagttttttcgagtcggcgggagatttaggtttagggtttagatttttaaagatttgaaagggttttggagtaggtgttaagtgtgagtgtttgtaggtttgatttttaagggtttttgttgggttagaatataaggttagttttggataggggtttgttatagattgtttagtagtaaagttattgattgtgattattggaattgatttaaagagggtatgtgtgtgtatgcgggggtggggacgggtattggggaggagttttggtgatttttaaaggaaagttttttaaagtgggttagtggtttggtggttgtgtgagtgtttgggtggtggggagaattaggaggagtttttatttttatattattttttaaagttaggtagagagttttagtggagagcgatgatagtggtaattatttggatgaaggtttttttatgttttagatattgtgttagaatgcgaggtatagtggtgtgagtttagttatagtggtagaaattttttttttattattttttagtataagtgattttatcgtttttagtttttgttttattatttgtaaagtgtagattattatagtgtttttgatagggtggttgtgagaattatagaaattatatatgttgttagtatttaggaaatgttatttattggtattatcgttttatgtttaatttatttattattttgatttttattaattggtattttttttttaagttggtatttttaatttttttatttgataggtgtggaaatatgttttgagagaagaaataatttgtttaaggttatagagttaggaagtaggtgattaggttaggagggtttttagtatatacggttgtagaattgggatttttgtttttggattattttgttgttttgaggtttgtttgttttttattttttgttgttttgagagatttagagataggaggtggattattttaagtttttggagtttttgggtttggttgttaggagagagtttatttagttttatgttattagtttggtagttttttggaggtaaaaatgtttagagggtttttggatgatggggatagtttgttgaagggtgtaatgggaagaatttgtgtcgtttttttttaattggagagtttttgttgttttaagaagaagttgagttatgaaaagtaagtagcgtttatgcgtgttgttgtgtttatatttaaagtaaagttaatagttggatatttgtatttatgtatgagatgagtatgagggagtgatttttggtatttatgttagtttttaattttaaaaataattttttaaaatatagaaataatacgtttgtttagaaaaattagaaaatttaagtagaagaaaattaatatttttacgtaagtaaaattttgggtgaaatttttttaaagtattttttttttgttttgtgtgtatatgtatatatgggattaggttgtatgtagtttttaataatttgtttgttatatttattagtatattgtgaatatcgttttatgtggttagttttgttataataatagtttttttaatggttttatttgaggtcgggtagtataatggttaagaggttggtgtttggagttaaattgtttgagtatgtattttagggattagttgtgtgattttgggtaaatattttaattttatttggtattggtttttttatttgtgagatggagatgataataatatgtatagtataggtagaattaaatgagatagtgtatgtaatgtttttaatgtggtttttaatatagagtaagtgtttgatatgtgttgattattgcggttattatgattttagttgtagagtatttcgttatatagatgtattagaattaatttgattattttttgttggatatttggattgtttttaattttatttttttataattaatgttgtttgataaatatttttgtagttttattttggggtaggttttaatatattggattagtttttagaaatagaattatggggttatggtatatgtttattttaagattttttatagaaattgttaattgttttttaaaaaaatatattttatgttgtaaaggaattttttaaatattaagtttttttagagtatgtaaagtattattttttattaacgattttatttttaatatgtttgttttaagaatatgttgattgattaattgggatttaataatattagcgatcgtgggtattgagtttttataggaaaaagtagttggttttagaaatatggattaacgttttttagttttttgggttggattagaggttagacgttttagtgttttgtttttagttatattttttagtttgtgtatgtagatttttggtttgtagaaggtagttattgtgtaagtagagttgagtttttgtttgtgtgagtttttttggagttatggtataggagagtatgaggtttttgttgttagtaggtttgtgggggatgttgtttaattgggtgagggagggggtttggtttttgatatatttttagggtatagattgtttagtgagtttaagtcgagggtttttgagtaggtgggtatgtgtgaggtcgttttttgtatagtggtattgtttgttttaaggaggtttttggggtatagtgaaggatagtatatatgttttgtttgtgtgtgtgtatgtatgtgtgtagatgttaatatatttatggttatattggattttatagaagaggtagacgtgaagtgtgggggtatagaggagggaggaagtggaaataggatattattttttgagggagtggaaattttgttgagattttagggatttgtttattttttttttttatatttattgagtatttattgtgttttaggcgttgtacgaggtgttgggggtttgaggtgagttaaggtagttgtgtgtttgtttttaagtagtttagagtttagtggggaaggtagatattagttataaattatagagattagtgtgaaatttttgtagaggttagtgttttggagggtggttggtgttaggagatttattaggggatttgatagggtgacgaggtggggataaatttttggaggaaagggttattgagttagatatgaaggatggaaaggaattaattagtgattataggagggaggttatttttggttttttatggtttttgttgtttatatagtgattttttgggggaagtttttgttttgaattttttattggttttcgattttatgtagagtggaagttaagtttttagtagtgcgtatttaattatgattagtatttgttatgttttttataggttgtgttttagatattttgttttgttttatttttaaatatttaagtttgtttttattttagggtttttgtgtttattggtttttttatttgtagtgtttttttttaggggttgataggtaatttttttttttttagtgagtttgggttttaatatttattatttagttttaattttacgagtatacgtttaataatagtttttttttgtgttgttatcgattttagtttatttattgtatgtgtagtaattttaaattgtatatttttatatttatttgggggtgtattgtggatgatttgtttgtgtttgtgggtgtttgttttgtttatttttagtatttataatagtgattggtatgtagtaggggtttattttttatttgtggagtaaataaaaatatgttttaggtaatagtttagtatgtgagagtattgttgaatttaggttgtataggttataaggttgtatgtgagaaagtgtgtgtgcgtgtgtgtgtgtgtgtgtttgcgtgtgtgtaggggtggttatggggagtttatatttttagggaagttagtttatttttagggtatttgttttagagatgaagtttttgggaagaggaggtggtgataataggagtgtgattttttaggaaattttataggtgtttgggtattatttttttggtttgtttagaaaggggttttgattggttaaggttggttttttgttttgggagttgggatttagggtaatttttttttttatttttttagtttttttcgtgattgattttttttttagaagaggagttttttttatttttttggtaggataggaattttagaatttagtattggtagaggttgaggttataattggtttttattgtatatatgaggaaattgaggtttagtaatggggttgattgtatataagatttttttgtgtattaatgttagttagttttttgtttttgtgttttgtatttagttatttaggttagagtaagattttgggttttagtaatttgtttggttttattattatttatgatatggtgggttattttaaaatatttgtttttattgtgttgtgtgg

SEQ ID NO: 223 - DNA, 6121 bp, Artificial Sequence
  chemically treated genomic DNA (Homo sapiens)
gtgcgttaagattatgttattgtattttcgtttgggtgatagagcgagattttgttttaaaaataaaataaaaaattggttcggtgtggtggtttatgtttgtaattttagtaatttgggaggttgaggtggaaggatcgtgaatttaggagttgaagattagtttgggtaataaagtcggattttgtttttttaaaaaaattaagtttaattaaatatttttaaaaataataaattagttattagaattataaatttgtattgtttttgataatgtaatgtattgttttgtaaaatattataattaagattgttattttaaggattttgaagtttgtgaagattaggtatttttttgaaattttaagataattattttttagttttttttattttttgtttttatttagaattaagtttattattaaaacgtagttttgttgacgttaagtatttatttatatgatatgtaattattggggtcgttaaaatttgggtagaatttttgttaatttattaggattttaggtaaaaaattaggaaaatgaagtgattgatttagtttgttaaaagcggatattttgaaatattattttttaattttaagaaatattttttgttaggtgcggtggtttacgtttataattttagtattttgggaggtcgaggaaggtagattacgaggttaggagatcgaggttattttggttaacgcggtgaaatttttatttttattaaaaatataaaaaattagttgggcgtgatggcgggtgtttgtagttttagttattcgggaggttgaggtaagagaatggcgtgaattcgggagatagagttcgtagtgtattagtcgcgatcgtgttattgtattttaggttgggcgatagagcgagatttagttttaaaaaaaaaagaaaaaaaagaaatatatttttttattcgttagggaaattaattttcgttttttttttttaaattatataattggaaattaatttagatattttggagtttttttagttggtgggttaattaagagaaaataggaagtgggagattttagtttagttggattatatttaggtttttataaggaattttttttggttggtatgtaaaaaaatttttttagtaagagtattaattttgaacgtgtgtaaatacgaaagttatggttaattttatttgttttttaggtttatagttagtagagttagatagttgggttttaggtttttagtttttataattgatattattgttaagtttatgtgattgatttattttgttttggtataagttagttttttttttatatcgattttttttttttttagttttaataaaatttttttaatgaaataaatttggtaattcgaattttggttattgtttttattagaggtttgtataagttaagttatttaagttgaggtcgggagtggtggtttatgtttgtaattttagtattttgggaggttaaggtaggaggatcgtttgagtttaggagtttaagattagtttgggttggtttttgagaaagcgagattttgtttcgaaaaaaaaaaaaaaaagtgtggtttgaaagttgagtgtttgataaaaaggagaaatagtgtttttttaaaattaaaggtttttaattaagatttttttaacggggtttcgaaaaaaggagaatgggatgagaaggatatatgggtagtgttattttttaatttgtagattttattttagttttttagttatcgttttttagtattttatgtttttaagatagtgttattattttaaggatttttttttattttttttgtttgggttttttttttattgaggagtcgtggttttttattagtagaagtcggatgtttttgtgttcgaaattggtgggtttttggttttattgattttaagaatgaagttgcggatttttacggtgagtggtatagtttttaaagatgatgtgtttagagtttgttttttttgatgttcggacgtgtttagagttatttttttttggtggattcgtggtttcgttggttttaggagtgaagttgtagatttttgcggtgagtgttatagtttttaaggcggtatgtttggagtttgttcgtttttttcgtttggagttgtttattttttttggtgggttcgtggtttcgttggttttaggagtgaagttgtagatttttgcggtcggtgttattagtagataaatgttatgcggatttaaagagtgagtagtagtaagatttattgtaaagagtataagaataaagtttttatagcgtggaaggagattagagcgggttgttgttgttggtttaggtagtttgtatttttttttttttttttttttttttttgagatggagtttttttttgttatttaggttggaatgtagtggtgtaatttgggtttattgtaagtttcgtttttcgggtttacgttatttttttgttttaatttttttagtagaggggattataggtatttattatcgtatttagttaatattttgtttttttagtagagtcggggttttattgtgttagttaggatggtttcgattttttgatttcgtgatttatttttttaggttttttaaattgttgggattataggtgtgagttattggtatttagcggggtagtttgtttttatttttttatttgattttatttatattttgttgattggtttattttatagagagttaattggttcgttttgatagggtgttgattggtgtatttataatttttgagttagatatatatagagtgttgattggtgtatttataattttttagttagatataaaaattttttaagtttttattatatttgttagatatagagtattgattggtgcgtttataaatttttagttagatatagagtgttgattggtgtatttgtaaattttgagttagatatagagtattgattggtgtatttataattttttagttagatatagaagttttttaagtgtttattagattagttagatatagagtgttgattggtgtatttttaaattttaagttagatatagagtgttgattggtgtatataaaatttttaggttagatataaaagttttttaagtttttatttgatttaggagtttagttggttttatttagtggattttgcgtagggttgtgtcgggcgtttgtattttttttagtttttgggtagtcgatgggatcgggcgttgaggagtagggggcggtgttcgtcggggaggtttaggttacgttggagtttataggggttgggagggggttcgggtatggcgggttgtaggttttgagttttgttttgtgtagggcggttggggttcggtgagaatttaagcggggtgtaggcgggtcggtagtgttgggggattcggcgtattttttgtagttgttggttcgggtgttaggtttttgattgttcggggtcgggggtgcggggttcgttgagttcgcgtttatttggaattcgcgttggttggcgagcgttgcgcgtagttttagtttttatattcgtttttttttttatattttttcgtaagtagagggagtcggttttggtttcggttagtttagagaggggtttttatagcgtagtggcgggttgaagggtttttttagtacggttagaatggacgttaaggtcgaggaggcgtcgagagcgagcgagggttgttagtacgttgttatttcgtattttgaattatagattttttaatttttcggcgtttttcgtttattcggttttttagaatacgaagggtttttttattttgttattaaaacgattagttgttcggagatacggaaaaagtcgttttttttttttgtaggattttttttttgaatttttttaaatttttttagtgtgacgtgattttatttttagttaatttaggttgtttttttattagtttttcgttttttggggaggcggtaatgtaaagatcgttcgttgttagttttgtcgttatttttgtggggtgaatttaatatggcggataaagatagtaattagtttcgttttttcgcgttttcgttaagaagattggtttttattatttgttttttaaaacgattattttattgattggtggcgattgcgtcgacggagacggggtaaaagtaagttgaattcgaaaaataataaatattggggttgaggggtggaattacgagtgcgtagatatgggttagagcgtattttttttgttttaggtaaattcggcgtttattgcgttttcgtaggttattgattttataagattatttgttttagatttttggggttggatgggaattgtagtttttttaaagagttgtacgtatttttttaaggtttagtttttgtttttaaaatacgaaaatataatattttagtttataattgttgataagtataagcgcgtataggtttttaatttatttattggattttcgtgagaattgtgttcgttttggtattggatgtttttttttataagattatagtttttaaggaatattgtggcgaagattttttatttcgtaacgtatgttggaaataattatttttttttatttttttaataatttttattatttatatttatcgaaattggagatttttattagggcggaaagagtgggggattgggatttttttttacgattgttttggataataggtagcgattttgattttcgtatagtaattattgtgatgtaataagtcgtaattggaagagtagaggttagagggtaggtattttatggtaaatttaggtagaattttttttttttcgtttttttttttttacgttattcgggggtagattgggtggttaatttagagtttcgagagacgtttggttttttttgttttttttattttttgattgtattttgatttcgtattttgagaggttgttgtttagcggtagttttttggttttcgtggtaacggaaaagcgcgggaattatagataaattaaaattgcgattgcgcggcgtgagttcgttgagattttttggacgggggataggttgtggggttttttagataattgggtttttgcgtttaggaggtttttattttttgttttgggtaaaggtagtagagtttcgggaaagggatagggggtttaagtgatgttttggggtattggcgtgggagagtggattttcgaagttgatagatgggtattttttgacggggggtaggggcggaatttgagaggcgtaaggcgttgtgaattttggggaggggggtagtttgtaggtcgcgagggaagcgttgaggattaggaagggggtattgagtgttcgtgggggaattttcgtgataggaattggaatatgttttgagggggatattatgtttttaaaaacgtcggttggttatgaggttaggagttttagattagtttgattaacgtggtgaaatttcgtttttattaaaaatataaaaattagtcgggcgtggtgtcgttttagttatttaggaggttgaggtaggagaatcgttagaattcgggaggcggaggttgtagtgagtcgagatcgcgttattgtattttagtttgggcgatagagcgagattgttttaaaataaaataaaataaaataaaataaaaaatatcggttggtatgtatgagaggatgggattttgtggaagaagaggtgttaggaatatgtttgggaaggggaggagataggattttgtgggagggagaatttaagaattggatttatttgcgttattgagaaagcgtaagagggaagtagaggagcgttagtagtaatagatgttgtcggtagggatgtgtttgaggaggatttagagatgagagtaggttattgggaaaggttaggggcggggaggttttgattggtgttggtttggtcgttgttgattttggttttatgtaagaaaaagaaaataattagaaatattggagaaagttaaggttattattatttattcggttagttatttttttgtagtttttttttttttggagaaaggaaaagatttaaggggttggtagtaatatgtgaaaaaatttagaatttatgttgtttaattataaaaagtaatttttagaatttt

SEQ ID NO: 224 - DNA, 6121 bp, Artificial Sequence
  chemically treated genomic DNA (Homo sapiens)
aagattttagaagttgttttttgtaattagataatataaattttgaatttttttatatattgttgttaattttttgggtttttttttttttttaagaaagagaaagttatagaggagtgattgatcgggtaggtggtggtagttttagttttttttaatgtttttggttgtttttttttttttgtataaaattaaaattaataacgattaaattaatattaattaaggttttttcgtttttaattttttttagtgatttgtttttatttttggattttttttaagtatatttttgtcggtagtatttgttattattgacgtttttttattttttttttgcgtttttttaatggcgtaaatggatttagtttttaagtttttttttttataaaattttgtttttttttttttttagatatatttttggtatttttttttttataaggttttatttttttatatatattagtcggtgttttttgttttgttttgttttgttttgttttgagatagtttcgttttgtcgtttaggttggagtgtaatggcgcgatttcggtttattgtaattttcgtttttcgggttttagcgatttttttgttttagttttttgagtagttggagcggtattacgttcggttaatttttgtatttttagtagagacggagttttattacgttggttaggttggtttggaatttttgattttatgattagtcgacgtttttaaagatatagtgttttttttaaggtatattttagtttttattacgaggatttttttacggatatttagtgttttttttttgatttttagcgtttttttcgcgatttataaattgtttttttttttagggtttataacgttttacgttttttaggtttcgtttttatttttcgttaaagaatatttatttgttagtttcggaaatttatttttttacgttagtattttagagtattatttgggttttttgtttttttttcgggattttattatttttatttagagtagagggtgaaggttttttgagcgtaggggtttagttatttgagaaattttatagtttgtttttcgtttaggaagttttagcgagtttacgtcgcgtagtcgtagttttaatttatttgtaattttcgcgttttttcgttgttacggaaattaaggggttatcgttaagtagtagttttttagaatacgaaattaaggtataattagaggatgggagggatagaaagagttaagcgtttttcggggttttggattggttatttagtttgttttcggatgacgtaaaaggaaagagacggaagaggaagaattttatttgagtttgttataaagtgtttgttttttagtttttatttttttagttgcggtttattgtattatagtaattgttgtacgaaggttagaatcgttatttattgtttaaagtagtcgtaagaagaggttttaattttttatttttttcgttttaatggaggtttttagtttcggtaaatataagtaataaggattgttgggggggtggagggaaataattatttttagtatgcgttgcggaatgaaaggttttcgttatagtgttttttagaaattgtagttttatggagaggaatatttaatattagagcgggtataatttttacggaaatttagtggatagattggagatttgtgcgcgtttgtatttgttaatagttatggattggagtgttatgttttcgtattttgaaagtagaaattaggttttaaaaagatacgtataattttttagggagattataatttttatttagttttaggagtttggggtaagtagttttgtaaggttagtggtttgcggggacgtagtgagcgtcgaatttgtttggggtaggggaaatgcgttttggtttatgtttgcgtattcgtagttttattttttagttttagtgtttgttatttttcgggtttagtttgtttttgtttcgttttcgtcgacgtaatcgttattagttaatggggtggtcgttttgagggataagtggtaagagttaatttttttggcgaaaacgcggagaaacgggattagttattgtttttgttcgttatgttagatttattttatagagatagcggtagagttggtagcggacggtttttgtattgtcgtttttttagggggcgggaagttggtaaggaagtagtttgggttagttaggggtggggttacgttatattaagagggtttggagaagtttaagggaggaattttgtaaagaagaggggcgatttttttcgtgttttcggatagttaatcgttttagtgataggatgagagagtttttcgtgttttgagggatcgagtgggcgaaaagcgtcggagagttggagagtttgtggtttagaatgcgaggtgataacgtgttagtagttttcgttcgttttcggcgttttttcggttttggcgtttattttggtcgtgttggaggagttttttagttcgttattgcgttgtgggggtttttttttgggttggtcgaagttagagtcggttttttttgtttgcggggaagtgtggagggagaggcgggtgtgggaattggggttgcgcgtagcgttcgttagttagcgcgagttttaggtgggcgcgggtttagcgggtttcgtattttcggtttcgggtagttaggggtttagtattcgggttagtagttgtagagggtgcgtcgggttttttagtattgtcggttcgtttgtatttcgtttgaatttttatcgggttttagtcgttttgtatagggtaaggtttaggatttgtagttcgttatgttcgagtttttttttaatttttgtgagttttagcgtggtttgagttttttcgacgggtatcgttttttgttttttagcgttcggttttatcgattgtttaagggttgagaggagtgtaggcgttcggtatagttttgcgtaggatttattaggtgaagttagttgggtttttgagttagatggggatttggaaaatttttatgtttagtttgaggattttatatgtattagttagtattttgtgtttagtttggggtttggggatgtattaattagtattttgtatttagttaatttggtgggtatttggagaatttttgtgtttagttaaaggattgtaaatgtattaattagtgttttgtgtttagtttaaggtttgtaaatgtattaattagtattttgtgtttagttaaaggtttgtaaacgtattaattagtgttttgtgtttagtaaatgtagtggggatttggagaatttttatgtttagttagaggattgtaaatgtattaattagtattttgtgtatatttagtttagggattgtaaatgtattaattagtattttgttaaaacggattaattagttttttgtaaaatggattaattaataggatgtgggtggggttagataagggaataaaagtaggttgtttcgttgggtgttagtggtttatatttgtaattttagtaatttgggaggtttagaggggtggattacgaggttaagagatcgagattattttggttaatatagtgaaatttcgattttattaaaaagataaaatattagttgggtgcggtggtgggtgtttgtaattttttttattggggaggttgaggtaggagaatggcgtgaattcgggaggcggagtttgtagtgagtttagattgtattattgtattttagtttgggtgatagagggagattttattttaaaaaaaaaaaaaaaaaaaaaaaaaaatgtaggttgtttgagttagtagtagtaattcgttttggtttttttttacgttgtggaagttttgtttttgtgttttttgtaataaattttgttgttgtttattttttgggttcgtatagtatttatttgttggtaatatcgatcgtagaggtttgtagttttatttttgaagttagcgagattacgaatttattaggaggaatgaataattttagacgggaggaacgaataaattttagatatgtcgttttaagagttgtaatatttatcgtaaaggtttgtagttttatttttgaagttagcgagattacgaatttattagaaggaggtaattttgaatacgttcgaatattagaaggaataaattttggatatattatttttaagaattgtattatttatcgtgagggttcgtaattttatttttgaagttagtgagattaagaatttattaatttcggatataagaatattcggtttttattgatggaaggttacgattttttagtagaaagagggtttaggtaaagaaaatgagagagagtttttggggtggtgatattattttgggaatatggagtgttaggaaacgataattggaagattaggatgaaatttgtaagttaaaaaatgatattatttatatattttttttattttattttttttttttcgagatttcgttaaagagattttggttagggatttttggttttggaaaggtattgttttttttttttgttaaatatttaatttttaggttatatttttttttttttttttcgagataaagtttcgtttttttaaagattagtttaggttggttttgaatttttgagtttaagcgatttttttgttttggttttttaaagtgttgggattataggtatgagttattattttcggttttagtttggataatttggtttgtataggtttttggtggagatagtaattaaagttcgggttgttaggtttgttttattaaagggattttgttgaggttgaaagaaaaaaaaatcgatgtggaggaaaagttaatttgtgttaagataaggtgagttagttatatggatttaataataatgttaattatgaaagttgaaggtttaggatttagttatttgattttattggttgtagatttaaggagtaggtagggttaattatagttttcgtgtttatatacgtttaagattaatgtttttgttgaaagaatttttttatatgttagttaaagagagttttttatggagatttggatatggtttagttaagttagaattttttattttttgtttttttttagttggtttattagttggaggagttttagaatatttaaattaatttttaattgtgtaatttgagaaaaagagacgaagattaatttttttaacgagtagggaagtgtgtttttttttttttttttttttttgagattgagtttcgttttgtcgtttagtttgaagtgtagtggtacgatcgcggttagtgtattgcgaattttgtttttcgggtttacgttatttttttgttttagtttttcgagtagttgggattataggtattcgttattacgtttagttaattttttgtgtttttagtagagatgggggttttatcgcgttagttaggatgatttcgattttttgatttcgtgatttgtttttttcggttttttaaagtgttgggattataggcgtgagttatcgtatttggtaggaagtgttttttaaagttggaaagtggtattttagaatattcgtttttggtagattgagttagttattttatttttttgattttttgtttaaggttttggtgaattgataaagattttgtttaaattttaacgattttagtaattatatgttatatgaatgaatatttgacgttagtaggattgcgttttggtggtgaatttggttttaggtagaaataaagaatggagaaaattgggggataattattttagggttttaaaaaagtgtttgatttttatagattttagggtttttaaaataatagttttaattgtagtgttttatagggtagtgtattatattgttaaaaatagtataggtttatggttttaatgattggtttattatttttaaaaatgtttaattgaatttaatttttttaaggagatagggttcggttttgttgtttaggttggtttttaatttttaggtttacgatttttttattttagttttttagattgttaggattataggtatgagttattatatcgggttaattttttattttatttttgagatagagtttcgttttattatttaggcgggagtgtagtggtatgattttggcgtat

SEQ ID NO: 225 - DNA, 5944 bp, Artificial Sequence
  chemically treated genomic DNA (Homo sapiens)
atttagttttatttatttattgagtattttttgtatatttggtattggggatgttattaagattaagataggattatgatagttatgtttttttaggaattagattttttttcgtttattattcgtgtttattttattttttttttattttttattttttttatttattttgttcgttttagaaatgtattatacgtaagtatttttttatttggttttataatttttatagtggaaatagttatattttggttttaaaaattgaaaataaagaagaaaagtattttattattatgtaaggggaaaaaagttagatttttttttatgattttgtataaggaaaaaaaaatgatttttttaattttatttgtatttatttttaagattacggtattgatttagttttttattttttttaaagattattttgggattttttttgttgttgtcgtttgtatttttttaatttattttttataatgttatcggtataatttttttaaaacgaaagtttgattttatgtattatagattcgaagttttttttcgtttttaaattttttaatagtagtggttgttagattgttggtttttataggtttagttgggttggtatttattttatttaaaatttattaaatatataggttacgtgatatatatatttttagagtttttttttttttattaagtatatggaagaagagagagaagattttgtttttattgtttttatagatggaaaaggagggaggggatgaggttggtcgaggattaagaagagggaagagaggatttatttggaagttgggttttcggagcggttcggaggcggcgtttttaggtatttgtttgtttttcgttttttgagggtacggggcgtttttttttttcgatttttttagttgttcgggttttttttgtttgttagtttttgattttcgtgatggtggttgcggttggttggttttcgtagggttcgggagcgttttgtttttcgtttcgtttttattttttcgtaggcggattaagtttttgcggtcggcggtaggcgaagtgattttataggttggtaggggtttttgggggtttttgtcgttttagggggagtagttgttgagggtgcgaggttttagagagtattgtatagttttgtttattcgcgggtttatttgtacgtttatttttttggtgttgggtttgtatagtcgcgggtttaggttggggtttatttgggagagaatggttttaagttgcgtttttttgtaagggttaatgtagtagttaggggcgttcgcgggtattagtagttttggtttggttagaaaagtgggaggatttatattttgtttttagtcgggttgtttgtgttttgagagtttaggttgtttaaaggtattgtgtttttataattttggtataagttatagggaatacggataaagcgttttattcgtttttaggtgtttaggcgtagtttaatattttagttagtttgtttgggtttttattttgttttttttttttattcgttttttttttttttttattaggttggtttagatttatttttggtttttttatttattttagattttaatgggagttgttgtttattattttgattgagggagagaagttttatttatagatgtttaattgttatttgatttttatttaattgtttttttttatttttttattgttcgggaattttttttttaaagttgttttttatttttagtttatttatatatatgttttaattagtgattaatttatatatttttgtagtgattattttaaagattttttgtaaggtaatgtggtaatgttagataatgttttaaggtatagttattatggataatagtatgaaggttttttaaaaaagttaatagaagtattagataatttagtaattttattattgcgtatttatttaaaggaaatgaaattaatattttgaagagatatttttatttttttgttcgttgtagtattatgtataatagttaagttatggaaataatttaagtgtttgttaatagaaaaatggatagagaaattgtggtatgtatttatataatggaatattatttagttttaaaataggagattttggttaggtacggtggtttatatttgtaattttagtagtttgggaggtcgaggtaggtagatgatttaaggttaggagttcgagattaatttggttaatatgatgaaattttgtttttaataaaaatataaaaattagtcgggtatggtggtacgtttttgtaattttagttattcgggaggttgaggttggagaattatttgaattcgggaggtaaaggttgtagtgagttgagattatattattgtattttagtttgggtaatagagagagaaagatttcgttttaaataaataaataaataaaaaataggagattttgttatttgtaataatatgggtgaaattggggaatattatgttaagtgaaataagttagatagaaaaatattgtataaatttattgatatgtggaatttgaaaaagttaaatatatagaagtagaaagtagaatggtggttattagggataggaagttggggggaatggagagagattggttagagtttaaaatgttatagttaggtagaatgaatgagtttagagatttaatttatagtataacgattatagttattaatattgtattttatattgaaaagttttaaagagaaattttaggtgtttttatcgtatataaaagaaaggtaattatgtgaatagatggatatgttaattgtttgattatagtaattattttattgtgtatatatatatgttgtgtatattaaatatatataatttttaggaaataatggttttttgggtttttgtttgtttgtttgtttgaaatggagttttttcgttttgttttttaggtaggagtgtagtggcgtgatttcggtttattgtaattttcgtttttggggtttaagtgattttttcgttttagttttttaagtagttgggattataggtatatgttattatatttagttaatttttgtatttttagtagagatagggttttgttatgttggttaggttggtttcgaatttttgattttaggtgatttgtttattttggttttttaaagtgttgtgattataggcgtgagttattatgtttagttggaaataatgtttttaagaaaaattaaagtatattgtaaattgaatataaatagtaaattgagtagttgtattagaagagaataggtgagaaagtttattatggtggagttaataagttgtaagtttttggtataaagagaataagaaatataaaggtatggggggttgtataaaatgatagaaaatgttatttttgagatttgtgtgatatgttacgggtttttattagtttatttttagtgagatattttttttttttaaaaaggggataaagtatattgttttgatttatagggtaaataaattataggttagttaagtgtatgaagttaaatggattagaatttaaatttgggttttattattaggtatattatttaattatttgatttagtatttttatttgataatattgattaatttataggattattgtaagattaaatatggtattgtttgaaaatttaaagtagaatgtttaatttataaaatgtttggtaagtggtagttgttattagtaaggattatagacgtatttttttgcgaattagagtaaaagttttagaatttatttgtattagtaaggtttttttttataattaaggattattgattattaaattaaaatggtttttaaggaattaagcggagtttattttttttttaatttaaagttgtttttgtttattgtttaagtattttttggaagtagtaaggtttttatgggagtaatttttattgaatttatttgaaggttttgtaggttttataataaattttatttagttttgtattaggtatgttatagaattaacgaattcggagatgaagttaggttttttagtttagtttgcgaggaagataggtgattcgaattttaagaatgtaaaagatgggttgggtgtggtggtttatgtttgtaattttagcgttttgggaggtcgaggtaggtagattatttgaggtcgggaggttgagattagattgattaataacggagaaatttcgtttttatttaaaaatgtaaagttagtcgtgcgtggtggtttatgtttgtatttttagttattcgggaggttgaggtaggagaattatttgatttttggaggcggaagttgcggtgagcggagattgcgttattgtatattagttcgggttataagagcgaaatttcgttttaaaaaaaaaagtaaaagatattattaagttttgcggagtaaggtattttatattttatgagcgagttaagatgggttttataattttttaagtaaggaaacgggttcggaggttttgaatatttgttatttaatagtagaatagttattggaattaaaattttttgattttaaataatagtttcgtttattattattaagtgaagttatttataattatatatcgattattttaagtttttgtaagatcggttcgttttggggaataggttttgagagaatattttttttaaggttagaataaaggtattttataggttttaggtcgtgtttcgagggcgtttatttaaatatgagttggagtaaaaagaaagggatgggggatttggagtaggtataggggcggtttttttaagtagggtggtttgggatttttaagggttagcgagaagagaatatatattttagttttcgttttattcggttagatattgacggttgggatgtttgataaggaattttttttcgttatattgagaaatattcgtagcggtttatttaggtttgattttcgggtggtgcgtgtgttgcgtgtcgcgttacggcgttacgtggttagcgcgggtttgtggcgcgagtttttgaaattaggcggtagaggcggagtcgttgtggtattgttgcgtttttgttgcgtttcgggtgttttttgcggcggtgggtcgtcgtcgggagaagcgtgaggggatagatttgtgatcggcgcggtttttgttagtttatttcggttaaaaaagaattgcgtttttggagcgggttagtggtggtggtagtgggttgggacgagcgcgtttttcgtagttttagtttagcgtggcgggggagcgttttacgtttcgggtcgttgtcgcggttttttgtttttttgtttttgttaatttttatttatgtttgagagaaaggtttttgttcgaaggtaaattttcgttaagtaaattcgagtttcgttttttttttgggtttttatttttcgttttcggttcggtttttgggtttcgtttttagtttaagatttaattttttttttagttgttttagatgacgttatttgaaattttttggaaatacgattattttaacggaatattgttgttttggggaagtgttttatagttgttgggtacgttgtatttgttttatttaagtttttggtaattgttgtatttcgaagatatgttgatgggaattattaggcggcgttggtttttaattggagttttttgtttttattagttacgcgttattggttagcgtgattgaaattaaatcgtatgaaaatttttttttttagtcgtattagttacgtttcgagtgtttaatgtggttagtggtatcggtttggatagtatagttgtaaaatgtttttatttttatagtaagttgttatcgttttaggagatgggattgaattagaatttaaataaattttttagcgtttttgagttttattttagttatataataaggaatgtatttttgtgtaagtgtattttggttttttgttttgtaga

SEQ ID NO: 226 - DNA, 5944 bp, Artificial Sequence
  chemically treated genomic DNA (Homo sapiens)
tttgtaaaatagaagattaaaatgtatttatatagggatgtattttttattatgtgattgaggtaaaatttagaagcgttggaaaatttgtttgaattttaatttagttttattttttggaacggtaatagtttattgtgaggatgggaatattttatagttgtgttgtttaaatcggtgttattagttatattaagtattcgaaacgtggttagtgcgattagagaagaggatttttatacgatttagttttaattacgttaattagtgacgcgtggttagtggggatagagggttttagttagagattaacgtcgtttggtaatttttattagtatgttttcggaatatagtaattattaggggtttaagtaaggtaaatatagcgtgtttagtagttgtaaaatatttttttaaaatagtaatatttcgttaaagtgatcgtgtttttaagaaattttagatggcgttatttgggatagttgggagggaagttaagttttgagttgaaggcggagtttaaaggtcgggtcggaggcgggaaatggagatttagggaaggggcggggttcgaatttgtttggcgaaaatttgttttcgggtaaggattttttttttaggtatgggtgggggttggtagagataaaagggtaagaagtcgcggtagcgattcggggcgtgaggcgttttttcgttacgttggattgggattgcggaagacgcgttcgttttaatttattattattattattaattcgttttagaggcgtagtttttttttggtcggagtaagttgataaaaatcgcgtcggttataaatttgtttttttacgtttttttcggcggcgatttatcgtcgtaaaagatattcgaggcgtagtagaggcgtagtagtgttatagcggtttcgtttttgtcgtttagttttagaagttcgcgttataagttcgcgttggttacgtgacgtcgtgacgcgatacgtagtatacgtattattcggaagttaggtttgggtgggtcgttgcgggtattttttagtgtggcgaaaggaaattttttgttaggtattttaatcgttagtatttgatcgaataaagcgggagttggagtgtgtgtttttttttcgttgatttttaagagttttaggttattttgtttggaggggtcgtttttatgtttattttaagttttttatttttttttttttgttttagtttatgtttgggtgggcgttttcgggatacgatttgggatttatgaaatatttttgttttgattttaaaagggatgtttttttaagatttgttttttaaagcgagtcgattttataaaagtttagagtggtcggtgtgtggttgtggatgattttatttagtggtagtgggcggggttgttatttgaaattagaggattttagttttagtagttgttttgttattgggtagtaggtgtttaagattttcgagttcgtttttttgtttgaaaaattgtgaaatttattttaattcgtttatgaagtgtgaggtattttgtttcgtagggtttggtagtattttttgtttttttttttgagacggagtttcgtttttgtggttcgggttggtgtgtaatggcgtaattttcgtttatcgtaattttcgtttttagggattaagtggtttttttgttttagtttttcgagtagttgggaatataggtatgggttattacgtacggttaattttgtatttttaagtagagacggggttttttcgttgttggttagtttggttttaatttttcgattttaggtgatttgtttgtttcggttttttaaagcgttgggattataggtatgagttattatatttagtttattttttgtatttttaggattcggattatttgtttttttcgtaggttgaattggaagatttgattttattttcgaattcgttggttttgtaatatgtttaatataaggttgaatagggtttgttgtaagatttataaaatttttaaatggatttagtgagagttgtttttatgggggttttgttgtttttagaaggtgtttgagtagtaaatagaagtaattttggattagaaaaagggtgggtttcgtttggttttttagggattattttagtttgataattagtaatttttagttgtagaaggaggttttattaatgtagatagattttaaagtttttgttttaattcgtaaagaaatacgtttgtgatttttattaataatagttgttatttattaaatattttatgagttaggtattttgttttgggtttttaagtaatattatgtttaattttatagtaattttgtaaattggttagtattgttagatgaggatattgaattaagtagttaagtaatgtgtttggtagtaaggtttaggtttgaattttagtttatttgattttatatatttaattaatttgtgatttatttattttataaattagaataatatgttttgttttttttttgggggggaggggtgttttattaggagtggattaatgagaattcgtggtatgttatataagttttagaaataatattttttgttattttatatagttttttatatttttatgttttttgttttttttgtattagggatttgtaatttattagttttattataatagatttttttatttatttttttttagtgtagttgtttaatttattatttgtatttaatttataatatgttttaattttttttaaaaatattatttttagttgggtatggtggtttacgtttgtaattatagtattttgggaggttaaggtgggtagattatttgaggttaggagttcgagattagtttggttaatatggtaaaattttgtttttattaaaaatataaaaattaattgggtgtggtggtatgtgtttgtaattttagttatttgggaggttgaggcgggagaattatttgaattttagaggcggaagttgtagtgagtcgaaattacgttattgtatttttgtttgggagatagagcgagggaattttattttaaataagtaaataaataaaaatttaaaaaattattattttttaaaagttgtatatatttaatgtgtataatatgtatatgtatatagtgagatgattattatagttaagtaattaatatatttatttgtttatataattattttttttttgtgtgcggtgagagtatttgaaatttttttttgaaattttttagtataaaatatagtattgataattgtagtcgttatgttgtaaattagatttttagatttatttattttatttaattgtaatattttaggttttgattagtttttttttattttttttaattttttgtttttggtaattattattttattttttgtttttatgtatttgatttttttagattttatatattagtgagtttatgtagtatttttttatttggtttattttatttagtataatgttttttagttttatttatgttgttgtaaatggtaggattttttgttttttgtttgtttgtttgtttgagacggagtttttttttttttgttgtttagattggagtgtagtagtgtgattttagtttattgtaatttttgtttttcgggtttaggtgattttttagttttagtttttcgagtagttgggattataggagcgtgttattatattcggttgatttttgtatttttattagaggtagggttttattatgttggttaggttggtttcgaatttttgattttaggttatttgtttgtttcggttttttaaattgttgggattataggtgtgagttatcgtgtttggttaggattttttgttttaaggttgaataatattttattgtataaatatatgttataatttttttatttatttttttgttaatagatatttagattgtttttataatttggttattgtgtataatgttataacgaataaggaagtgaaggtatttttttaggatattgattttattttttttgggtaaatacgtagtggtgggattattggattatttggtatttttattaatttttttaaggaatttttatattgttgtttataatggttgtattttaaaatattatttaatattattatattattttataaaggatttttagaatggttattataggaatatatgaattaattattaattaaagtatatgtgtgaataagttggaaatgaaaaatagttttgaaaaaaagattttcgaatagtgaagaggtagggaaaagtaattaggtaggaattaggtggtaattagatatttgtagatagagttttttttttttaattagggtaataagtagtagtttttattagaatttgaaataaatggagaagttaggaatgaatttgaattaatttgatgaagagaaagaaggggcggatgaaggaggaaggtaaaataaggatttaaataaattggttaggatattagattgcgtttgagtatttgagagcggatggagcgttttgttcgtgttttttatggtttgtattagggttatgggagtatagtgtttttgggtagtttggatttttagggtataaatagttcgattggaggtaaaatatgggtttttttatttttttggttaggttagggttgttggtgttcgcgaacgtttttgattattgtattgatttttataagagggcgtagtttaaggttatttttttttagatgaattttagtttgagttcgcggttgtgtaagtttaatattaaggaggtgggcgtgtaggtgagttcgcgggtggataaggttgtgtagtgttttttggggtttcgtatttttagtagttgttttttttgggacggtagagatttttaggagtttttgttagtttgtggggttatttcgtttgtcgtcggtcgtaggggtttgattcgtttgcggagagatggggacgaagcggagagtaaggcgttttcgggttttgcggaggttagttagtcgtagttattattacggaggttaggagttgataggtaggaggagttcgggtagttggaggaatcgggggagaaagacgtttcgtgtttttaggagacgaagagtaagtaggtgtttggagacgtcgttttcgagtcgtttcggaggtttaatttttaggtagatttttttttttttttttttagttttcgattagttttattttttttttttttttttatttatgggggtaataagagtaaaattttttttttttttttttatgtatttggtgaaggagagggagttttgaaaatatgtatattacgtggtttgtatgtttggtaagttttgggtaaaataggtgttaatttaattaagtttgtgaaaattaatagtttggtaattattgttattggagaatttggagacgaagaagggtttcgagtttgtaatatatgaaattagattttcgttttgggaagattgtgtcggtagtattgtggaaaatggattggaaaagtataaacgatagtagtaagaagaattttagagtaatttttaagagagatgagaaattgaattaatgtcgtagttttgagaatagatataagtgaggttaaagaagttatttttttttttttatataaagttataaagaaggatttggtttttttttttttgtatgatggtaaagtattttttttttttatttttagtttttggaattaaaatatggttatttttattgtaaagattgtaagattaggtgggagagtgtttacgtgtggtgtatttttggaacgaataaggtaagtaaaaagagtaggaggtgagaggaggatggggtgggtacggatggtaagcggggaagaatttgatttttgagggagtatggttgttatagttttgttttgattttggtggtatttttagtgttaggtgtataggaagtgtttagtgaatgaatggaattgaat

SEQ ID NO: 227 - DNA, 18154 bp, Artificial Sequence
  chemically treated genomic DNA (Homo sapiens)
tttatttggcgttattaattttatagagggagtataaaatatttaataatatattggatttatttaatttattattttttattttcgtttttaagattattttaaaggaaatatggtttgaagattataatgaagtgttgtatgtgtttattattttattttaaatggtttataagtgaggtttgaaggaattttaggagttttatttagatatgatgtggaggtggagtaaattaggtattgagttaaaggggattagtgatagttagtttttgggagagttagatgaggtagagagttgggatagggtggatttatttttaggtttaggatatttagggtatattattgagtaggagtattaggtattatgatatagggttggtttgtgttaggataaagtaagtttttaatgggttttgaatttatagaaattttgtttgtgatgtttagatgacggttttattttttttgtagaagttagagtttttttagaaaaaaagtaatgattgaattatagttaatatttggagaatatttatatagttgtattttttatgtatttttaaaaattattaataaaattttattatgtattattattgatattttttttgttatatttattatttttatttaataatttatatgtttaaaaaatagtttatttttattgtatataatttagaagatgtagaaaagtatgaggaagaaaatgaaaattatttttatttatatttgtataatttatagataagtattttttatattgtattttttttagttttttttatatgtgtatatgataaaattaggaatatattaattttggtaggtaaaaaaatatatataatttaattaaatggttatttgggggaggaatttttaatttagaatttatggtatagggaagtttaggtaggttttattattttgtgtaggtggtatttttatttttattttatagatgaagaaattgaggttaatggagattaagtaatttgtttaaagttagatagttagtaagtgaatataaatttttgtgattttaaagattattttttgagattggttaatttttaattaaattttttagatatatagtttgattttattttttaattttttttgtagttaggtgtggttatgtggtatagttttttttagtggaatttgagtagaagtaatggatgttatttttaggattggtttataggaattttttatataaaatgttttatatttttttttttttgtgtgatggatatatgtttatgtttaaggagattttaaaagttatatgttgaggatggtagagtttttgttagtttgggtttttgaatgattgtatggagtagagtatttttgtttaatatcgatttttttttatttaaggtttattggattttatatgaggggaaataattagtaagtattattattttaattaaattatttaataagtaagtggtaaaattaggatttaaagttagttttttgtgattttataagtttgtgttttttttattatattattttgtttttttttgtagttaattaaattatagaaattgtgtttttttatatagtttgttttaaaaatatataagttatttaagaaagttttaatttagatatttttttttttgttagtttttatgttataaaaaaatatagttaattatattgtgttaattgatttatgttggttttatataatttatattgatttttagggtggtaataattagtttttgtgattggtgtgtatgtgtaagattttttgtttaatttattttttttgtggtttagttttgtaaatattggttttgggtggtcgtgaatagaagtttttattttagattgtatgtaatttattttattggtattgaaagtttttttttgtttttttttatttatttaagtaaatttataagttattttttgtttttttttttagtagttattttggtttttttaatgttgtttgtgtgtatttatgttgtatttatgatttggttttttttatattttgagatataatttaagtttttttttttttgagaatttatattgatgggttattttttaaatatttaaggtttgtattaaatattataatatttgttgttttttttttttatttttatttggtttatatattaagttttattatttttttaaggttaaaatttttttaaggatattaattgtaatgtgtataatttggtagttagcgtaatatttgatatagtgttttgtaaaaagaagatatttaattagtttttgaatgatttaaagagtaaaataatggtaattttttttattttttttatagtgtaatttttaatattttttaaataattattggttgaattttattattgtggtttagagttttttttgagatatttttgttaaggttttgaaataggttttaaattggtttatagtgatttttaaggttttataggagtggtttttaagttttagtttattgggttttatttttagagtttttgatttagtaggttttaggaaaggattaagaatatatatttttattgggtaatgaggaggttgttgttggtttagtagttatatttttagagttattgttttgtgagtttatggtattttatgattttcgttatattgatataatttttagttgattttagttttgtttattttattttaggtttagtttttttatatatattaggtatgtttttgtttagagttttgtttatgtggtttttttagatatttatgtatttgtttttttattttttttaggttattttttatatgttattattttagtgggtttttttataaaatttagttaaaaatggtaatatttttttttttttatacgttaattgatatatatatatatataaatatatttttttttttatatagtatacgtatatatattttttattatattttttttttgtaatgtttttttttatattatttatattatttgatgtattgtatgtgttatttttttgttttttttttatattgttttttttttgtttttagaatgtaagatttttgaggtagagattttcgtttgttttatttatttttgaattttagaattgagaatagtgtttggtatataaatatttaaaaagagtcggtattttaattgggtgattgtagggattataattttatttatttttagatcgtgaattataaagaagataagtttatagttgaagtgaattaagtacgattaatttagtatttatattgtttagatgtgtttggttagtatgagggtgtagaggaagatattttgaattttttagggttttggatagatggttattttgtttttattttttttatttataagatgaagttgttggatgatatattaatatttataatgttgtttttagttttaaaattttatgtttttatttttttttggatttttatggtattagaaggaaagttttaggatttttggatttgtgagtagattagttatagttttgagttgataaattttttttggtatttttattttttgattgttgttaataattttagtatagtaaaggtagtaaaattttattgggaatttttttttaattaaagttatagttttatagttgtgttgtttttttggttttgtgtgaagtaaaattttttttttgggttttaattggtgttaaatttaatattattatatttgcgttaatttagaagttaatttatttagtttgtatagaggaaatatttagaaattttgtttttttttgttgattttgatatatttgagatttgaatatataataatatataaaattatatgttataattttgggttttatgggttaagttataaattattttatatataaattttaatagagaaaaaatggtggatgttgaattttaataaaaaatttatgatagagaaatttaaaattgagaaaatttgattttatagtttaatttttgtaaattaagaagtattggtttattaattgtattttagagtatagagtggaagaaggttagtatagattggtatgtggttttatatttattagttgttatattttaggaggattatttaatttttttgtgttttagtttttttaattataaaatagaaatgatatgatagtatttaatttttagggttgttgagaggtttaaatgaggtgatataaataatatttttgaagtgggttaggtatttaattaagttttgattaatgttgtttattattatttattgttgaaggttggagtgagaggtatttagggaaaagtaagtttaggtaaaggagaaaaaataagaatattgtaggaaaaatggaaagatttataagaagggagaggaagaggtagtataaatatattggaggagttttatatgtttatttgatttaagatttgtttatttgaatttttagaaaatcgtttatttttgtttatatagagttttatttggtgtgtttatgttagggtgtaagagttgtttgtgtatttagatttttgagtaaggttgttttaaatgtttttttagggtatttgtttttataaaattttatagttgggttaggagtatttggattttgtaattagggattttttaagagtaattttttatattgagggggaaagtttaaaggtattttttttttttgttttgttatgtttttaagtaattttttataattataggtttgtaaaaaataagggttgggatagtttgaattttagggtttttgttgggtttattttgtttaatttgtttttcgttttaaggtgaattagtaatttttaaggtttgttgatatttttagagggttttttaagtatattttgtgtttggggttattgttttgagtatgtttttcgtatgttattgaattgtgtttgggttgtttttagggatattgatttttaggtaaatagataatgtttttgaaaaagtttgaattttgtttagtgttttagaatgatgaaaatcgaggttggaaaaggttgtgaaattttttaattttttatagtggagtttattattttttttggtttttttaaatttatatttataggtaagtaatttatatttgtttttgtaaatttatttttttttttttttaatttttattttgtggagtggagtgtttttggtttattaaatattggttttttgtttagtgtaaataacgttataatatttggatagaaatttataggatgtattaatgattttataatattgtatataatatagatgatttttggttgttgttttttttatagtaatgttattttatgtattaattttttagagagagagagagtggtgtatatgggtgtgtggtataaatggtcgaatagattgaataatttgtttaaagtaaaaatattagtgggttttttttttaatttggttttgtgaaagtataattttgtttgttttgataattatagatttaatgattataaattttatttttgaaagttggtttaatgtagaattatatcgattttattttttttttaatatcgtatttatttttttattgtttcggtttttaaaaatatagatgtaaaaaaaaatgagttgtggatgtatgtttagaggggagaaagtttgtttttaggatttaattttagtttttaggttatttaagttagtgggagttatatattgttaatggtttgagtatagagattaaatattatttatattttagattgggaataaaagatagtatttgttaatattttgagggggaatagttttttagagatgttagagataaattatagtggttatatttaaaattttttaatattaggagttagtagtggtttttattaaatatttgaagtgataatttatttatgagttgttgtttaatagaagtttttttttgtgggtaatttcgtttttttattgtttattttttttattttggttttttttgttgtgttttgtaatattgtgattgtttttggttgaagtttttatttttttgtttaggagtttttgtttatattttattttattttagattgtaagttttttgaataatttttgttttttagtattaagaataatggtgataaatattaggggatgatttttaaaaatggattaagaagttatttagggggaaaatgtttattttgtggttttaaaagatgttataattgttataaaatgtttaagttttattgtagaaattaaatattggagttgtgttttgtttggttaagaggaaagaattggtcgggcgcggtggtttacgtttgtaattttagtattttgggaggtcgaggcgggtggattatgaggttaagagatcgagattattttggttaatacggtgaaatttcgtttttattaaaaatataaaaaattagtcgggcgcggtggcgggcgtttgtagttttagttattcgggaggttgaggtaggagaatggcgtgaattcgggaagcggagtttgtagtgagtcgagattgcgttattgtagttcgtagttcggtttgggcgatagagcgagattttttttaaaaaaaaaaaaaaaaaaaaaaaaaaaagaggaaagaattgtatatttagagataaagaatcgttgtggtagttaattttggtgttatattttgttttttttttaagtaattttttagttttttattttaacggtgtttttgaagaaaggatttacgtggttaatgggattatcgtgtatttattttttttttttattagttatagtttttagggttggaagggttttattttagtttatttttagattgggttatttatagtgttgatatatagtattaatcgatagtgagtttatttggaaaataatgtttttttattttttttgttttttagtatatattaaatgtttttttttttttttaataattttttagataaagaaattatttgttgagttgataataataaaagtattttatttatatttttaaatgttagtagtgaaagacgttttaagggttttaaaaaaaaaaaaaagaaagaaaagaaaattgtagtttagaaaggatatttaaattgaagaggagtaggggtagttttgttttttttgagtagttttgtgaagggggagtttgtggcgttggggttttgaaagtttttatagagggtaagattttataagagaaaagtcgtggagggatttttatatgattagaatatttatagtgtgatgtggggtatggtgggggcgggtgttttttattttcgggtttggtttggttttttttattgtttttagttttttaatggttttgaggatatttagattttttttattattttggtttgaatgtggaaaaagttttttttttttaattaagtttagaaaaggttaatatgttttaaaaaatagtatttgggtggaaattaaatggaaagtggaataaatttttgtagagaaaatgtaaaattttagaatatagatagagttatttttgttttttggtttggtgggatttttattttttttaaatttattttttaatttttgtgggtgtgggttttaagttttaagttttattagggtaattttttttaagtataaatttgattatatttttttttgtttaaaagattttattagttttttatggtttttaggataaggttttaagtttttagtggtaaggattatgaggttttgaaggattaattagttatattttttcgagttgtttattcgtttttttgagatttattgggtttttttagttttggattcggttgttttgttttttgtatttgggtttttgtatgtgtttttttttgtttggattgttttttttttttttttttttatggaaaatttgtttttatttttaatattttatgttaagtatttgttttagagttttttttagttttttagataaggtagtttttttgtattagggtttaggagatgtttgtattttttttttttttattgttattttgtttgacgtttaattttttagataatgtttgttttttttgttatattgtaagttttatgagggtagggttggttggagggttggtgttttatataatttttagggtaggtaaattaggtttttagagatttttttttgggttttaggttgttttgaattgattttatagtatagggattgatattttttgtaaagagttgtatagtgaatattttaggtatgggagagagaaagggttatatattttgttattgtagtatagaagtagttaaagataatagaaaatgaaagggtatgattgtgtttttataaaattgtatttataaaataggatggtaatggtattttttagtttagaaggatttagttttggagatatttttttttaattttgattttttttttttttttaatttttttataatattaatagttaattgttagtattgattttagttattggtgaagattagtttgtttatttgttgttttaggttgatatttttattagtttatattagtagttttgttgtagtggtaagtagtgggtattgatattttatgtttttaggatttttgatttttttttggtatggtttgtagaattttgtattttttttaattttgatagttttaggatttttgtggtattatttatttaggtttatttttaaggttagttaaagtattaggtttttttaagtgattatttagttgatggttttttttttttatttttttttttttagtagtgaggttttttagaatgttgttgttagagtgtaagatagaaatatttttgatatgtttttattagtaattgttaggagattgttttttaatgtgcgtatttgtgttgataagattatatattttattaagagaaaattttaattttgaatagttaaatagaagcgtatatagtgtgtaggttatagattatatgttatttagtagagaggaatattggagttggtgtggataattaagaatttttgggggattttatgattaggtgtttaaagtttgttaattagtgtttagatatttcgattttttgttttttatttttagatttttttaagtttattggaaaatatatttttttggaatgttttgaaaatttttagtttgtttttgaagagattttggggaggttaaaataatttaatatgttaaagtgtatagtaaaaatgaaatagtattggatgttatttttaattttgagtttttttgtgttagtttaagtaaaattttgttattgtaaatttgttaagaaattttaattaaagttttttttaatgtatgaaatttaaattaagttattaggttaggtgttaaaaaagtgttatagttaatggtcgagatagtagaattaggtgatattatatttatttgtaattagtgaggaaaaataatgtggtaaaatattatggtatttttaaattatagaaagtgttaaatgaggaggaggtatatttttaagaatttgtaaaataaatatgtttattattaaaaattagatttttattgtatttttagggttttagagattggtagttatgttttttagtatttgatgtatgggttttttaatattttatttgataaaaaaaataatttgttagtggaagaaaatatggtttaataatatatattagatatatattttatatttataatgatatatggtaatttatttaatatttaattttgaaaattttttttgtggtaaatattataggtaaggtttttattttttttagaaatttcggttttttagtgtatttttttaaatttagtgttataaaatttttagtgtttttgtgggtatatgtaagtaattaagatttttagtataatggtttttaaaaattattatagtcgtttttaagttgtttaaagataaagggattagtttttatttttgattgaataattagtgtatgtttttagttttagagagtatatattttttgaagtatagttttttggtatgttaaaaaagaatagtggattattaaagtttagagtgatgtatttgatgttgagaaagaaaataaataaagaaaataaataaaagaatattttgttttattttatagttggtttggtatttatatttaagttatgttatttttttattagatataaataattttatagagtattaattttaaagttattttgagttaatgtaaggttaatttatattttgtttttagtaaaggtaaaattaaggttattgtgtaatttataaaatattaaatattttgttaaatgaatggttgttatttttttatttagttataatatagttttagttttttaatagtatttaatttagaataaatatttattatattagatttttttttaaattatttgattaaagttcgagttttgtaataggttttttttaatattattttattgagatgttttatagtttttgatagtgtgtttatttttggtgtaatgagtagtaaatacgatttgtttagttatagatgtatttttggtgtttattgattgaggggtattgataatgttgtgggtatagagacgtatgatttaatggatttttgttttttagaatgtaatttttaatagtaaaatagaaattataaaaattatttgtaggggtattcggaaagaagtaaaatgtaagtaattgaaatttaatgtatggaattgataaggggatatagaaggaaagtaaagagaataggttagtggattagtatttttgtgtttaatggaggatagattattataaatgattttggaagggtagatggggtggaggattaggtagggaggattcggtttttaagtttgaagggtaaagggaattttagttgttattttttttttgttggttgttgtagagatatagttttattttatttttatattagttttgtaaggtggattttattattattattattattttttgatatgaaagatggagaaattaggacgtggagagagattttaaaataaatttaattacgtagagtgaagtaataggtgtattaggatttgagagattttaaatttcgtgggtaagatattatattattgttttttaaatattacgaggtatttgtatattagtggaaagaaatttttttaaatggagagttaagttaagggaaaaaataaatggagattaaatttttttaatattgtattttaaaattaggaaatgtaataatatatttgtggttaaatgttgtttattatttttttattattaaagagtttttttgtttttttgaaaaaaaaatttggttaaaattttaaaaattgtgtaatcggtaaatgttatagtttttgaatataatattgttatagtgagtaaattttgtttttgaataaaataattttgaatttggtttttttagtatattttaaattagttttataaattatttaattaaataatattttttattttattttttaatatgttattaagggatattttataaaataagtgatgagtattttttaaaattgttaaggttattaaaaataaggaaagtatgagaaattgttatagttaagagttgtttaataagatatgataatttaatataatattataaatttggtattttagatggaattttggaatagaaaaggaattaggtgaaaaataagggaatttgaataaattatgtattttagttaataataatgtattaatattggtttattaatattaatgtaagatatttatagtgtatattggtacgttaatattaatgtaagatattaatattaataatgtaagatattaataattgggtgtggggtatatgggaattttgtattatttttataatttttttataaaattaaaattgttttaatttgtttaattaaaagagatttattagggttaagaaaaaaattattttttgttatgaagtgttttattttttgtaaaatgattttgttttatttaggagtggtatgttgtttaagatggaaaaatatatgatgatggtgtatagtgtttttattttaagtttgttaatattaatttttttgtggtattatttagttttttatatgtttttttttaagttttattttattttattttaagttttggggtatatatgttagatgtgtaggtttgttatataggtaaacgtgtgttatggtggtttgttgtatttattaatttattatttaggtattaagttcggtatgcgttagttattttttttaatgttttttttattgtttttttttaataggttttagtgtgtgttgtttttttttttgtgttttttgtatttatattatgaaatattttaaagttataggaaaaaaaagagaaaaatttaatgaatattaagttatttttttttaattttatcgtattttaaattttatgttatatttgttggaattttttgttttaagaaattaaaatatgtagatatagtttaggggttttttgagtttttttttagttttattttattttttttttttagaggtaattattatcgttaatttagtgtttattagttttaggtaagtttttatatttttattgcgtatttatatatttacgaatattataaatagtgatttgtaggtaatataatttatataaatggtattatatagtattattttgaaattttgttttgtttgtttaaatttacgtttgttgagatttatttatgttaatttattgattttaatggttagataatattttattgtgtgtttattttatagattattgaattaattttttgtttatttgtatttttttttagttttttgtttttaaagaagtattgtaataaataagtttatatatatttttgtatgtattttttgagttttaatttcggttgtattatttattaatttgtgtttttgagtttgtgatttagttttttatattttagtgtttttatttggaaaacggggatagttataatatttattttaggaggttgttgggaggttttatggtatagtatgtataaagtatttagaatagtgtttgttacgtattaaatgttattttattgttaattattttttaaattgttgaggaaaatattagagaaggatattttgggatttggggtattaatatgtttagttttgttagatatttttaaattgttatttaaagttatttagttaatttatatttttattagttgtgtatgaaaggatttttttttttatattttaataatattttgtattattggatattttatttttgttaatattttaatgaatagttttagtatttattgttgattattattttaaatttatttattagggttgtaaaataatgatttttttttaattttataggtttttaaaataggaatggataatgatttttattgaatattttttgtatttatgaaaatgattaattattttttattttaaataattattgtatttttgggattaatattgttttattttttttataaattgttgaattatgtttaatatattttatttattattttaaaatttgtttttagaagtaattataagtttatttttatttttttttgttttgatgttaaaattatatttgttttataaaatgatttgggtagttttttttatttttttttttattaaaattatttatataagattagaattatttattgtttgaagttttggtaaaatttgtttgtaatattatttagttttgttgttttttgaggtgggagatttttgaatattgaattaatattttaatagttattattttttaagttttttatttttttataaataaattttgataatttatatttttttagaaaattaattttaatttggtttttaaatttattattatgaaattatttagtatttgtttatgatttaaaattttatttattttattttttttatttttaattagtatttgtgatttatattttttttttttaatagttttattgatttgtatgtttttagtttttaaaaaataatttttgaattgatatattttttttattgttttttattttattttgttttttattttataaattttgtattttttaggtttttgattagaatataatttatttattaattttttaaaagtaaaatgtatttatttttataaataaattttgaagtatttttttagttgtagtttataagattttatatatttattattatattttaaatattttttatttttgttatgattttatttttaatttatatttatttgtatatgtattttaaagtttgtaatatatataattttattgagtatatgtgtgtgtgttttattagtgtttaattttttagtttttatttaattgtattgttagaatatatatttttaagaataataataatatagagaaatatatagttttttatttgtagaaattttttatggtttattaatgggtaagttttataaaaatgttaaatgtaattgaaaaatgttttggttgtaggttttatagtaatgaaatttgttatgaaaatttatcgatattgtgttataattataattaaatatatatttgattaaattaaatgaaattgttaatatttaatttttttttatttagaaagtttaattaatatatgaataatgtttaattaaattttaagaaaaattttatgtagtaaattatataaaattatttattttttatttgaaaagtttttatgttttttaattttttgtttgtttattagtttttaataaagttgtgtttaaattttttattatagttgtaggttatgttgtgttaggttgttgggtatatataatttaataattgatttgttttttagttggattgtatttttaattattatatgttttttattatatttattattgttttgaatatggattttatttttttgatattaatataatagttttgagatattagtatttgtatgacgtattttttttattttttaattttggattatttttatgattttataaattattttatttataataagtatatgtttggattggttgggtgtggtggtttatgtttgtaattttagtattttgggaggttaaggtagatagataattagaggttaggagtttgagattagtttggttaatatggtgaaattttatttttattaaaaatataaaaatgatttaggtatggtggtttatattcgtaattttagttatttaggaggttgaggtaggagaattatatgaatttaagaggtggaggttgtagtgagttaagattgagttattgtattttagtttgggtaatagagtaagatttggttttagaaaaaaaaaaaaagtgtatgttttgattttaaaaaatttaataaattgatttgtttttttttaaaaaatagttttttgagggtataatttatatattatagagtttatttatgtaaagtatttaatggtttttaatatattaatagagttgtgcgattattattataatttaattttagaatattttttttatttttaaaagaaattttatatttgttattagttattttttattttttttttatttttatttttattttagtattaggtaattatttatttattttttgtttttatagatttgtttattttggatattttatgtaaatggaattatatagtatgtggttttttgagatcgtttttttttacgtagtatgattttgaggtttatttgtgtagtatgtattagtattttaatttatatatatttatcgtaattattgaatcgtttggattatttttaataatatttatttatgttttttgtttgttatgttttttttagtttttttagttttttttaatttttgttggattgatgatattttttatatatttagtttttaattttttgtttatttagaaattatagattttattggtatttttttattgtttttttttaaaatttttagatattggttgaattttgtttagatattagttgaattttgtaattaaaaaatggttaaatattggtaattttttttggtttaattaaatatatatttaattatagttgtataaatatgtatttaattataattataaaataatgtttttagattgttataataatgaatttaatatattttatttgtatatcgaatattttattttgtgtttaagttatatttatatttatatattgtgtagagttttaattatgtttttttgaaatataaaaggttatatttggtattaatatttgattggtcgttttgatatattttgttaatttttgtgtttatttttgttttttttttttatggtttttttttggatattttttttggttaaggtatattttttagttgttgttttatgtaggtttgtaagtgtaaattttttgattttgaatgtttgtaaagatgttgaataattttttggtttagtgtaaaattttaagttaaagattattttttttttttattattttgaagatattacgttattgttttttagtttttattgttgatgagaaaatttttgttagtttgttttttatatttgaatatgtattttttttttttatagtgtttaggatggattttgtttatttttgatgttttattatagtttgatttttgaataatataggttgtaattgtggaggtttatttgtatggggattgtttttaattaattttagatgaaaaatatagtatttttaggatgtaaaattagtggatatgtagagttaattttttttatgtataagttttgtaagttaattgtaggatttgtgtatatttggattttggtatatgtaaattttggtatatatgggagtgttagaattaattttttgtatatattgagggatatttttatataatgtatttaagttttgattgatatttattttaattaatttttggtgtttattgttaatttgaagaattaggtaattgtttttggaaaatttttagtaattatttttttaattattatatttttgttattttttattttttgtttttgggattttaattaggtgaatttagaagatttttataatttttttttttttttttttatttgtatatgtgtgtatatatgtatgtaatatatattacggtttttttttgtgatttttatgggtttgtattttattataaggaatagatgttttaatggtggttagtagtttttttagggtttttttagtagtgtatggggtttatattagtttttttggttttaagcgaagagatggtttttagttttttgtttgatttggggtatttatagttttttcgttagttaaatttttatattcgttagtatttagacgttgaggggaaaatattagttgtttttgtgttttgtttatttttcggtatttttttgttatttttggtttttgaagatgtttatttttatttatttgagtttgattgtatttttttttaaaaatatgttatttattattgttatatatttgaagtagagaaagttagtgaagtataaattttatgttgaatcgagtgtttatattttggaatttttagtttgtattttttataaattaatttttttattgtgaataagattaattatgattttgtcgatatttatattttatttagaaaatgttttttttttgtttttttgatttaagtttgatttattttattttgaggttgtatttataaaggaatattgaaggttatttaatagtatgtgggtgtcgtttattaattatagtgatttaagaatattattagttggtttgttttttttatggttttaatgtttttttattaaaaataaataaagtatagataagtagaaagaataattatttatttaataattagaggaaaatttattaatggttttgttttattttttttataattaagttataaaaaataattatttatgtaataattagagaaaatttttattaatgattgtggtttattttttttgataattaggtttttttagggagttattaatcgattttaaaatttttgtttgagattgattagtaaagattattttttgaattaaattgttttttcgtttggttattttgattaaagaagaaagaagagataataattgtaatgatttt

SEQ ID NO: 228 - DNA, 18154 bp, Artificial Sequence
  chemically treated genomic DNA (Homo sapiens)
agaattattgtaattattatttttttttttttttttaattaaagtagttaaacgaaagaataatttggtttaagaaataatttttattaattaattttagataaaagttttaaaatcggttaataattttttgaaagagtttaattattaggaaagataagttatagttattgataaaggttttttttagttgttatatggatggttgttttttatagtttaattataggaaagataaagtaaaattattgataaatttttttttagttgttggatggatggttattttttttgtttatttgtgttttatttatttttaatgagaaaatattaaaattatgagaaaggtaaattaattggtgatatttttgagttattgtagttgatgaacgatatttatatattgttgggtaatttttagtgtttttttgtaaatgtaattttaaggtaaggtgagttaagtttggattaaaggaatagaaggaagatattttttaaataaaatgtaaatgtcgatagagttatgattagttttatttatagtggaaaaattagtttatagagggtataggttgagaattttaggatatagatattcgatttagtatgaagtttatgttttattaattttttttgttttaaatatatagtaatggtggataatatgtttttaaaaagagatatagttagatttaaataaataaaaataaatatttttaggaattagaaatggtagagaagtatcgaagagtaagtagagtatagaagtagttggtattttttttttagcgtttggatgttgacgagtgtgagagtttagttggcgagaggattgtaagtgttttaaattaaatagggggttagagattattttttcgtttggagttagaggagttaatgtgggttttatgtattgttgagaagattttgaggaaattgttggttattattgaagtatttattttttatgatgaaatgtagatttatggaggttataggaggagatcgtgatatgtattatatatatatatatatatatgtataaataaaagagagaaagggggagttatgaaaattttttaaatttatttaattggaattttagaagtagagagtggagaatgatagaagtgtaataattaaagagataattgttaagaattttttagaagtaattatttgattttttaaattaatagtagatattaagaattgattggaatagatattagttaaaatttagatatattatatagaaatgttttttagtatatgtaggagattggttttagtatttttatgtatattaaaatttgtatatattaaaatttaggtatatataagttttatagttggtttgtagaatttgtgtataggaaaaattggttttatatatttattggttttgtattttgagaatattatattttttatttgagattggttgaaaataatttttatataagtggatttttatagttgtaatttgtgttgtttaagaattaaattgtagtaaagtattaagaataaataaaatttattttaaatattgtgaaaggggaaaatgtatatttaaatataaagaatagattgatagaagtttttttattagtaatagaggttagaaaatagtggcgtaatgtttttaaagtgatgagaaaaaaaagtaatttttaatttagaattttatattgagttaaaaaattatttagtatttttatagatatttaaagttagagggtttatatttatagatttgtataaaataataattagaggatgtgttttagttagaaggagtatttagaagggagttatgaaagagagaaataagggtgagtataagagttaataaaatatgttaggacggttaattaaatattgatattaagtataattttttatattttaaaagaatataattaaaattttatatagtatgtagatatgagtgtaatttgaatataagataaggtgttcgatatgtagataaagtatgttaagtttattgttatgataatttgaggatattgttttataattataattaaatatatatttatataattataattaaatatatgtttgattaaattaaaggaaattgttaatatttaattattttttaattataaagtttaattaatatttgaataaagtttaattaatatttgaaaattttaagaaaaagtaatgaaaaagtattagtaaaatttatagtttttaaataagtaaaggattaaaaattaagtatgtagaaaatgttattaatttaataaaagttaaaaaaaattaaagaaattaaaaaaagtataataaatagaaaatataaatgaatattattgaaaatagtttaaacggtttagtaattacggtaaatgtatgtagattgaagtattgatatatgttatatagatgaattttaaaattatgttacgtgaaagaagacggttttaaaagattatatattgtatgattttatttatatgaaatgtttaagataggtaaatttatagggatagaaaataaataagtggttgtttaatgttggggtaggggtaggggtgggaggggaatgaggagtgattggtaatagatataaggttttttttggggatgaagaaaatgttttaaagttagattatggtgatggtcgtataattttgttaatatattgaaaattattgaatattttatataggtgaattttgtgatatgtaaattatatttttaaaaggttgttttttaaaaaaagataggttagtttattgaattttttaaagttaagatatatattttttttttttttttgagattaagttttgttttgttgtttaggttggagtatagtggtttaattttggtttattgtaatttttattttttgggtttatgtgatttttttgttttagttttttgagtagttgggattacgggtatgagttattatgtttggattatttttgtatttttagtagagatggagttttattatattggttaggttggttttaaatttttggtttttgattatttgtttgttttagttttttaaagtgttgagattataggtatgagttattatatttagttaatttagatatatatttattataaatgaaataatttataaaattataaaaatggtttaaaattaaagggtgaaaaggatacgttatgtaaatattgatgttttaaagttgttatgttaatgttagaaaaatagaatttatgtttaaaataataatggatataataaaggatatataataattaaaagtataatttagttagaagataaattaattattggattgtatatatttagtaatttaatataatatagtttgtaattgtaatgaaaaatttaaatataattttattagaaattgataaatagataaaaaattagaaaatataaaagttttttaaataaaaaataagtaattttatgtaatttattatataaaattttttttaaaatttggttgaatattgtttatatattagttgaattttttaagtaaaaaaagattaaatgttggtaattttatttgatttaattaaatatatatttaattataattgtaatataatgtcgatagatttttatgataaattttattattatggaatttgtaattaagatattttttaattatatttggtatttttataaaatttatttattaataagttataaaaaatttttataaatgaaaaattatgtatttttttatattgttgttatttttaagggtgtatattttgataatgtaattaaataaaaattaaaaaattaaatattagtaaaatatatatatatatatttagtaaaattgtgtgtgttataaattttaaaatatatatgtagataaatatgggttaaggatgaaattatgatagaaatagaaaatatttaaaatatggtgataaatatgtaaaattttgtgggttatagttaaaaagatattttaagatttatttataaagataaatgtattttgtttttaagagattaatgaatgaattatgttttaattaagaatttaaaaaatgtaagatttataagatagaaaataaaataaaatgaaaaatagtagaaaggatatattaatttaaaagttgttttttgaaaattaaaaatatgtaagttaataagattgttgaagaaaagagatataaattataaatattaattgaaaatgggaaaggtaaaataaataaagttttaaattataagtaaatattaagtaattttatggtagtaaatttgaaaattaggttaagattaattttttagaaaaatatgagttattaaaatttgtttataaaggaatagaaaatttaaaaagtaatggttattaaaatattgatttaatatttaaaagttttttattttaaaaaataatagggttagataatgttataggtaaattttattaaaattttaaatagtagataattttaattttatataaatagttttggtgaaaagaaaaataagaaaagttatttaaattattttataaagtaagtataattttgatattaaaataaagaaggataaaaataggtttataattatttttgaaaatagattttaaaatgataaataaaatatgttaaatataatttagtagtttatgaaaaaaatgaagtaatgttgattttaggaatgtaatgattatttaaggtaaaaaataattaattatttttataaatgtaaaaagtatttagtaaaaattattatttatttttgttttgaaaatttataaaattaaaaaaaaattattattttgtaattttaatgaataaatttggggtaatgattagtagtgaatattaaaattatttattgaaatattggtaaagatgaaatatttagtagtataaagtgttgttaagatgtggaggaaagagtttttttatgtatagttaatgagaatataaattgattgaatgattttggatagtaatttggaaatatttagtaaggttaaatatgttaatattttagattttagaatatttttttttggtattttttttaataatttaaaaaataattaataatgaaatggtatttaatacgtggtaggtattgttttaaatgttttatatatgttatgttataaaattttttaatagttttttgagatgggtattatgattattttcgttttttagataagggtattaaagtatgaaggattaagttataagtttaagagtataagttagtaagtgatatagtcgagattgaaatttagaaaatgtatgtagagatatgtgtaagtttgtttattgtagtatttttttggaaataaaaagttaggagaaaatataaatgaataagagattgatttaataatttatagaatagatatatagtggaatattatttagttattaaaattaatgaattggtatggataaattttaataaacgtaagtttaaataaataagataaagttttagaatgatattgtatgatattatttatgtaaattgtgttatttgtaaattattatttgtaatgttcgtagatatatagatacgtagtagaaatataaagatttatttgaaattgataagtattgaattaacgatagtggttatttttgaggaaaagaagtggaatgagattggggaggggtttagagggtttttgaattgtatttgtatgttttaattttttaaaataaaaagttttagtaagtatggtatagggtttaagatacgataaagttggaaggaggtaatttggtgtttattaagtttttttttttttttttttgtggttttaaaatattttatgatatggatatagggagtatagggaggggaataatatatattggggtttattgggggagggtagtggggagagtattaggaaaaatagttaacgtatgtcgggtttaatatttaggtgatggattgataggtgtagtaaattattatggtatacgtttatttatgtaataaatttgtatatttggtatgtgtattttagaatttaaaataaaataaaataaaatttaaaaaagaatatatggaaagttggataatgttataaaagggttaatgttagtaagtttgggatggaggtattatgtattattattatgtatttttttattttaagtagtatattatttttaaataaaataaaattattttgtagaaaataaaatattttatgatagaaaataattttttttttaattttggtgaattttttttaattaaataaattagagtagttttgattttatagaaaaattgtgaagatggtataaaatttttatgtattttatatttagttattaatgttttatattattagtattaatgttttatattagtattaacgtattaatgtgtattgtaaatgttttgtattagtattaatgaattaatattgatatattattattagttagagtgtataatttatttaaatttttttattttttatttaattttttttttgttttaggattttatttaggatattaagtttataatgttatattaagttgttatattttgttaagtaatttttggttatgataattttttatattttttttgtttttaatgattttggtagttttgaggagtatttattatttattttgtagaatgttttttaatagtatattaagaagtagagtaagaaatattatttaattaagtagtttatgaggttggtttaaaatatattaaaggaattagatttaaagttattttatttaagaataaaatttgtttattatagtagtattatatttagagattgtaatatttgtcggttatataatttttgaagttttaattaaattttttttttaaaaaaatagagagattttttaataatgagaaaataataaataatatttaattatagatgtgttattgtattttttaattttaaaatataatattaaaaaaatttagtttttatttatttttttttttggtttagttttttatttaaaaagatttttttttattggtgtgtaaatatttcgtagtatttagaggatagtggtgtagtgttttgtttacgaaatttggagttttttagattttgatatatttgttgttttattttacgtagttggatttattttaaaatttttttttacgttttgatttttttattttttatgttaggaagtggtggtgatggtggtaaaatttattttgtaggattggtgtgaagatgaaatgaaattgtatttttatagtagttagtaaaagggagatagtagttgaagttttttttgttttttaagtttaaagatcgagttttttttatttgattttttattttatttgtttttttagggttatttgtagtaatttgttttttattaagtataggaatattaatttattaatttattttttttattttttttttgtgtttttttgttaattttatatattaggttttaattgtttatattttgttttttttcgaatatttttataaatagtttttgtggtttttattttattgttaaaagttatattttaaaaggtaaaaatttattaaattatgcgtttttatgtttatagtattgttaatgttttttagttagtgagtattaagaatatatttgtagttaaataagtcgtgtttgttatttattgtattaagggtgaatatattgttaggggttgtggggtattttagtaaaatggtgttagaaagaatttgttatagaattcgggttttagttagatgatttggggaaggatttaatgtagtgggtatttgttttaaattggatgttgttaaaaagttgggattatgttatgattagataaagaaataatagttatttatttagtaaggtgtttggtattttgtgggttgtatagtgattttgattttgtttttgttgagaataaagtataaattgattttgtattgatttaaagtaattttgaggttggtattttgtgagattgtttatgtttaataagagaataatatggtttaggtgtgagtattaggttagttatgaaatggaatagggtgtttttttgtttgttttttttgtttgtttttttttttagtattaagtgtattattttgaattttggtagtttattgtttttttttgatatgttaaggagttatattttaaaagatgtatattttttagggttaaaggtatgtattggttgtttagttagaaatggaagttagtttttttatttttgggtagtttagaaacggttgtgatgatttttgaaggttattgtgttgaaaattttaattatttgtatgtatttataaaaatattgggaattttataatattaagtttgggaaagtatattgaaaaatcgaaatttttagaaagaatgaaggttttgtttgtgatatttgttataaaagaggtttttagaattgaatattagatgaattgttatgtattattatgaatgtagaatatatatttgatatatattattagattatgtttttttttattggtaaattattttttttattagatgagatgttgggaaatttatatattagatgttggaggatatggttgttagtttttgaaattttggaaatgtagtgggaatttagtttttggtgataaatatatttgttttgtaggtttttgagagtgtattttttttttatttggtattttttatgatttaagagtattatggtgttttgttatattatttttttttattgattataagtagatataatgttatttagttttattgtttcggttattagttgtaatatttttttagtatttaatttaataatttgatttgagttttatatattgaaggaggttttaattagggttttttaataaatttataataataaaattttatttaaattaatataagaaaatttagagttgaaaataatatttaatgttattttatttttattgtgtattttaatatattaaattattttaatttttttaaaatttttttaggaatagattgagaatttttaaggtattttagaaaaatgtattttttaataaatttaagggaatttaagagtaaaaagtaggaaatcgagatgtttaagtattagttggtagattttggatatttaattatagaattttttaagaatttttaattgtttatattaattttagtgtttttttttgttaagtgatatgtggtttataatttgtatattatatgcgtttttgtttaattatttagggttgaagtttttttttgataaaatgtgtaattttattaatatagatacgtatattagagaatagttttttgataattattggtaaaaatatattaaagatgtttttattttatattttaataatagtattttgaaagattttattgttggggaggaggggatggggaagagagattattagttagatggttatttgagagaatttagtattttgattgattttaaaaatgggtttgaatgagtagtattataaaggttttgaggttgttaaaattggaggagatatagggttttataagttatgttagaaagaaattaaagattttgagagtataaaatgttagtgtttattatttgttattatagtaaggttgttagtgtgaattggtggggatgttagtttggagtaatagatggataggttgatttttattaatggttgggattaatattagtaattggttattggtattgtagaagaattgaagaaaaaaaaagggttagggttgagaaaaggtgtttttagagttgaatttttttgggttgaaagatattattattattttattttataaatatagttttatgggaatatagttatatttttttattttttattatttttggttgtttttgtgttatagtgatagaatgtatggtttttttttttttttatatttaaaatatttattatatagttttttgtagaaaatgttaatttttgtattgtgagattagtttagggtagtttgaggtttaggaagaaatttttgaggatttgatttatttattttaaaaattgtgtggagtattagttttttagttagttttatttttatggaatttataatgtggtagggaaggtagatattatttgggaaattaggcgttaagtaggatggtagtgaggaaaggggaaatataggtattttttgggttttgatgtagaggagttgttttgtttagagagttggagaaggttttggagtaagtgtttagtatgagatgttgaagatgagagtaagttttttatgggaagaggagagggaagagtagtttaggtagggaaggatatatgtaaaggtttagatgtaagagatagggtagtcgggtttaaggttgaaggagtttagtgaattttagggaggcggatgggtaattcgggaggatgtggttggttgattttttagggttttatgatttttattattgagaatttgggattttattttaaaggttatgggaagttaatgaagttttttaggtaagaaaggatatgattaaatttatatttaaaaaaagttattttgataaggtttgggatttggagtttatatttatagaggttaggaaatgggtttgagaagaatagagattttattagattaagaggtagagatggttttgtttgtgttttagggttttgtattttttttgtagagatttgttttattttttatttaatttttatttaaatgttattttttgaaatatgttgattttttttagatttaattaaggaaaaagagttttttttatatttaggttaagatggtaagaagaatttaaatgtttttaaagttattgaggagttgaggatagtgaggggaattaagttaggttcgggagtggagagtattcgtttttattatgttttatattatattgtgaatattttgattatgtgagggtttttttacggttttttttttgtgaagttttgttttttgtaaagatttttaagattttagcgttataaattttttttttatagagttgtttagagagaatagaattgtttttgtttttttttaatttggatgttttttttaaattatagttttttttttttttttttttttttttttaaagtttttaaaacgttttttattgttgatatttaaaaatgtaggtaggatatttttgttattattagtttagtaaatgatttttttatttaaaagattattagagaaggaaagaaatatttaatatatgttaagaaataaagaaaatagaaaggtattattttttagataagtttattgtcggttgatgttgtgtgttaatattgtgggtgatttagtttgggaatagattaaaatgaggtttttttagttttgagggttatggttgatagggaagggaaataaatatacggtgattttattggttacgtaagttttttttttagaggtatcgttgaggtagaggattaaagaattgtttaggaagaaaatagaatgtaatattaaagttaattgttatagcgattttttgtttttaaatgtatagttttttttttttttttttttttttttttttttttttttgagaggagtttcgttttgtcgtttaggtcggattgcggattgtagtggcgtaatttcggtttattgtaagtttcgtttttcgggtttacgttatttttttgttttagtttttcgagtagttgggattataggcgttcgttatcgcgttcggttaattttttgtatttttagtagagacggggttttatcgtgttagttaggatggtttcgattttttgattttatgatttattcgtttcggttttttaaagtgttgagattataggcgtgagttatcgcgttcggttagttttttttttttgattaagtaaaatataattttagtatttgatttttgtaatgaaatttgggtattttatggtaattgtagtattttttaaaattataaaatgggtattttttttttaaatagttttttaatttatttttaggagttattttttaatatttgttattattatttttggtattaggaaataaaaattatttaaggggtttgtaatttagagtggggtggagtgtaaatagaagtttttagatagggaaatggaggttttaattagagataattatagtgttatagagtatagtagggggaattaaggtgaggggggtgagtagtgaggggacgaggttgtttatagaaaagaatttttattaaataatagtttataaataagttattattttaaatgtttaataaaaattattattaatttttaatattaaaaagttttaggtataattattataatttgtttttaatatttttaaaaagttatttttttttaaaatgttgataaatattgttttttatttttagtttgaagtgtgaataatatttgatttttgtgtttaagttattagtaatatgtgatttttattggtttgggtgatttaaaaattgaaattagattttagaaataaatttttttttttttaaatatgtatttatagtttatttttttttgtatttatatttttgaaaatcgggataatgaagaaatgagtacggtgttggagaaaagataaagtcggtgtagttttgtattaaattagtttttaagggtagaatttgtgattattgaatttgtgattattagagtaaatagaattgtgtttttataaagttaagttaaaaaagaagtttattggtatttttattttgagtagattatttaatttattcggttatttgtattatatatttatgtatattattttttttttttttaagagattgatatatgaaatagtattgttataaagaagatagtaattaagagttatttgtattgtatataatgttgtgaaattattaatgtattttgtaagtttttatttaagtattgtagcgttgtttatattggataagagattaatgtttaataaattagaaatattttattttataaagtaagagttaaagggaagagggaatggatttgtagagataagtataagttatttatttgtgaatatgaatttgaggaagttagaggaaataatggattttattgtggagagttaaaaggttttataattttttttaatttcggtttttattattttaaagtattgaatagaatttaaatttttttaagaatattatttatttgtttaaggattaatgtttttaagggtagtttaagtatagtttagtgatatacgagaaatatatttagagtaataattttaaatatagagtgtgtttgggaaattttttgagggtgttaataggttttggaaattgttgatttattttggaacgagaggtaaattgagtagagtgggtttagtaagagttttggaatttaggttattttaatttttattttttataggtttgtagttgtgaaaagttatttaaaaatataataagataaaaaaaaaaaatatttttaaatttttttttttaatataaaagattgtttttggaaaatttttggttgtaggatttagatgtttttggtttagttatagagttttgtggagataaatattttaaaagaatatttgaaatagttttgtttaaaagtttgagtgtatagataatttttgtattttggtatggatatattagatgaagttttgtataagtaaagatgaacgattttttaaaggtttaaatgaataggttttgagttaaataagtatgtggagtttttttaatatatttgtgttgtttttttttttttttttttgtgaatttttttattttttttataatgtttttatttttttttttttgtttgagtttatttttttttaaatgttttttattttagtttttagtaatgaataataataggtaatattggttaagatttggttgggtgtttggtttattttaaaaatgttatttgtattattttatttgggttttttaatagttttaggagttgggtgttattatgttatttttattttatagttggggaaattgaagtatagagaggttaaataatttttttaaggtgtaataattagtagatgtgaagttatatgttagtttgtgttaatttttttttattttgtgttttgaaatgtaattgatgggttagtgttttttaatttgtagaaattaaattgtaagattaaatttttttaattttaggtttttttgttataaattttttattaaaatttagtatttattattttttttttattggaatttatgtataagatggtttatgatttagtttataaaatttaaaattataatatataattttatatgttattatatgtttaaattttaaatatattaaggttagtaaagaaaagtaagatttttagatgttttttttatgtaaattgaatgggttgatttttgagttgacgtaaatgtagtaatattggatttggtattaattaggatttaggaaaaaaattttgttttatataaaattaaaaaggtaatatagttatggggttgtagttttgattgggaaaagatttttaatagaattttgttatttttgttgtgttgaagttattgatagtagttaaagggtaaaaatgttaagagaaatttgttaatttaggattatagttgatttgtttataggtttaagggttttaagattttttttttggtgttatgaagatttaagggaagataaaagtatagagttttagagttagaaataatattgtaaatattgatatattatttaataattttattttatagatgagaaaagtgaagatagagtggttatttgtttagggttttggagagtttagggtgtttttttttgtatttttatgttggttagatatatttgggtagtgtgagtattgagttgatcgtgtttaatttattttagttataagtttgttttttttatggtttacggtttgaaaataggtagggttgtggtttttatagttatttaattaaaatatcggttttttttgaatgtttatgtgttaaatattgtttttagttttgggatttaggaatgaataagatagacgagaatttttgttttaggaattttatattttgggggtagggagggggtagtatagagaggagataaagaagtaatatatataatatattagatggtgtaaatggtatggagaaaagtattgtaggaaagggatatgatagggagtgtgtgtacgtatgttgtgtgagagagagagtgtgtttgtgtatgtgtgtgtgttagttagcgtgtgaggggagaaggatgttgttatttttaattgggttttatggaagggtttattgagatggtgatatatgaggaatgatttgagggaggtaaaggaataagtatatgggtatttggggaaattatatgggtaaagttttgggtaggagtatgtttggtgtatgtaaggaagttgaatttggagtggagtaagtaagattgaagttagttggggattatgttagtgtggcgggaattatggagtgttatgagtttatagggtagtggttttgaaagtgtgattattggattagtagtagtttttttattatttagtaggaatgtatgtttttggtttttttttgagatttattgaattagaaattttgggagtggggtttaatgagttgaagtttgaggattatttttgtagagttttggaggttattgtggattaatttggaatttgttttaaaattttagtaaaaatgttttagagaaagttttaaattataatggtagaatttagttaatagttgtttaaaaaatattgaagattgtattatggaagagataaaagaagttgttattattttattttttgaattatttaaaaattgattgagtattttttttttataagatattatgttaaatgttacgttggttattaagttgtatatattatagttagtgtttttgagaaagttttaattttaaaaggataataaagtttagtatataaattaagtaagaataaaaaagaagaatagtaaatgttataatgtttgatgtagattttaagtatttaaaaagtgatttattagtatggatttttaaagaaggaaggatttgagttatattttaaagtatgagagggattaggttataaatatagtatgagtgtatataggtaatattgaaaggattaagatggttgttgagagaagaggtaaaaagtggtttgtaaatttgtttaagtaggtgaagaaagataaagaagggtttttagtgttagtaggatgagttgtatgtagtttaagataagaatttttgtttacggttatttagggttagtgtttataaagttgagttataagaaggatgggttaggtaggaagttttgtatatgtatattaattatagaagttggttattattattttgaaaattaatataaattgtgtaaagttagtatgagttagttaatataatataattggttatgtttttttgtggtatagagattagtagagagaaaaatgtttaaattagagtttttttaggtagtttatgtatttttaaagtaagttgtgtggaaggatataatttttgtagtttagttgattgtagagggaggtagaatggtatagtgaaaagagtataggtttgtgaagttataaagaattggttttagattttggttttgttatttatttgttggatgatttggttaaggtagtgatatttgttaattatttttttttatgtgaagtttagtaggttttgaataaggggaaatcggtgttgggtaaaggtgttttgttttatgtagttatttagagatttaggttgatagaagttttattatttttaatatgtggtttttaaggtttttttggatatggatatgtatttattatatagggaagagaaaatatggagtattttgtatggaaagtttttgtgggttaattttggaagtggtatttattatttttatttagattttattggagaggattgtgttatataattatatttaattgtaagaaagattggaagataaggttaggttgtgtgtttgggaggtttagttaaaagttaattaattttaagagatggtttttgaaattataaaggtttgtgtttatttattagttatttaattttggataagttatttaatttttattagttttagtttttttatttgtaaaatgggagtgagaatattatttgtataggatgatgaggtttgtttgaatttttttgtgttatagattttggattgggagttttttttttaagtagttatttaattgaattgtgtatatttttttatttattaaaattagtgtatttttaattttgttatgtatatatgtagaaaagattggaagaagtataatataaaaagtgtttatttgtaggttatgtaaatgtgaatgagggtggtttttatttttttttttatgtttttttgtattttttaaattatatataataagggtaaattattttttaaatatataagttattaaatgaaaataatgaatatgataaaggaaatattaataataatgtataataaaattttattaatgatttttagaaatatatagagagtataattatgtgggtgttttttaaatattagttgtagtttagttattgttttttttttgggaaaattttgatttttgtagaagggatggggtcgttatttggatattataagtaaagtttttgtggatttaaagtttattaagaatttgttttattttaatatagattagttttgtgttatggtatttgatgtttttgtttagtggtgtgttttgaatgttttgaatttggaggtagatttattttattttagttttttgttttatttggtttttttaaaagttggttattattgattttttttggtttagtgtttagtttgttttatttttatattatgtttgggtagggtttttggaatttttttaggttttatttgtgggttatttagagtaaaatagtgggtatatataatattttattatggtttttaaattatgttttttttaagatgattttaaggacgaaagtaagaaatagtgagttgagtaagtttaatgtattattaaatgttttatgttttttttgtagaattaataacgttaaataag

SEQ ID NO: 229 - DNA, 7498 bp, Artificial Sequence
  chemically treated genomic DNA (Homo sapiens)
tattttttggaaaaacggattttttaagagaaaatgataggtattttttagtgataaagtgtagtatgtttattttatagggtagtttattttttgataaattttgattatttgttttgagtttgtttttaattagtgtttgatatggtatggttgcgtttttaattaaattttattttgaattgtagtttttataatttttttatgttatatgagggattcggtgggaggtaattgaattatgggggtgggttttttttatttttataatagtgaataagttttataagatttgatggttttataaagaggagtttttttgtataagttgttttttgtttattgttatgtaagacgtgtttgttgttttttgttaaattatttagttttaggtatgtttttatttgtagtgcgataatgaattaatattgttttttatgtttttttgtgtttgtaaaaataattagttaaaggttattagtttatttgagggaaattttttatattaaagttagttattaaaatggaaataaggtatttaaaggaaatagatattggtagaagaaaatttaaaagaaaaatgaaaaatttatatttgtaataaaagttttagaaatatttataaaatagtaagagaagattataaaaagtaaaaagatttgaacgtgtagaatataattgtatatataagtatatatatatatatatatatatatatatatatagtataaatttaaaaaagtaatagagaagttggaagataatgataaatttatatttaagaaagtataagaagataaagaaaaaaggtgaaaatatagaaaattaaagattaggaagtttaataaggaaattatttttatatgagtaataggaattttagaaagagaaaatagaatttggaggaggggaaattattaaaaaattgagaaaatattttagtatttaaagatatgagtttgtaggttaaaagggtttatggattgtttagtataatgaaaaataattatttttgtttaattttatttttgaaattttatatttttaagaatagaaggaaattttgaaaatttttagatagaaaaaaaataggttaaagaataaaaaataaaataaataataataaaaaaggttaaataaataggaataggaaaatgggtttagattttttaatagtaatatagaaaataatggaatatagtttttaaaattttgaagggaaatgttttttaatgtaaaaatgtatttaattaaatttttaattaagtatgaggttagaataatgatattttgaatttttatgtaaaaattttagatatttaattaaatttttaattaagtgtgaaggtagaataatgatattttgaatttttatgtaaaaaattttagaaagtttagtttttgtgtatttttttaagaagttattggaagatgtgttttataaaataagaaagaggaggatgtgagatttagttgtattagttcgtttttatgttgtttataaagatatatttgaaattgggaatagaaagagggttaattggatttatagttttgtatggttggggaggttttagaattatggtatgaggtgaaaggtattttttatatggtagcggtaagagaaaaatgaggaagaagtaaaagtggaaatatttgataaatttattagattttgtgagatttatttattattattagaatattagaatagtatgggaaagatcggtttttatgatttaattatttttattttgtttttttatttttattttaatttagtttttttttataatacgtgggaattttgggagatataatttaagttgagatttgggtggggatatagttaaattatattattttatttcggtttttttaaattttatatttttatattttaaaattaattatgtttttttaatagttttttaaagttttaattttaatattagtttaaaagtttatagtttaaagttttatttgagataaggtaaatgttttttgtttatgagtttgtaatattaaaagtaagttagttattttttagataatgattatttttagggtaaataagaggtttataataaataaaatgttataatgttttaaatagaataatgttttaaatagaaatattaagaaatagtatataggtattgtattagtttgtttttgtattattatagatatttgaaattgtttatttataagaaaaagaggttgaattggtttatagttttgtaggttgtaggaagtatagtggtttttgtatttggagaggttttaggaagtttttaaatgtggtggaaggtaaagggggagtaatgggttttatacggtggtagtagggagtaagagagagggaggaggtgttatatatttttttttttttttttttttttttgagatagagttttattttgttattaggttggagtgtagtggtgagattttagtttattgtaattttcgttttttaggtttaagcgatttttttgttttagtttttcgaagagttgggattataggcgcgtgttattacgtttagttaatttttgtatttttagtatagatggggttttattatgttggttaggatggtttcgattcgtgatttttaatatattttttatattagttttttaaattgttgtgattataggtgtgagttacggcgttttgttagtgttatatagtttaaaataattagattttatttattattatgagaatagtaataaggggatggtgttagattatttttgagaaatttatatttatgataaaattattttttattaggttttatttttaacgttggggattataattttatattagatttggtgggacgagttatgttagggatgttttaaaattattaaattaaagggaaaagttaggttgggaattgtttagggtaaatttgttttttattttatttaaagttatttagttgtttattgagatatatgtatattttgatggttttttttggaaaggtttattagaaatttaaaagaaggtaattatttgttttttatttatttgtgatttggaagtttttttcgtgtttcgagttgttttcgtttttttggatagaattaatgtattttttatatatattgattgatattttatgtttttttaaaatgtataaaattaagttgtgttttgattattttgggtatatgtcgttaggattttttgaggttgtgttatggatacgtgtttttaattttgttaaaataaattttttaaattaattgagatttgttttaaaatttgcgggtttatatatgttatttagaaatatggaagtaaatataggaataaaatttgaaagaattaaaaatgtttttttttggaaagtggatttaatttaaggaggaattgaataggagaatgcgggttttggttatagaaaaaaagagatttaaataaaatagtagagaatatttgttttgtttttttttgtgtttattaagtgtttgttaggtatttaaagtttattgttgttattattgtaagaattgaggatttgggtttttacgtggtattttattaatattggtttttttttttttttttttttgagacggagttttattttgttgtttagattggagtgtagtggttcgatttcggtttattgcgagttttgttttttgggtttacgtcgttttttcgttttagtttttcgagtagttgggataataggcgttcgttatcgcgtttggttaattttttgtatttttagtagagacggggttttatcgtgttagtaaggatggtttcgattttttgatttcgtgatttattcgtttcggttttttaaagtgttgggattataggtgtgagttatcgcgttcggttaattttggtttttttaaattgaatatttttaggattttgtatttattaggaagggagattgtgatttttgataagttatagtcggcggtaggtatttatggagaattggttttaggaattttttggatattaaaatttatagatgtttaaggtttttatattaaatggtgtagtatatagtatttgtatatttttttttataatttacgttatttttagattttttgtaatattaagtattatgtaattgttatataagtagttgttatattggattatttagggaatgatgataaggaaaaaaaagttcgtatatgtttcgtatagatgtaagtattttttttttttttaaatgttttttattcgtggttagttgaatttggatgatgaattcgtaaatttggagggtcgaatatgtttaatttttttgagtttatttattgttaaagcgagagaaattataaatttagttaggaagggtgttgcggaaagtaattaatattatatttgtaaagtgtttggtacgttgttgtggttattattttttgaaaataaataaatattatttattggttggtgtgaaagagggtatttgttaaagttgtcgttttttggagttagaaaagtattttttttgatgatgattgatttttttttattttttttttaattttgcggtttttttggggtttttttttcgtggatagcggttaagattagtttgggttatagtgtattggttttgttttgggtgatgttttaagtttatttttttttaattttatttatttattaattttttttttagatagagttttattttgtcgtttagggttggagtgtagtggtgtaattattgttcgttgtagtttcgattttttggggttaagtttttttatattttatttcgtaggtagttgagattatagatgcgtattattaggattagttaagttttgtatttttttgtagagaggaggtttttttatttgtatgttatttaggtttgtttcgaatttttatatttaagcgattcgttcgtttaggttttttaaagtgttgggattataggtatgagtcgtcgcgtttcgttttacgtttagttttgaaattgtttggaacgggaaacggtaaatagcgagatattcgagcgagagtttcgttttgtattagtttgcggaatcgttttggtagaaggagagaaggggagtggaggaagtacgggattggagggattaaagtttttcgatggcggtttaggggtgcgcggtatcgcggttgttttagttgttgttgtagtttttgtttttattgttgttgttggcggcgggcggggcgcgcgcgcggtggcgcggggagggtattagcgtatatttgcgggatatttttttgggtcgttgcgtcgagtatcgcgtattgttgagtttcgagtagcggtgaggtagtcggtcgggtggaaggggagtcggaaagaggtaacggtggggagggtttggggaggggaaaattggcgttaaagttcggggtgagggggtaatgagagaggttttgaggggagaggtgagtgtggagatagcgatggttttgaacgatgggggcgagtgaggagggggttgtgaagtgtgtttgtaggtgaggggtgcgttgtgcggggtttagagatgagtgtgtgtgtgtgcgcgtatatatatattgtagaggtgaggggtgtgtgcgtgtgttttagaggtgaggggggtgtgtgtgtgcgcgcgttttagaggtgggaggtgtgtgtgtgttttagaggtggatgtgtgtgtgtgtgttttagaggtgggggtgtgtgtgtgtgtgtgtgttttagaggtgaggggtgtgtgtgtgtgttttaaaggtgagatgtgtgtgtgtgttttagaggtaaggggtgtgtgtgttttagaggtgaggtgtttgtatgtgtgttttagaggtgaggggtgtgtgtatgtgtgttttagaggtgaagggggtgtgtgtgcgtgcgttttagaggtgaggggtgtgtgtattttagaggtgaggggtgtgtgtgttttagaagtgaggggtgtgtgtgttttggaggtgagatgtgtgtgtgtgtgttttagaggtgaggggtgcgtgtatgtgttttagaggtgtgtgtgtatttgtgttttagaggtgaggggtgtgtgtgtgtagtttagaggtgataggtgtgtgtgtgtggtttataggtgagggatgtgtgtgtggtttagaggtgagggatgtgtgtgtggtttagaggtgaggggtgtgtgtgttttagaggtgagggggtgtatgtgtattttagagttgaggagagtgtgtgttttagagatgaggtgtgtatgtgtgttttagaggtgaggggtgtgtgtgtgttttggagttgaggggtgtgtgttttagaggtgagatgtgtgtgttttagagatgatgggtgtgtgtgttttagaagtgagaggtgtgtgtgttttagaggtaagggatgtgtgtgtgtgtgttttagaggtgagttgtgtgtgtgttttagaggtgagatgtgtgtgtgtttgttttagaggtgaggggtgtgtgtgtgtagtttagaggtgataggtgtgtgtgtgtggtttataggtgagggatgtgtgtgtggtttagaggtgagggatgtatgtgtggtttagaggtgagaggtgtgtgtgagtgtgaaggagggtggagaggtatttttttagaagtgagggtggggtagaggtgaattgggtaatagtttattgttatttagtagatgtttagtttgaatatttagaatttagaatgtgattttaggttggaattttttgagtttagtttttttagaatttaaattttagattttttaaatttggaggatttttgaagtttgggttttttttgttagtgttgtattttttattgatttttgttttttttgtggtttttttttttttatgtttgtgatgttttttttttgtgttgattatttttattgtcgtatattttaggtaaataagaaatagtagagaattatttgtgttatatattatttagtatgagaaataaagttataaatgttatgggaaatattttttgaaaattagtatggattttaagaggggtttgtattggagggtgtatttgttttgttagaggtggaagttttttgtagtattgggttttttttttaatattatatattttgttggttggtttggttttatttggttttcgagttttatattggaattggataatgagattggttttatcgttaggtttaaatgaagaggtatttgttgtatagttgattgaatttgttattttttgttcggtgttatttttgtttgttttcgtgagtttggggtaaggttgtattttttagttttgagaaatttgtgtagtgtttttagagagataattttagtgttagatttttgaatttgttatttaagttatgataattcgttgttttttttgtaagtttatttttgtagttattatatgaaaaattttttgtaaagtttttagataaatgggtatattttataatatattatgatgtgtatgtgtgtgttttttttaatttgtatttttgtatagg

SEQ ID NO: 230 - DNA, 7498 bp, Artificial Sequence
  chemically treated genomic DNA (Homo sapiens)
tttgtgtaaaagtataagttgggaagaatatatatatgtatattataatgtgttgtgaagtatgtttatttgtttaagagttttataagagattttttatatagtaattgtagaagtaggtttataaaaaagataacgaattgttatggtttaggtgatagatttagaaatttgatattggaattgtttttttgaaggtattgtatagattttttagagttaaggaatatagttttgttttaggtttacggagataagtagaaatggtatcgagtaggaggtgataaatttagttaattatatagtaggtgtttttttatttagatttaacggtggggttagttttattgtttagttttagtgtggagttcggggattaggtgaggttaggttagttagtaggatgtgtagtgttaggagggaggtttaatgttgtaaaaggtttttatttttggtaaagtaggtgtattttttagtgtaagttttttttgaggtttatgttagtttttaaaaaatattttttatagtatttgtaattttgttttttatattgggtggtgtgtaatataggtggttttttgttgttttttatttgtttgaaatgtgcgataataaaaatgattagtataagaaagagatattataaatataagaaaaggggggttatagaaggagtaaaaattagtaagaaatgtagtattggtaagaaagatttaaattttagaaattttttagatttaggggatttgaaatttgaattttggaaggattggatttaaggaattttaatttgagattatattttgggttttgagtatttagattaaatatttgttgggtggtaatgggttgttatttagtttatttttattttatttttatttttagagggatatttttttatttttttttatatttatatatattttttatttttagattatatatatattttttatttttagattatatatatattttttatttatagattatatatatatatttgttatttttagattatatatatatattttttatttttagaataaatatatatatattttatttttagaatatatatataatttatttttagaatatatatatatatattttttatttttagaatatatatattttttatttttagaatatatatatttattatttttagaatatatatattttatttttagaatatatattttttaattttagaatatatatatattttttatttttagaatatatatatatattttatttttagaatatatattttttttagttttagaatatatatatatttttttatttttagaatatatatattttttatttttagattatatatatattttttatttttagattatatatatattttttatttatagattatatatatatatttgttatttttagattatatatatatattttttatttttagaatatagatatatatatatttttagaatatatgtacgtattttttatttttagaatatatatatatatattttatttttagaatatatatattttttatttttagaatatatatattttttatttttagaatatatatattttttatttttagagcgtacgtatatatattttttttatttttagaatatatatgtatatattttttatttttagaatatatatatagatattttatttttggaatatatatattttttatttttagaatatatatatatattttatttttagaatatatatatatattttttatttttagagtatatatatatatatatatttttatttttagagtatatatatatatatttatttttagagtatatatatattttttatttttagagcgcgcgtatatatatattttttttatttttagaatatacgtatatattttttatttttatagtgtgtgtgtgcgcgtatatatatatatttatttttagatttcgtatagcgtattttttatttgtagatatattttatagttttttttttattcgtttttatcgtttaggattatcgttgtttttatatttatttttttttttaaggttttttttattgtttttttatttcgaattttagcgttagtttttttttttttaggttttttttatcgttgttttttttcggttttttttttattcggtcgattgttttatcgttgttcgggatttagtagtgcgcggtattcggcgtagcggtttaggaagatgtttcgtaagtgtgcgttggtgtttttttcgcgttatcgcgcgcgcgtttcgttcgtcgttagtagtaatagtagaagtagaagttgtagtagtagttggagtagtcgcgatgtcgcgtatttttgggtcgttatcggggaattttggtttttttagtttcgtgttttttttattttttttttttttttttattaaggcggtttcgtaaattgatgtagggcgggattttcgttcggatatttcgttgtttgtcgtttttcgttttagataattttaagattgagcgtggggcggggcgcggcggtttatgtttgtaattttagtattttgagaggtttaaacgggcggatcgtttgagtataggagttcgagataaatttgagtaatatataggtgagaaaattttttttttataaaaaaatataaaatttagttggttttggtggtgcgtatttgtagttttagttatttgcgaggtgagatgtgaggaggtttgattttaggggatcgaggttgtagcgagtagtgattgtattattgtattttagttttgggcgatagagtgagattttgtttaaaaaaaaaattaataaataaataaaattaaaaaagagtgagtttggaatattatttaggataggattagtgtattgtggtttaggttaattttgatcgttgtttacggggagggagttttaaagaagtcgtaaggttgaaggagaggtgaggagaggttagttattattagaagaaatatttttttggttttaaaggacgataattttgatagatgtttttttttatattaattaataagtggtgtttgtttgtttttaggaaataataattataataacgtgttaagtattttgtaagtataatattaattatttttcgtaatattttttttagttaagtttgtaatttttttcgttttagtaatggataaatttagggaagttaagtatgttcggttttttagatttgcggatttattatttaaatttagttaattacggatgagaaatatttgaggaaaaaaagaatgtttgtatttgtacggaatatgtacggatttttttttttttgttattattttttaaataatttaatgtaataattatttatgtaataattatatagtatttgatattataaggaatttggagatgacgtgaattatagaagaggatgtgtaaatattgtatattatattatttaatataagggttttgagtatttgtggattttggtatttaggaggtttttggaattaattttttatggatatttatcgtcgattgtaatttgttagaggttataatttttttttttgatagatgtaaaattttggagatgtttagtttaagagagttaggattggtcgggcgcggtggtttatatttgtaattttagtattttgggaggtcgaggcgggtggattacgaggttaagagatcgagattatttttgttaatacggtgaaatttcgtttttattaaaaatataaaagattagttaggcgcggtggcgggcgtttgttgttttagttattcgggaggttgaggcgggaaaacggcgtgaatttaggaggtagagttcgtagtgagtcgagatcgggttattgtattttagtttgggtaatagagtgagatttcgttttaaaaaaaaaaaaaaaaaagagttagtattaatagaatattacgtggaggtttaagtttttaatttttataataatgatagtaatgaattttgagtgtttggtaagtatttgataaatataagggaggatagaataggtgttttttattgttttatttgaatttttttttttttgtaattaaaattcgtatttttttgtttagtttttttttaagttaaatttattttttagaggaaagtatttttaatttttttaagttttgtttttgtgtttatttttatatttttaaataatatgtgtgaattcgtaaattttgagataggttttaattaatttagaaagtttattttagtaaggttgaggatacgtgtttatgatataattttaggaagttttgacgatatgtatttaaggtggttagggtatagtttggttttatatattttagggagatatgagatattaattaatatatgtaagaagtatattggttttgtttagagaggcggggataattcgaagtacggagggggtttttaggttataggtaggtgagagataaatggttgtttttttttgagtttttgataagtttttttaaagaaggttattagaatatgtatatattttagtgagtagttgaatgattttgaatagaatgggaggtaagtttgttttgagtagtttttagtttgatttttttttttagtttagtaattttggggtatttttggtatggttcgttttattaaatttaatgtgaaattgtaatttttaacgttggaggtggggtttggtgggaggtgattttattatgggtgtgggttttttaagaatagtttagtattatttttttgttgttatttttatgatagtaagtgagatttggttgttttaaattgtgtagtattggtagggcgtcgtggtttatatttgtaattatagtagtttgggaggttggtgtggggggtgtgttgggaattacggatcgagattattttggttaatatggtgaaattttatttatattaaaaatataaaaattagttgggcgtggtggtacgcgtttgtagttttagtttttcgggaggttgaggtagaagaatcgtttgaatttgggaggcggaggttgtagtgagttgagattttattattgtattttagtttggtgatagagtgagattttgttttaaaaaaaaaaaaaaaaaaaaagaagtgtgtagtatttttttttttttttttgttttttgttgttatcgtgtaagatttattgttttttttttgttttttattatatttggaaattttttgaagtttttttagatgtagaagttattatgttttttatagtttgtagaattgtgagttaatttaattttttttttttataaatgagtagttttaggtatttatagtaatgtaagaatagattaatataatatttatatgttattttttgatgtttttgtttgggatattattttgtttgggatattatgatattttatttgttgtaaattttttgtttattttggaggtaattattatttagaaagtaattagtttgtttttgatattataggtttataggtagaaggtatttgttttgttttagatgaaattttgaattgtggatttttgggttaatgttgaagttaagattttgagggattgttgagaaggtatgattggttttgaaatgtgaggatgtgagatttggaggggtcggggtggaatgatatggtttggttgtgtttttatttaaattttaatttgaattgtattttttagaatttttacgtgttgtgggagagagttaggttggggtgggggtggggaggtagggtgggagtaattgaattatgggggtcggttttttttatgttattttggtattttggtgatagtgaataagttttataagatttgatgggtttattaggtgtttttatttttgttttttttttattttttttttgtcgttgttatgtaagaagtgttttttattttatgttatgattttgaggtttttttagttatgtagaattgtaagtttaattaattttttttttgtttttagttttaggtgtgtttttatgagtagtatgaaaacgaattaatataattagattttatattttttttttttttgttttatggagtatattttttaatagttttttgagaagatatatagggattaaattttttgagattttttgtataagaatttaaaatgttattattttatttttatatttaattgagaatttgattggatgtttgagatttttgtataagaatttaaagtgttattattttaattttatatttgattgagaatttggttgggtatatttttgtattggaaagtatttttttttaaaattttgaagattgtgttttattgttttttgtgttgttgttgagaaatttgaatttatttttttatttttgtttatttgattttttttgttgttgtttgttttgttttttattttttggtttgttttttttttatttggaaatttttagaatttttttttatttttaggagtatgaaattttagagatgaagttgggtaaaagtagttgttttttattgtattggataatttatgagtttttttaatttataaatttatgtttttaaatattgagatatttttttaattttttggtaatttttttttttttaaattttgttttttttttttgaaatttttgttatttatataggaatgatttttttgttagattttttagtttttaattttttatatttttattttttttttttgtttttttatatttttttgaatataaatttattattattttttaatttttttgttgtttttttaaatttatattatatatatatatatatatatatatatatatatatttatatatatagttgtgttttatacgtttaggtttttttgttttttataatttttttttgttgttttgtgaatatttttgaggtttttattatagatgtaggttttttattttttttttaaatttttttttgttaatgtttgttttttttgagtgttttatttttattttggtgattggttttaatgtgagaagttttttttaaataaattgatgatttttggttgattatttttataaatatagaaaaatataaggaatagtattagtttattgtcgtattgtagataaagatatatttgagattgggtaatttggtagaaggtaataggtacgttttatatggtagtaggtaagagatagtttgtgtaggggaatttttttttataaaattattagattttgtgaaatttatttattattatgagaatgggaaagatttatttttatgatttaattattttttatcgagttttttatatgatatgagggaattgtgggaattataatttaagatgagatttggttggggacgtagttatattatattaggtattaattagaagtaggtttaaggtaaatggttagagtttgttaaagggtgggttgttttgtaggatgaatatattgtattttattattaagagatatttgttatttttttttggagagttcgtttttttagagagta

SEQ ID NO: 231 - DNA, 6079 bp, Artificial Sequence
  chemically treated genomic DNA (Homo sapiens)
ggtttttttttattgtttgttttttattttattgatttttgtttttgtatttattattttagttattttgaatttgatttgtttttttttttttagttttttaaaatataaatttagaatattggtttttaattttttttattaataatttgtttaaaatgattttaagaattgttttagttataggttataagtttgagttgtatttttttattattattttatttaaaatattttttattttttattgtgattttttttttaatttattggttaattaggatttgtagtgatatttttttttttatttttgatattggtaatttgtttttttttttatttttaattagtttattttgaagtttatttattttgttaatttttttaaatatttataaaatattaaaaagtatgttgtttaatttttaaaggtttgagattttttttagtgattttttattgagttttattttatttttatatggttaggtgatatatattgtacgtttttaatttttggcgatttattgagattttttttatggtttgtatatggatagtttttattttgtaattttattttagtttataattaggaagagagggggtattaaattaaatgtatataagataatttgggaaaatgttgagtgtttttttaaattttttttagtttgggatattattttttttttagtattatttttttttatttttttagaaataataatgaattgcgtattttttagtttttatttagttttaaatgaagtagtatattgttttaaagaattttatattaacgatataaatgtggaaaaaaaaaaaaaggaaatgtttatggattataattttaattggttttattattatatatttattgagaatttgtataaagattttgttttttttttgtgtcgttattttttattggttttatttttttttttttttgtatataaggttaaatttatattaggagaataagataatttttaagaaatgtaggtatgtaaatatttgttgtaataagaatattttatttagatatttaaaaaaattgtttatttatgatagttaggtaataaatgtcgttacgtaacgtataatatataataattcgtaataaaaagtatatttttttggtaggaaatgttaaaagttgagaggtaattgttttgttttgttttattttgttttgttttgttttttttttttgagatagagtttcggagtttcgtttttgttgtttaggttggagtgtaatgatgtaatattggtttacggtaatttttattttttaggtttaagtaatttttttgttttagtttttcgagtagttggtattataaatatgtattattacgtttggttaattttatatttttagaaacggggtttttttatgttggttaggttggttttaaatttttgattttaggtgatttgtttgttttagttttttaaagtgttgggattataggcgtgagttatcgcgtttggttataattggttttatgattataaaagatttgtttttttattaaattatttttatttataggtagaatagtgtatatggtatttagagagtggattttcgagttaatttgttttgatttaaattttagtttttttattttttattgtgtaattttggtaagttgttttaaatttttgtttttttatttataaaatgaaaataatttaaagtattgttgtgaggatgaaattagttcgtatgtgtaaaatatttaaaatagtgtttatatatagtaagtttttaagaataatgaatttgttgataatttgtttatttgttggttaattggttagtatgttttgattattttatggatttaattaaagataatgaagttatatttaattatatttttttttttattatagatatgttttgaatgttttacgttggttttatgttttttttgaattattttgttattatttttagtttaggtattatttaagtttttttttgattattatagagttaggatgtttgagggatatatgtattgggatgttttattaatattttaaatgtatgtgtttaaaattgaatattattttttttttttaagttggtttttttttttatatttttagttttagttatagataatatgatttatataattaattaagtaagtttaaaatttaggaattatttttagaggagtttgtttttttttttttaattggttaatgtttgtttattttttaggatagtttagatattattttttgtgggaagttgagtttgggtattttttttttgggttttatagtattttggatatttttttattatagtatttattattttataatataattgtttgtgtttgtttttatagtttggttgtaagttttttaaagttaggaattattatttatttttgtatttagtatttaatatagtatatgggatttaaagaatttttaattaagtttataggggttgaaataaaatttagagatagaggtcgtgttatgttgtttaggtagtttttaatttttggatttgagtaatttttttgttttagtttttttcgtagttgggattattggtatgtataattatgtttcgtattatttttttgaagtataaatttaattatatcgtttatttgtttagaaaaatttttagttttttttattgtttattgttaaaaaaaaaaaaaaatttaaattttttttagattttttataatttttttttaatttatttattagttttatagtttattatgtttttatttattttgagggaattatatgaattaatattatttttataggtaattttttttgtttttaaagagaattagttattttttttgtgttattatatttattgtgagagttataatagatgagtttttttttgtaagttttatttttattttttaggattgattaacgtgaagattaagattaaattttattttttttttatattttttttttttataggttatgtagtataatttttagtatatagtatttagttaataaatgtttgttgtatgaagaaattagtggtagatatgttatttttataaaaatagttaagtataggttttatttataggttaatagttttatttttttatatagatgaaagaatagaatgttgttttaataaagataagtaaaatgtagaagtaatagaaatttaaaattttttagttttaagattaaaaaatataaattttaaattttgtagataaagaatgttatttaataaagaatgttatttaataaagaatgttatttaattaataaataatgtataatattaagtatttatattacgtgaaagtataaattaagttaggtattgtggtgatataataaatgaattataatttttgttttttaggtatttatgtatgatggtaaaaggtattatttagggtggttaggtagttgtttgggtaagaggaggtaagaatttaaattagaaggtaacggtgggagtgtaaagtaggaatatttagttttagttggattgagagtatgtgatattatagaagtggatttttgattttttaagttcgtattattgagagaagagtaaggtggattggtagaggatgtatttaaagtggattgataaaacgtcgtattttttttattttgtttttaaataagtttttaagaaaggtggtagtatgatgtggtggaaaaagtattaggttaggatttgagttatttgagtttttattaaggtattattatttgtgatattttttattttgtttcgaattaattatataataaagttttggtttttatttatttattttataggtaatttttgaatattttttttatgtaggtattatattaagtattgggggtatagatgtgtcgtgaagaaataatatttttgttttaatggagtttgtagtttaatagggaagttagattttatttataaattgtttattttaattatgatatatagtatagtagtaagagaatggatttagatttagaatacgtgggtttaaattttggttttgttattattagttgtgttattaaaggtaagttttatttaatttgtgtttttttttatttgttaatttggtgtaataatagttaatatttaatagtgattgatatgatatatgtaaagtagtagaagagtggtaagcgttatttgggtgtttgtaatgtatatttatcgttattattgattatttttagtaacgtatttagttatttgagtttatatttatcgtttgtttattttttatttcgatgtatttgatgtttagttgttgggtagtaatggcgatttcggttattgggatgtttacgatgttaaatatgtattttatattttgaggaacgaagaataggggagtaaatttttaaggttttattatatcgttatatttttttttttttttcgggcgttaaaaggaaaatttttcgatttttatcgtttatttttattcgtttttaagataatatcgcggttttcgttagttttcgtaggagttttttattttaggaaggtttatcgtatttgcgtttttagggtttgagcgatgattttagtattagatatttgtttttcgttgcgttttgcgaagttattgttcggtattttttatcgaaaagttttaagtatttacgtagtcggtaaataagcggaattatttagtaaggtaaacgcgaaatcggtagtacgttatttttggtattgtatttttgacggataggagggtaattaattgttttaaataacgggaaggaagaggcggtttaaattcgtttatttttcgggagaggtgagaatgtaaatacgcgcgttttttaattagaattgcgtttttttttcggtttttttattcgcgcgttagaatgttagagggaggcgggattagtaggagattgttgtttatgtaaagtaggtaagaagtcgaattttgaggtttttcgttattgttttcgagtcggttagttggagcgttttcggggttgtaaagggagaatggcgtatgcgtatatttagggcggaaggcgcgttaagagtaggtacggagggggcgtggtgcggcgcggagggggtgtggtaagggcgtgcggtttagatttcgtttcgggcgtttagttggatttggggagggttgcgtaaaggttgtcgggagttgggaagttcggcgcgcgtcgtttgttggggttgtttgtgcgttgttgttgtgttatcgcgttgcgttttttaggtatttatttatacgttttgtggtttacgtttttataattttgtggttttatagtttttaaattattgtagcgtacgttatttaaatttagaagtagatgtgtattttagtaagagataaaatgacgtttagagttagtagatttagatcgtgtttgagattttgaattttgttttttatttattatttagttattgggttataagcgatgaaaagagtattttgaaggtagtatagagtattgttttttttagtttttgttattaatttatattatttttcgttaatatttttttaaaattaggaattatggcgttttataatttttaggttgggtttttatttataattagttttgtattcgatagttttttaaaatatttttgtgtgaaaatcgtttgtaatgtgtaatatttgaaattattgttttggagttattagattttttgtttagtgataataaatataaaatttttaattgtaataaatagtggaatttttaattttttgaggatttggagttattttaagtaaaaagaatagtgataagtggatagtaaagagatgagaggggagtgggttatgggtagtgaaatgagtgagaagtattggaagtgaaacgatttttaaatttagatatttttaaattgtagttttgggtttttttaaaaggttttttttttttttttttaattttttaattttattttaagtagaggagagtgaagtggttgtttttttgtatatgtggacggtgttagtttatttttatattgttataaagaaatatttaaaattgggtaatttataaa

SEQ ID NO: 232 - DNA, 6079 bp, Artificial Sequence
  chemically treated genomic DNA (Homo sapiens)
tttataaattatttagttttgggtatttttttatagtagtatgaaaatggattaatatcgtttatatatgtagggaggtaattattttatttttttttgtttggggtggggttgaggggttgagaaaaagaggggaagattttttgaaaagatttaggattatagtttgaaaatgtttgggtttagaaatcgttttatttttagtgttttttatttattttattatttatgatttattttttttttatttttttattgtttatttattattgttttttttgtttaaaatgattttaaatttttaaaaaattaaaagttttattgtttattataattggaaattttatgtttattgttattgagtagagggtttaatgattttaaggtagtagttttagatattgtatattgtaaacgatttttatataaaaatgttttaaaaggttatcgggtgtagggttggttgtaggtagggatttaatttaagaattatgaaacgttatagtttttaattttggaaagatattagcggagagtaatatggattagtagtaagggttggagaaaatagtgttttatattatttttaaggtgttttttttatcgtttgtgatttaatggttgaatagtgggtaggaaataggatttaggattttaggtacggtttggatttattgattttgagcgttattttattttttgttggggtatatatttgtttttggatttaagtaacgtgcgttataataatttaaggattataaaattataaggttatgagagcgtaaattataaagcgtgtaagtaaatgtttagaaaacgtaacgcggtagtatagtagtaacgtataaatagttttagtaaacgacgcgcgtcgggttttttagttttcggtagtttttgcgtagttttttttaagtttaattgggcgttcggggcggggtttggatcgtacgtttttattatatttttttcgcgtcgtattacgtttttttcgtatttgtttttagcgcgtttttcgttttgaatatgcgtatgcgttattttttttttatagtttcgaaaacgttttagttggtcgattcggagataatggcgagaggttttagagttcggttttttatttgttttgtataggtagtaattttttgttagtttcgtttttttttggtattttggcgcgcgaatggaggagtcgagaagagagcgtagttttgattggagaacgcgcgtgtttatatttttatttttttcgggaagtggacgaatttagatcgttttttttttttcgttgtttaaggtagttggttgtttttttgttcgttagaggtgtagtattagaggtggcgtgttgtcgatttcgcgtttgttttgttggatgatttcgtttgtttgtcggttgcgtgagtgtttagagtttttcggtggaagatgtcggatagtaatttcgtagagcgtagcgaggagtaggtgtttggtgttaaagttatcgtttaggttttgaaaacgtaagtacgatggatttttttggaatgaaaggtttttacggaagttggcggggatcgcgatgttgttttggagacgagtagaaatgggcgatgggggtcggggggttttttttttagcgttcgggagggagggaaggatgtggcgatatggtggggttttgggagtttatttttttgtttttcgttttttaggatgtggagtatatatttggtatcgtaggtattttagtgatcgaaatcgttattgttgtttagtagttaggtattaagtatatcgggatgaggaatgagtaagcggtgagtatggatttaggtggttgaatgcgttattgggaatgattagtaatagcggtaggtatgtattgtaaatatttagatagcgtttattatttttttgttattttatatatattatattaattattgttgaatattaattgttgttatattaagttgatagatgagaaaagatataggttaagtaaaatttgtttttggtgatatagttggtagtagtagagttagggtttgaatttacgtattttgggtttgagtttatttttttattattatattgtatgttatgattggaatggatagtttatgagtaaagtttgatttttttattaggttataagttttattagagtagggatattatttttttacgatatatttgtatttttagtgtttagtgtggtgtttgtataagaaaggtgtttagagattatttgtgggataaatgagtgaaggttaaggttttgttgtatgattggttcggggtagggtggaggatattataaatggtagtgttttgatggaaatttagatggtttagattttagtttgatgttttttttattatattatgttgttattttttttagaggtttatttggaagtaggataaggaagatacgacgttttgttaatttattttaagtgtattttttgttaatttattttgttttttttttagtagtgcgggtttgaaaggttaagaatttatttttgtgatattatatatttttagtttagttgaggttaaatatttttgttttatatttttatcgttgttttttaatttaaatttttgtttttttttgtttaaataattgtttggttattttaagtggtgttttttgttattatatatgagtgtttggagggtagaagttgtgatttatttgttatattattatagtgtttggtttggtttgtgtttttacgtggtgtagatgtttaatattatatattatttattaattgaatgatattttttattgaatgatattttttattgaatgatattttttatttataaggtttgagatttgtattttttaattttaaaattaggaggttttgagtttttgttgtttttatattttatttgtttttgttagaataatattttgtttttttatttgtgtgaaaaaatgaagttattgatttatgaatggaatttatatttaattgtttttgtagagatgatatatttgttattgatttttttatatagtaaatatttattgattaagtattgtatattaaggattgtgttatataatttgtaggagagagggatgtaaagaaggagtgaggtttagttttgatttttacgttgattagttttggaaggtgagggtaagatttatagaaaaagatttatttattataatttttataatagatgtagtagtatagaaggggtgattggttttttttgaggatagagaagattgtttgtagaggtaatgttagtttatgtggtttttttaaggtaggtaaaggtatggtgagttgtgagattggtaggtaggttgaggggaggttgtgggaaatttaaaaagagtttgaatttttttttttttttaatagtaggtaatgggggagattaaaggtttttttaaataggtgggcgatgtaattagatttgtattttagaaagatgatgcgaggtatggttgtatatgttagtaattttagttacgaagggggttgaggtaggaggattatttaagtttaggaattagaggttgtttgggtaatatagtacgatttttgtttttaagttttattttagtttttataagtttagttgagggttttttaggttttatgtgttgtgttgggtgttggatatagagatgaatgatagtttttggttttaaggggtttatagttaagttgtggagatagatatagataattgtattataaggtggtaagtgttgtgatagagagatatttagggtgttataaagtttagagaaggagtatttaggtttagttttttataggagatgatgtttgagttgttttgaaggataagtaggtattaattagttaggaaagaggaggtaggtttttttggagatgatttttagattttgggtttatttgattgattgtgtagattatattgtttgtgattgagattgggaatatagagggaagagttagtttggaggagaaaggtgatgtttaattttgaatatatgtatttgagatgttggtggaatattttagtgtatatgttttttaagtattttgattttatggtagttaaaggaagatttaaatggtatttgaattaagggtagtgatagaatgatttagagggaatatgaaattagcgtaaggtatttaggatatgtttgtgataaagagaaagatgtagttgggtgtgattttattgtttttgattagatttatagagtaattaagatatattgattaattggttagtaagtaggtagattgttagtaagtttattgtttttgagagtttattgtgtgtgggtattattttgagtgttttatatatacgaattgattttatttttatagtagtgttttgaattatttttattttatagatgaagaaatagagatttagagtaatttgttaaaattatatagtagaaagtggggaagttgggatttaaattaaaatagattggttcgagagtttattttttaagtattatgtatattgttttgtttgtgaatggaggtagtttagtagaggaatagattttttatggttataaaattagttatggttaggcgcggtggtttacgtttgtaattttagtattttgggaggttgaggtaggtagattatttgaggttaggagtttgagattagtttgattaatatggagaaatttcgtttttaaaaatataaaattagttaggcgtggtggtgtatgtttgtaatgttagttgttcgggaagttgaggtaggagaattgtttgaatttgggaggtggaggttgtcgtgagttaatattgtattattgtattttagtttgggtaataagagcgaaatttcgaaattttgttttaaaaaaaaaaaataaaataaaataaaataaaataaaataaaatagttattttttaatttttgatattttttattagaggaatatattttttgttacgggttgttgtatattgtgcgttgcgtagcgatatttattatttagttattataagtgggtaatttttttgggtgtttaaataaagtgtttttattgtagtaggtatttatatgtttgtattttttaggagttgttttatttttttaatgtgaatttggttttatgtgtaaaaggaaagagagatggggttagtagagaatagcgatataggaaaagagtagagtttttgtgtaggtttttagtgggtgtatgatagtagagttagttaagattatgatttataaatattttttttttttttttttttatatttatgtcgttaatgtggagttttttaagatagtatattattttatttaaagttgaatgaaggttaggaaatacgtaatttattattatttttaaagaaatgagaagaaataatattgggaaaaaaatgatgttttagattaagaagaatttgagagagtatttagtatttttttaggttattttgtgtgtatttaatttagtgttttttttttttttgattatgagttgaagtagagttataaggtaaaaattatttatatgtaggttataaaggaaattttaataaatcgttaaggattgaaagcgtgtagtatatgttatttgattatgtggaagtaaagtggaatttaataagagattattaaaaagaattttagatttttggaaattaagtaatatattttttggtattttgtaaatatttgaaaagattaataaaatgaataaattttaagatagattgattgagaataaaagagaaaatagattattaatgttaggaatgaaaaaggaggtattattatagattttaattaattaatgggttgaagaagaaattataatggaaagtagaaaatattttgaatagaatgataatgaaaagatgtaatttaaatttgtaatttataattaaagtagtttttggaattattttaaataaattattagtaaagaaaattaaaaattagtgttttaaatttgtattttaagaagttagaaaaagaaaagtaaattaaatttaaaatgattgaaataataaatataagaatagaaattaatgaaatagaaaataaataatagagaaaaatt

SEQ ID NO: 233 - DNA, 15881 bp, Artificial Sequence
  chemically treated genomic DNA (Homo sapiens)
gtttttttagggttgatttcggtaagattgggttgttttgatatatcgagtttatataggagtttggatttatttcggtatagtacgggcgacgaagggggggaaagattaagttggatgttattcggtttttattagtaagttttattatgtttgcgtgagcgttatcggcgcggaaagaaagaaatcgcgaggtaaacggaagtatataggaggttttcgatcgtatttttttatgggagtcggtaggagtaattatagagtgtaaggtttagcgtagcgttttcgggcggttgagaggatttagttcggagtcgcgggcgggagtttaaggaaggatttcgtttaaagggtggtttatttatttcgattttttttcgtttcgtagtttttaacgtttcgttattttattttttttggtggattttgttacgtagtggcgtttagtgaagggagtagtgttttttttagattttttggttttttcgttttcgagggaagttaggattagggtcgaatgaaggggttttttatttttacgttttatttttgttttattttaaggttattgggaatatttttcgtagtaaattgttaatttaatgaagatttggagggagttaattgttttagtttatttattatatggttagttggtttatttaataaatggttattggatgtttattatgtggtaggtattgtttcgggggagaggtatagtaatttaataggtttataaatgtgtaattatgaattaagtattttgaagaaaaggaataatgattggtattaaagtagtatttttttgttgagggagtaagttagtagttttaggttttgaaaagtgataatgaaattgtttggtttttgtaatagtaattattaagtttagaagtagaaagtatttagcggttttttttttttttgtaaatttggtagaaggtatatattaggttttaagagagtttagtatagaaagattttagggtgttaaatattttaaatagattgtgttatataatttttataataattttaggagataggtggtattattatttttattttatagattaagaaattgaggttgtaggatgttaaacgatttgtttaatgttaacggtatttagtgaatttaggatataaatttaagtagattgattttagagttcgcgtttttttaatattataaaatattgttgttgtggtttggtaattataatagttaaaaaaattatggcgtatttattatatgttaggtatttttttaattattttatatattattttttttaattttgatagtaattttaggaggtatatattagtattagtatttaataggtgaggaaattgaggtataagagatgttaagtttatttatttgaagttatataggttgttatttttttgtggagttggaatttgattttaggtagtttaatattatagttttgtatttaattattatattatataaaggaagtaggggtatttgtagtgtagaggatggtgaggagatagaattgggttgagatataggaggaggtggtagtggaataggggttgaagaatcgtgagagtttggggtattttgtttgtataattttttaggaatacgcgtgggatttgagttgatattttgattatttttttttttgttgggtggtttttgggaatgagataataaatatattattattatttgttatattttttgaaaatttttttgttaaatttttagtattttttttttttttttagatttttaagtaattttattggtttttaggggtttatgttagtaatatggaaatatgaagatcgtgaatatggtttttttttatttaattaattttagttttttttattatatttggtgttatgtggttttgtgggggttttgtttgtttttgtttatttaaaaatatttaattgataaaaattgtttatatttaaggtgtataatatgatgatttgatatgtgtatatattgtgtaatgattattatagttaaattgattaatatatttattatttattattatttatagttattatgggggtggtgaggatatttaaaatttgtttttttattaaattttaataatatagtattattaattatggttattatattgtatattagatttttagagtttatatattttataagtgaaagtttgtatattaatgttgatatcgaggtgggaggatcgtttgagttgttttttgttttggatatgtttttgtttattaattttttttaagacgaggtatttagaattgaatgtaggattttaggtgtggtttggttttgtagagtaagtggtatgttatttttttttgtttagatattttatttttataaggaagttttaatgttattttggtttttttggaagttatgttaattgatgatatgttttttgattattattagtaaaaatttttgaattatttttataaatgttattgttattttatttttttttggagttatttgaagtttaaatttggggtttaattatgagatattatttttagttttggtaaaatatattttgtggaatttggttttttatattaggtgattaagatttttttgggaattaattgtttttttttgttatttagtttagtatataaagttttgtattatttatagattaatcgggttattttttatattttttttaaagatgattaataaaaatgttgaataggatagtattaagaatagaattttatattgtattgggaatttttttaggtgatatttagttgtttatttgtattatttgagtatagtttttttgttagtatggatgagtgtgttaggggagtggtcgtgggtagagggtgaagaaaagtttacgtttatttgttttttttttttgtgttttttttttttttttgtttagtttttttattggatgtttattattttttagtttttattttaagatggattttgagaaaggatagggtatgtgataataagtggtataagattgaagaaaagagtttgggtacggtggtttacgtatgtaattttagtattttgggaagttgaggcgggtggattacgaggttaggagatcgagattattttggttaatatggtgaaatttcgtttttattaaaaatataaaaaattagttaggcgtggtggtaggtatttgtagttttaattatttaggagattgaggtaggataatggcgtgaattcgggaggtggagtttgtagtgagtcgagattatgttattgtattttagtttgggcgatagggtaagatttcgttttaaaaaaaaaaaaaattgaagaaaagaggagggaagatgaatgtttgtggttaatttttaggtaggtgagtggaatagttattgggggtgattagcgaaaggatagacgttgttaataaagtaaggtaattatataatatatgttgtttatttgttttgtgtaaatgtgagtattaattattttattattagtttataaatattttaaatgtttttatttaaagttttgttgatggttgggagaggtggtttatttttgtaatttttgtattttgggaggttaaggtaggagtatcgtttgagtttaggagtttgagattagtttgggtaatatagtgaaattttatttttataaaaagtagaaaaattagtttagtatagtgatgtgtgtttatagttttaggtattagggtgattgaggtgagaggattatttgagtttaggaggtggaggttgtagtgagttatgattacgttattgtattttaatttgggttttagagtaagattttgttttaaaaaaaaaaaaaaaaaaaaaaggttttagggtttgttggggtttgggggtgaggggagggattttagaggatgggttaataggtgtagtaaattattatgttatatatatatttatgtaataaatttgtattttttgtatatatattttattttttttgtttgtttgtttgtttgttttttagataaaataaagaaaaaaaaataaggttttgttgatttaaaatttcggatgaaattgtagtgggatttgtgatttgtttttatattaggatatagtgttttggggtaaggaaatatggtagtgttcgaggtgttaaggtgggtaggtagattagttagtaggggttttattattatggtttgtatttaatattggttgtattttttaggagaatttttgggggaattattgtagttggagtataatgtagggggtttttgagaaaatttttaggttttaagtgatatatttagtttgttttatcggtttataggatttaagagaaaggtggatattgagagttaatttttgaggttaaattttaaatggagaaagttaatatttatagaaaatggggaagggtataagtatttttgtgggtttatatttcgatatttttatttgtaggggaaaaatgtttttttagaaaatgatttagtacggggaagttttgtttttatttttgttttgttttgttttttggggtttttttattattaagtttaattgtgtgtttttgagatttttttgtttcggaggataggagattcgaaaaacgttttttttggttagtttttttgttttgtgtttgttagtttttagtatttttttttttttttgtaagtttttttttttgtgttgattgtttttatagtattttaggtatgttgtttttttatttttgggaggatagtttgatgatttgtttgtttaggttagttttatttagagttttagtggttttagttatgttgagaaaggtttttttaaagatagatttaagatagtagtgttagaggttttaagtaaatgaagggcggggatagttgagggggtggaatagggacggtagtagggaattagatagtatgttgttgagaagaaaaaaagatattggtttaggttaggaagtaaaaaaagggaattgagtggttgtgaaagggtggggtttgtttagattgttttttttttttggattgtaagaatatgtttttagggttagtgtttgttgcgatcgagttttattttttaagttttggtattttaatgtatttgggaagttatttgtattaagttaggattgaggtgggtttggggtatggtaggggttgggtagtagtagtaatgtattttgtttgggatttttaaaaattagagagatagtatggttggtgttatttattagttagtggaggaggttgacggagggtgggagtgttattagtataaggttttggtagttttttttggtgattagagaggtcgaaagggtttttttcgataagggttgagggtgggcggaataggaagagaaaaatgtgatatgaggtgattattcgaataggtagtaaatgttagaaaggggtatttttggtaaatttagtggaaaagtaatattgtagggagtagttagataaaaataagtttttttgttaaatagtgtttgaagatttaatagggatatatgggttaatgaagtttttagaaaaagaaatattaagaggtagattttttgagaatatggtaaaagtttacgttttacgttatgaagttgatttttgtgagttagggaaaggtttggttaggttagggtgtaggttatttgttttgagttgtattaggttaaatgtcgttagggttagagttggtttattaaaggattgtgtggaagttgtgttaatttcgtggtaataatgggtaaaagattgggttaggagaaagtagtttttgttttagtttagatagtgcggttaatttttgaggttgtggtaaaggtttttttttttattattgttttttatgtgtatggtttgttttttttttgtttttattatttttttttttttttttttttttttaatttttttttttttttatttatttttttttttttatttatattttttttttattatatttttttttgttttgttgattattagattttgatatatagttagtatttaataaataattgtcgaattgtattgatttttttttgttttttttttttttcgtttttttttttttttttttttttttttatttttttttttttgtttgtttagtattttttttataaggtggttgtgagtagtaaatgtgtaaatatatgtaaagtttttaaaatagggtttggtaatagtaagtgttggattttagtatttgttataatttttattttgttttagatttgttaatgttttttagagggtttatttagagtaaataatatgatatttagaataaaagtgattggtgattttaattaagatatttttggataagttgtttagattttagtttttttggagttttagttatttgataaaataatgttattttttaaataagttataaaatgtaaatatttatggtaatttaaagtattatatttaaatagtgttttttagggtttgttttgtttattttgattttttttatatttaaattatttaaattgtttgtttgtgttgaagtttaaatttttattgcgtatggttattgatatttttgtttggaattttttttttttttttttgatacggagttttatttttgttgtttaggttggagtgtaatggtacgatttcgggattttagtttatcgtaattttcgtttttcgggtttaaataatttttttgttttagttttttaagtagttgggattataggtatgtgttattacgtttagttaattttgtatttttagtagagacggggtttttttatgttggttaggttggtttcgaatttttaattttaggtgatttgtttgtttgggttttttaaagtgttaggattataggcgtgagttatcgtatttattttggaattttttgtaaattttttatggtgcgaattaatgtaattttttatttagttatgggggattggtgtaattttaaattattattatgatttgttatttttatttgagtaaattttttatagagtttttttttagtggattagatttatattaggaagtgatttaggtataaagggaagatatagttttcgaaaattaaagtttgggcgttttttaaagagttattagatatttttttttatatttataatgatttgattgttgagatttgattgttaattattgaaaataaggaagaattagaatttttagtgatatagtgtttagtaagaagttagaaaagaggttttgatatatttgattttaaagttatttggttatgtatgaagttatttggggaggggaaggaggagggagaatttttttgaggattttgaaataattgggttacgtgtgatttttagtttttatggagatttatgtgtagtggttgagggtaatttgagagtattggaaatttagaagttttaatattaggttttttttttcgtttttagaaagtttttataagatgtttttaggattatattggttatttgaattttaaggagaagttttttttattgttttatttttttgaattgaaaataaattgtagtttgttagtttattttagaagaaggaaattttagagttaagagaagttaagttttagataagttggaagttggaatatattggagtttaagattattgatttaatgaaaaaaaaaaaagatttgtttgtagtaaaattagagttttaaaaatgattagaaatggattagaaaagagataaggataatgagaaagggggttttttaaaattatttggaattgaaattgggataatgtttttggaaattattttggtagtatgtattaaaatgtaaaatgtatatatttttttgattttggaaatgatgtttgtatagagattttaataatatgggaaaataattaggaataatgttaaataagaatattagatttttttttggaaaaaggtattttgaacggatggatggatggatagatatatatatatatgtatatatatatatatagatgttacgaaaaataggtaaattaattgaatgtgtaatatgattttaaatattataagaaatatatatagaaaaaaatggaaggaatatgtcgatatattaatgtttttggatgagtttatgaatgatttttttttttttatatttttgtatttgatatattttttataataagtatgttttattttattatattttgttttattttgagatgggggtttttttatgttttttaggttgattttgaatttttgggtttaagtaattttttaatattagttttttgagtagttgggattataggtgtattttattgtatttagttgcgtgtgttattttgatatcgatggaaaaaataaataaaatgtttaagttaaggaaaataaaaattaggttgaaaaagaaggttaaaagggtatataagtttagagtgaaagatagatattttagtagttatttttagagtagagggagaatattgaaagtattattattgatttgatttggtattgattataaatttgtagattggttttttggttttttttttattattagttggttagaatatattgtcgttaatgtaagataaaaagagatgatgaattatagagatttagaagtttttaaaattatagaagaaaaatgtaaaatgttaaaaatataaggttaggcgcggtggtttaagtttgtaattttagtattttgggaggtcgaggtaggtgttatggtgtgcggttgtagtttaagttatttaggaggttgaggtaagagaattgtttgaaattgggaggtagcgattgtagtgagttaagattgcgttattgtatcgaagtttggatgatagagcgagattttgttttaaaaataaataaataaataaataaataaataaaatatgaattgttgtggaagaattagagagttttaaggttttttgtaaatgattatagtaggagagtttttttggttagtatgtagttttcgaaaattgagtttggtttgatgtttttattataaatttggttttttgtagttttgattatgaagtttattataaaataattgggttttattggggttcgaataaaagtattttgggaatttaataagattaaaggttgttttgttgttgtgggtatgattttttttttttttttttttttttttttttttgagacggagtttgattttgttatttaggttggagtgtagtggtacgatttcggtttattgtaattttcgttttttgggtttaagtaatttttttgttttagttttttgagtaattgggattataggtgcgcgttattacgttaggttaatttttgtatttttagtagagatagggtttttttatgttggttaggttggttgtttttaaatttttgattttgttatttagtcgttttagttttttaaagtgttgggattataggtatgagttattatacgtggttatatgtaaattttaaatatgtaaattaatattgtatattttttatagatatttatatttgtaatgataatatgaaaacgtatttaggaatgataaatattaaatttaagatattggtaatttttaaggagggagaagattaagattttggagtatataaaggggttttgattatatagatagtattttagtttttaatacgtttttttttggttttaaggttaaggaatttttaattgaaattttagttagaacgtgaaggatgttttttgggattgggaagagatttttcgtaggttaaatttaattttttattagagatagttgataattttattatattttatagtgaagtattaggaagataggattgaaaaggtaagaaggaatgatgtaaattgtatagtttaaaagataagttggatttaggtttgttagtttgtttaagtaattgagaatttattttgagattaaaaaattaaaataatgtttatagtagtattgtttattattgaaagtaaataatttaaatgtttattaataggagaatgaataaatatattggaatgtatttattatatagaatattttatgtatataaaaatgaattaaaatatatgaagtagaattagttagataaataaattttaatatattatattgaggggaaaaaagtaagttgttggagaatgtgtattatatatatatatataaattttttttttttttttttttttttttcgcgatcgagttttatttttgttgtttaggttggagtgtaatggtaagatttcggtttattgtaatttttgtttttcgggtttaagggattttttcgttttagttttttgagtagttgggagagtagcgttggtttagttagtttttgtatttttagtagagatagggtttttttatgttggttaggttggttgtttttaaatttttgattttgttatttattcgttttagttttttaaagtgttgggattataggtttgagttatcgtatttggttatatgtaaattttaaatatgtaaattaatattatatattttttatagatatttatatttgtaataataatatgaaaatatatttaggaatgataaatattaaatttaagatattggtaatttttatggagggagaagattaagattttggagtatataaaggggttttgattatatagattgtattttattttttaatacgtgaggtaatatggtataattttaggattttgtagagttaagcggtgagtttaagattgtaatgttatagtttttgtattttttatttgaaatattttataatataaaataaagtatatttgaggttaggtgtagtagtttatgtttgtaatttttatattttggaaggttgagataagaagattatttgtatttaggagtttgagattagtttaggtaataaagtgagattcgtgtttttataaaaaaattaaaaattagttgggtgtggtagtgtatatttgtagttttagttatttgagaggttgaggtaggaggatcgtttgagtttaggaggtggaggttgtagtgagtggtgattttgttattgtattttattttgggtgatagagtgagattttgttttaaaaaaatagaaggtatatttgattaaagttttatatttatagtaagtaataagaattttagggatagagaagggtggatgttttatttaaatattgtgtttttattttattaataatgaaatatttaggaaaggaaataataagtgattttagaaatttattagttagatagaatttttttgggaatgatttaaagagggaaaatgtaagaaaatttggtaagattaagaagagtttttaagtgtaaaaaaagtatagttgatagttattagagatagattatttttattagtttggaggaatattgtagaggaaagagtttaggattttgaatatttttttattttttgtatttattattatttttttttttgttgaatatttttagaaaatggagaggagtttgttataattgttttttgatgatagttatggagaatgataggggttttaaggtagatggtattaattttattaaagattaaaaaataaataaacgaataaaaattttttcggtaggtagtgaaatattataaaaaaagtaagggttatagatgatatattaagagttatagatggatgaggttggataagttatataatttttgtgttagtttttttatttgtttgttgtgaggaataaatgaaataatgtttgtaaaatgtttgttaggtagaagttattgaaaggaatagaagttttattttatttttttaaggaaagatagggaatggttagaatttttttagttaattgagtagtgtttttaaggagaaattaagagaaaatattattttttggatattttggttaagtagttatttgaagtatagttgattggttattttattttaaattatattttatagattttttttaattataggttggttgtgtagttttttgaattttgttttggtatttttttttttttttttttttatttttattttttattttttttttgagattttaggttggagtgtagtgttacgattttggtttattgtaattttcgtttttcgagtttaagcgatttttttgttttagttttttgagttgttgggattataggcgtttgttattacgttcggttaattttttgtattttaatagagacgggattttattatgttggttaggttggtttttaatttttgattttaagtgattcgttagttttagttttttaaagtgttgggattacgggtatgagttattgcgtttggatttattatttttaatagtattttattttatgagcgaagataagagtttaagatggtttagtttattgattttgtaagtgttatttttattaattttttggtatattgtagtttgtatgatggttgtatttttgttaataagtttcgtttttttgaattttgttgttttatagggagttgggaggttgtaaaaggtggttttgtaaaaatttttgtatttataatttaataaaggggatattgtaatattggaattttatattttaaatgaagagttttgtgtttattttttttttttttttatttttttttttttataaataatagtggtgtgtgtgtgtgtgtgtgtgtgtgtgtgtgtgtgtttgtatgtttgagatatttaagttatttttatttttattttttattttgagtggagtttagggttagttattattgtgtatattttgtggttaaatcgattttgtaggttattgaaattgttttaaaaaaattggggtttttattggttaggtacggtggtttatatttgtaattttagtattttgggaggttaaggtaggtaggttatttgaggttaggagtttaagattagtttggttaatatggggaaattttatttttattaaaaatataaaaattagttaggtgtggtggtatacgtttgtaatttcggttatttgggaggtcgaggtaggagaattgtttgaatttaggagatggaggttgtagtgagttaagatcgtgttattgtattttagtttgggtaataaagtaagatttcgttttaaaaaaaaaaaaaaaaaatggggttttttataataagtatttatagaagttttattttttaattattttttaatttagagttgtgtgttatatattaattttttggaggatttaaaaatggatttttttttttttatattattgagtgatggattagtggtatttaaggaagagttattatatttttaggttgtgtgagtttggattggattataagaaataggagaaaagtagttaaagaaggtggtattaaattatggtaattttggtagatttttagtttaatgatttagaggtggaggttattttattttttgtttagaggggcgatggttagtgagagatttgtttatttttttatagttagagtagtattaaattttgtttaaatatagatatttgagagagaggaagatttttttttgtataaattggatttgttttaaaatagagaaagagtagaggtagtttttagaaggatttgttttataggaagtaagagtaggggataagaatgaaatagatggtgggtttaagtagggaatgtatttattaagagtttgtaataaaattaaagataaaatgttgtttgcgatttattcggttaagagaagtatattagatatggtttgttgggatgtttttgattttatttattggttatagtatttaatttatttagggttttattttttattttgtaatttgagtttttgattgtgaagaggtatttaattataatttgttataagaataattgtggtatgattatagggtttttaatgagttggtagtttttgagaatagagtagtattatttggttattattatttttgagtaaatgtataattgtaatgttaaaatgaatttttttgagtttagagttaaaattgagtgttgggaagggttgattgtaaatttattaatttgttattttagtgagagattatttaaattagggagttagggtgtgtggtagggtggagggaaaggtttgtatttttgtttaattttttttaaaatttaatttataaaatattgaattaatttatttttagaagatagtggtatatatatggtagataagtggtaaagcgattttttagaatatttttggtgtttttttgacgtattttcgtttttttagtatgagaatagaattttttatattataggaaagagtaaaataatagtgtggatagtttttaggttttgataaaatttatttttttgtttttttagtgtgagtaataatttgtttaaaaagtagaaaaaaattgttggttttatttattttgtttttacggtgttattaaaagtataaggagtttatttaaaaaatagatatatttttatttttatttttttattagaggaaaaatttttattattaattaaatttgaatggagggttggtggttttttcgttatttatttagtgtttttttgttgttgtttttgattttgttttttgagacggagtttcgtttttgttgtttcgattggagtataatggtataatttcggtttattgtaattttcgttttttgggtttaagcgatttttttgttttagtttttcgagtagttgggattataggtatttattattacgttcggttatttttgtatttttagtagagacggggttttgttatgttggttaggttggttttgaattgttgattttaggtgattcgttagtttcggttttttaaagtgttgggattatagatgtgagttatcgcgtcggtttagtgttttatttttatgatagtatttgtttttattttatttttttaatgaaagttcggaattagtaataatattatattgtgtataaattgtaagtgaataattgatatgaagtgttgtttggtgtgaataaaaaagttagtggtgattttgggaattttatttgtttttttgtgttttagttatttaaattgaatttttttggagtattgtaggtttggggaggttaaataagttgtgttttataaatgaatagaggtggtatttatattagtaagatagttgtattatttttgtatgatgttgtttaaaagaattaatttaagttaaatggggaaaaggttagaaaataataattattttttttttattaaaatttattaaaaaaaattatgtttttaattttagaataaattttttattttttgtagtttagttagtgggtgtgggtaaaattagttgggtagtagttagtgtgtgtttagaattgtaggtgtagtttttatatttttattagtttttttggttatagattttagtgggataatgtttgaaaaattatatttatcgtttaggaaattgggaattgaaagtttaatatttgttttagtggagttttggtatttgtattattttttttgggtatattaagattaatagttgtatagatatttttgttttttatagattttatatatattatataaaggtgaatagtgtaaagttatttttatattttattaagtatataggtgcgtgttatttaatatttagagtattttattgttttatataagaatttagtttatatgagtttataatatcgaattaatttttttttaatttagtgtgtatttattatatttgaaatttgatagagttgggggttgtgggaggaggttggtaggaagaaattattttgtgagttgtgtatatttttgttttatttgaaattaggtagttaggttgagggggaattaagagggatgaggattaatgttttgggtttttaggaatttttattattaatagt

SEQ ID NO: 234 - DNA, 15881 bp, Artificial Sequence
  chemically treated genomic DNA (Homo sapiens)
gttgttgataatgaaagtttttgaggatttaggatattaatttttattttttttggtttttttttagtttagttatttagttttaaatggaataaaaatgtgtatagtttataaaataatttttttttattaatttttttttatagtttttagttttgttaggttttaggtataatggatgtatattgaattggggggggattggttcgatgttgtgagtttatataaattgagtttttgtataaggtaatggaatgttttagatgttaaatggtacgtatttgtgtgtttggtaaggtgtagaggtagttttatattatttatttttatatgatatgtgtagaatttgtgaaaagtaaaagtatttgtgtagttgttgattttgatatatttagaagggataatgtaggtgttagaattttattgaggtagatattggatttttagtttttaattttttagacggtgaatataattttttaaatattgttttattggggtttgtaattaagggaattaataaggatatggaggttgtatttgtagttttggatatatattaattgttgtttaattgattttgtttatatttattgattgagttataaaggatagaagatttgttttaaagttgaaaatataattttttttggtgggttttggtggggggggggtagttgttgttttttgattttttttttatttagtttaaattagtttttttagatagtattatgtaaaagtgatgtaattgttttattgatatagatgttatttttgtttatttatgaaatataatttatttagtttttttaaatttataatattttagaaggatttaatttaggtaattgaaatatagaaagataaataaagtttttaaagttattattggtttttttatttatattaagtaatattttatattagttatttatttatagtttatgtatagtgtaatattattattaatttcgaatttttattggaaagataaagtgaaaataaatgttgttataaaaatagaatattaggtcggcgcggtggtttatatttgtaattttagtattttgggaggtcgaggttggcggattatttgaggttaatagtttaagattaatttggttaatatggtaaaatttcgtttttattaaaaatataaaaatagtcgggcgtagtggtggatgtttgtaattttagttattcgggaggttgaggtaggagaatcgtttgaatttaggaggcggaggttgtagtgagtcgagattgtgttattatattttagtcggggtaataagagcgaaatttcgttttaaaaaataaaattaaaaataataataaaaaaatattaagtaagtaacgaaaaaattattagttttttatttaagtttaattagtggtagggattttttttttggtgggggggtgggggtgggaatgtgtttattttttaagtaaattttttatgtttttggtggtatcgtggaagtagaatgaataaagttagtagtttttttttattttttaagtagattattgtttatattaggaaagtaagggagtgaattttattaaagtttgggggttatttatattgttattttgtttttttttgtggtgtaggaggttttatttttatgttggggagacgaaaatacgttaaaggaatattaggggtgttttggaagatcgttttgttatttatttattatgtgtatgttattattttttggaggtggattaatttaatattttgtaaattagattttgagaaaaattgggtaagagtgtaaatttttttttttattttgttatatattttgattttttggtttaaatggttttttattggagtgataaattgatgagtttataattagttttttttaatatttagttttagttttaaatttaaagaggtttattttaatattataattatgtatttatttaggagtagtggtaattaaataatattattttatttttaggaattattaatttattgagagttttgtaattatattataattatttttgtggtaaattataattaagtatttttttataattaaagatttaaattataggataaaaaataaaattttaaataaattgagtattgtgattagtaaatggggttagaagtattttaataaattatgtttggtgtattttttttagtcgaataaatcgtaggtaatattttatttttagttttgttgtaggtttttggtggatatattttttgtttagatttattatttgttttatttttgttttttgtttttattttttataagataggtttttttggaagttgtttttattttttttttgttttagaataaatttagtttgtataagaggaagttttttttttttttaagtatttgtgtttgggtagggtttagtgttgttttgattatgaggaagtaagtaagttttttattagttatcgtttttttgagtaaaaggtgaaatggtttttatttttagattattgagttagaggtttattagaattgttatgatttggtattattttttttgattgttttttttttgttttttatgatttagtttagatttatatagtttgaaaatgtggtagtttttttttaggtgttattggtttattatttaataatgtgaaaggaaagggatttatttttgagttttttagaaggttggtgtgtaatatatagttttgagttaaaaagtagttagagggtaaagtttttgtgggtatttattgtgaaaggttttattttttttttttttttttgagacggaattttgttttgttgtttaggttggagtgtagtggtacgattttggtttattgtaatttttattttttgggtttaagtaatttttttgtttcggttttttaagtagtcgggattataggcgtgtgttattatatttggttaatttttgtatttttagtagaggtggggtttttttatgttggttaggttggttttgaatttttgattttaggtgatttgtttattttggttttttaaagtgttggaattataggtatgagttatcgtgtttggttagtaaaggttttaatttttttaaaataattttagtagtttatagagtcggtttgattataaaatatgtataatgatggttaattttgagttttatttagggtgaagggtggaaatggaagtgatttgaatgttttaaatatatagatatatatatatatatatatatatatatatatatattattgttgtttatagaaagaaagaaatgggggaggagaaaaaatagatatagagttttttatttaaaatatggagttttagtgttataatgttttttttattaaattataaatgtaaagatttttatagggttattttttgtagttttttagttttttatggagtaatagaatttagaaagacgaagtttattaataagagtgtagttattatataaattgtagtatgttaaggaattaatagaaatagtatttgtagaattagtaaattaaattattttgggtttttattttcgtttataagataaaatattattaagaataataagtttaggcgtagtggtttatgttcgtaattttagtattttgggaggttgaggttggcggattatttgaggttaggagttagagattagtttggttaatatggtgaaatttcgtttttattaaaatataaaaaattagtcgggcgtggtgataggcgtttgtagttttagtaatttaggaggttgaggtaggagaatcgtttgaattcgggaggcggaggttgtagtgagttaagatcgtgatattgtattttagtttggagttttaaaaaaaaaataaaaaataaaaataaaaaaaaaaaagaagaagaatattagagtaaaatttagaaaattatatagttagtttatgattgggaagagtttatgagatatgatttaaaataaaataattagttaattgtattttaaatgattatttagttaaaatatttaagaagtagtgtttttttttgatttttttttgaaagtattatttaattggttaggaagattttggttattttttgtttttttttagggggatggaatggaatttttgttttttttagtgatttttatttgataggtattttataggtattattttatttattttttataataaatagatgaggaaattgatatagaggttatgtgatttgtttaattttatttatttgtagtttttggtatattatttatagtttttgttttttttgtggtgttttattgtttatcggagggatttttgttcgtttatttgttttttggtttttgatgaggttgatgttatttgttttggggtttttgttattttttatggttattattaaagagtagttgtgataaatttttttttattttttaggaatgtttagtaagagaggaaatggtggtaaatataggagataagagagtatttaagattttaagtttttttttttgtaatatttttttaggttggtaaggatgatttgtttttggtaattgttaattatattttttttgtatttgaggattttttttagttttgttaggtttttttatattttttttttttaaattatttttaaggagattttgtttaattagtgaatttttagagttatttgttgtttttttttttggatgttttattgttgatggaatgaaagtatagtgtttaggtggaatatttatttttttttgtttttagggtttttattgtttattgtgaatataaaattttgattaaatatattttttatttttttgagatagggttttattttgttatttaggatggagtgtagtagtaagattattatttattgtagtttttattttttgggtttaagcgatttttttgttttagttttttaagtagttgggattataggtgtgtattattatatttagttaatttttaatttttttgtagagatacgggttttattttgttgtttaggttagttttaaatttttggatgtaagtgatttttttgttttagttttttaaagtgtggggattataggtatgagttgttgtatttggttttaaatatattttgttttatattatgaaatattttaaatagaaagtatagggattataatattataattttggatttatcgtttagttttataaaattttaaaattgtgttatattgttttacgtgttaagaagtgagatataatttatataattaagatttttttatgtattttaaaattttagttttttttttttatagagattattaatattttgagtttggtgtttattatttttaggtatgtttttatattattattatagatgtaagtatttataaaagatatatagtattggtttatatgtttaaaatttatatatggttaggtgcggtaatttaggtttgtaattttagtattttgggaggttgaggcgggtggatgataaggttaggagtttgagagtagttagtttgattaatatggagaaattttgtttttattaaaaatataaaaattagttgggttaacgttatttttttagttatttaggaggttgaggcgggagaattttttgaattcgggaggtagaggttgtagtgagtcgagattttgttattgtattttagtttgggtaataagagtgaaattcggtcgcgaaaaaaaaaaaaaaaaaaaaagaaaatttatatatatatatatggtatatattttttagtaatttgtttttttttttttaatataatatgttaggatttatttatttggttagttttattttatatgttttaatttatttttatatgtataaaatattttatatgatgaatatattttaatatatttatttatttttttgttgatggatatttaggttgtttgtttttagtgataaataatgttgttgtgaatattattttgattttttgattttagaatgaatttttagttatttagataaattggtaaatttaggtttagtttattttttggattatgtaatttgtattatttttttttgtttttttagttttgtttttttgatgttttattatgaaatgtggtagaattattaattatttttagtgggaggttaaatttggtttacggaaaatttttttttagttttaagaagtattttttacgttttaattgagattttaattgagaattttttggttttgggattagaagagaacgtgttaagaattgaaatattatttatataattaagatttttttatgtattttaaaattttagttttttttttttttagagattattaatattttgaatttggtgtttattatttttaggtacgtttttatattattattatagatgtaaatatttataaaagatatatagtattggtttatatgtttaaaatttatatatggttacgtgtggtagtttatgtttgtaattttagtattttgggaggttgaggcggttggatggtaaggttaggagtttgagagtagttagtttgattaatatggagaaattttgtttttattaaaaatataaaaattagtttggcgtggtggcgcgtatttgtaattttagttatttaggaggttgaggtaggagaattgtttgaatttaggaggcggaggttgtagtgagtcgagatcgtgttattgtattttagtttgggtgatagagttagatttcgttttaaaaaaaaaaaaaaagaaaaaagaaaaaaaaattatatttatagtaataaagtaatttttaattttgttaaatttttaagatgtttttgttcgggttttagtgaaatttaattattttatgataagttttatagttaaggttataggggattaaatttgtgatgaaggtattaagttaaatttaattttcgaaagttgtatgttgattagggaaatttttttgttgtagttatttataggaggttttagggttttttggtttttttatagtagtttatgttttatttatttatttatttatttatttatttttgagatagagtttcgttttgttatttaggtttcggtatagtagcgtaattttggtttattgtaatcgttattttttagttttaagtaatttttttgttttagttttttgagtagtttggattatagtcgtatattatgatatttgtttcggttttttaaaatgttgggattataggtttgagttatcgcgtttggttttatgtttttagtattttatattttttttttgtggttttggaaatttttaggtttttgtgatttattatttttttttgttttgtattagcgataatatattttggttaattgatgatggaaggagagttagagagttaatttgtaagtttatagttagtgttagattagattagtggtaatatttttaatattttttttttgttttgagggtgattgttggggtgtttgttttttattttggatttgtgtgtttttttggtttttttttttaatttagtttttgttttttttggtttaaatattttatttattttttttatcgatattaaaataatatacgtagttgggtgtagtggggtgtatttgtagttttagttatttaggaggttgatattggaggattgtttgagtttaagagtttaaggttagtttgagaaatatagggagatttttattttaaaataaaataaaatatagtaaaataaaatatgtttattgtagaaaatatgttaagtatagggatataaaaaagaaaaaattatttataaatttatttagaggtattaatatatcggtatattttttttatttttttttgtgtgtgttttttataatatttgagattatattgtatatttagttaatttatttatttttcgtaatatttatgtatgtatgtatgtatgtatgtatgtatttatttatttatttattcgtttaaggtatttttttttaaaaaaagatttaatgtttttatttaatattatttttaattatttttttatgttattaggatttttatataagtattatttttagagttaaaaaagtatgtgtattttgtattttgatatatattgttaaaatagtttttagaaatattgttttaattttagttttaaatagttttagagagtttttttttttattatttttattttttttttggtttatttttaattatttttaaaattttggttttattgtagataaatttttttttttttttattgagttaatgattttaaattttagtatattttaatttttagtttgtttaaaatttaattttttttgattttagaattttttttttttagggtgagttaatagattatagtttgtttttagtttagggaggtagggtagtgagaggagtttttttttgagatttaaataattaatataattttaaagatattttgtgagaattttttaagagcggagagaagagtttggtattaaagtttttgggtttttaatgtttttagattgtttttagttattgtatatgaatttttatagaaattgaaagttatacgtggtttaattgttttagggtttttagaggagttttttttttttttttttttttttagatggttttatgtataattaagtagttttggagttaaatatgttaaggttttttttttagttttttgttgagtattgtgttattgaaaattttagtttttttttatttttagtagttagtaattagattttagtaattagattattgtgggtgtagaagggggtatttgataattttttggagaacgtttaaattttggttttcgaaagttgtattttttttttatatttaagttattttttgatatgggtttagtttattgaaaggaaattttataggaaatttgtttaaatggaaatagtaaattatagtgataatttaaaattgtattaattttttataattggatggaaagttatattagttcgtattataaggagtttataaagaattttagggtgggtgcggtggtttacgtttgtaattttagtattttgggaggtttaagtaggtagattatttgaggttgggagttcgagattagtttgattaatatggagaaatttcgtttttattagaaatataaaattagttgggcgtggtggtatatgtttgtaattttagttatttgggaggttgaggtaggagaattgtttgaattcgggaggcggaggttgcggtgagttgagatttcgagatcgtgttattgtattttagtttgggtagtaagagtgaaatttcgtgttaaaaaaaaaaaaaaaaaattttaaataaaaatattaatagttatacgtaatggaaatttggattttaatataagtaagtagtttaaatagtttgaatataaaaggagttagaatagataggataagttttaagggatattgtttgggtataatgttttaggttgttatgagtatttgtattttgtggtttatttggaaagtgatattattttattaaataattgaggttttagagaggttggagtttgggtaatttatttaaggatgttttgattggggttattaattatttttattttaaatgttatattatttgttttaggtaggttttttgggggatattggtaggtttgaggtagagtaaaaattatagtaaatattgagatttagtatttattattgttaggttttgttttaaaagttttatatgtatttgtatatttattgtttataattattttatggggaaggtgttaggtaggtagggaggaggaaatggaaagggaaaggaaaagggaaaagagcgggggaagaaaggagtaagaaaaagttaatgtaattcggtaattatttgttaagtgttaattgtatgttagggtttggtaattaatagaatagaggagggtataatgaagaggggatataggtagagaaaagaggatgagtgggaagaggaggaggttggagaggaggaaaggaaaggagaaataatgaagataagagaaaagtaagttatgtatatggagggtaatggtaagaggagaaatttttgttataattttaagggttggtcgtattgtttgggttgaggtagaggttgtttttttttggtttagttttttatttattgttattacgaggttggtatagtttttatatagttttttaataagttagttttgattttggcgatatttggtttggtatagtttaaggtaggtagtttatattttggtttagttaggtttttttttagtttataaaggttaattttataacgtggagcgtgagtttttattatgtttttagagaatttgttttttagtatttttttttttaaaggttttattgatttatgtatttttattgagtttttaagtattatttgatagaagggtttgtttttatttgattgttttttgtaatattatttttttattaagtttgttagaggtatttttttttaatatttgttatttgttcggatggttattttatgttatatttttttttttttgtttcgtttatttttagtttttgtcggaaaggattttttcggtttttttaattattagaagggattgttagggttttgtgttgatgatatttttatttttcgttagttttttttattagttgataaatggtattagttatgttgtttttttggtttttaggggttttaagtaaggtatattgttgttgttgtttagtttttgttatattttagatttattttagttttgatttaatgtaggtagttttttagatgtattgagatgttaggatttggaaggtgggattcgatcgtagtagatattggttttggagatatatttttatagtttagagaggaaggatagtttgagtaaattttatttttttatagttatttagttttttttttttgttttttgatttaaattaatgtttttttttttttttagtagtatgttatttggttttttgttgtcgtttttattttatttttttaattgttttcgttttttatttgtttgggatttttgatattattattttgagtttatttttgaaagaattttttttaatatgattggggttattgagattttagatggggttggtttgagtagataggttattaagttatttttttagaggtaaagggataatatatttaaagtattatgaagatagttagtatagggagaggggtttataggaaagaggagagatgttgggggttggtagatatagagtaaagagattggttaggaagagcgtttttcgagttttttgtttttcggggtagaggagttttagggatatatagttgaatttgatagtgaagggattttaaaggataaaataagatagaggtagagataagattttttcgtgttgagttattttttaagaaagtattttttttttatagataaaaatgtcggaatataagtttatagaaatatttgtgtttttttttattttttgtggatgttgattttttttatttaagatttggttttagggattaatttttaatgtttattttttttttgagttttgtaaatcggtaaagtagattaggtatgttatttgaagtttggaggtttttttaggggttttttatattatgttttaattgtaatgatttttttagggatttttttaggaaatgtagttagtattgaatgtagattatgatggtggagtttttgttgattgatttgtttgtttattttgatatttcgggtattgttatatttttttgttttaaggtattgtattttaatgtagaaatagattataggttttattataattttattcgaagttttaagttaataggattttatttttttttttttattttgtttaaaaaataaataaataagtaaataaaaaaaatggggtatatgtgtagaaggtgtaagtttgttatataggtatatgtgtgatatggtgatttgttgtatttattgatttattttttaagatttttttttttatttttaagttttaataggttttgggattttttttttttttttttttttttgagatagggttttgttttgaagtttaggttggagtgtagtggcgtgattatggtttattgtagtttttattttttgggtttaagtgatttttttattttagttattttagtatttgggattataggtatatattattgtgttgggttaatttttttattttttgtagagatggggttttattatgttgtttaggttggttttaaatttttgggtttaagcgatatttttgttttggttttttaaaatgtagggattataggagtgagttattttttttagttattaataggattttaaataaaaatatttaaagtatttgtagattgatgatagagtggttgatatttatatttgtataagatagatggatagtatgtgttgtatgattgttttattttattgataacgtttattttttcgttagttatttttaatagttgttttatttatttgtttgagggttggttataggtatttattttttttttttttttttttagttttttttttttttgagacggagttttgttttgtcgtttaggttggagtgtagtggtatgatttcggtttattgtaagttttatttttcgggtttacgttattgttttgttttagttttttgagtagttgggattataggtgtttgttattacgtttggttaattttttgtatttttagtagagacggggttttattatgttagttaggatggtttcgattttttgatttcgtgatttattcgttttagttttttaaagtgttgggattatatgcgtgagttatcgtgtttaggtttttttttttagttttatgttatttgttgttatatgttttgtttttttttaagatttattttggggtggggattgggaggtgataggtatttaatgggagagttaaataagagagagagaggagtataagggaaaagagtaagtagacgtaggtttttttttattttttgtttacgattatttttttagtatatttatttatattgatagaaagattgtatttagatagtgtaaataaatagttgagtgttatttgaagagatttttaatgtaatataaggttttatttttggtgttattttgtttagtatttttattgattatttttgaggaaaatataaaaagtagttcggttagtttatgaatggtgtaaggttttgtgtgttagattggatgatagaagagggtaattagtttttaaaaagattttgattatttggtgtgagaagttaaattttataaagtgtattttattagggttaaaggtgatgttttataattgggttttaaatttgaattttaaatgattttaggagaaagtggagtagtagtagtatttgtgaaaatggtttaggggtttttgttgatagtaattaaaaggtatgttattagttaatatggtttttagaaaagttaaggtgatattgaggtttttttatggaagtaaaatatttagatagaggaaggtaatatgttatttattttgtaaagttagattatatttagagttttgtatttagttttgagtgtttcgttttaggggaaattaatgagtaggagtatgtttaaaatagagaatagtttaagcgatttttttatttcggtgttagtattggtgtataaatttttatttataggatgtataagttttggggatttaatgtgtaatatagtgattatagttaataatattgtattattgaaatttgataagagagtagattttaagtgtttttattatttttatggtaattatggatggtgatggatgatagatgtgttaattaatttgattgtggtaattattatatagtgtatatatatattaaattattatgttgtatattttgaatataaataatttttgttaattaaatatttttaagtaaataaaaataagtaaaatttttataaagttatataatattagatatgatagaaagaattaaggttgattaaatgaagaggggttatgtttacggtttttatatttttatgttattaatataaatttttaaaggttagtgagattgtttaagaatttggaaagaaaaagaaaatgttggaagtttggtaaagaaatttttaggaaatgtagtaggtagtggtaatatatttattattttatttttagagattatttaataaaaaagggggtgattagagtgttagtttaggttttacgcgtgtttttggagggttgtgtaagtaagatattttagatttttacggttttttagtttttattttattgttatttttttttgtgttttagtttaattttgtttttttattattttttatattgtagatgtttttgttttttttgtatgatgtagtggttaagtgtaaggttatagtgttagattatttaggattaaattttagttttataaaaaaataataatttgtgtgattttaggtaagtaaatttaatattttttgtgttttagtttttttatttgttaaatattaatattggtatatattttttggggttgttgttaggattaaaaggggtagtatgtaaggtggttaggagaatgtttggtatatagtaagtgcgttataatttttttagttattataattattaggttataatagtaatattttataatgttaaaggaacgcgggttttagagttagtttatttgggtttgtattttagatttattaaatatcgttgatattgggtaaatcgtttaatattttatagttttaattttttaatttgtaaaatgagaataatagtattatttgttttttagaattattgtgagaattgtatgatataatttatttaaaatgtttagtattttgaagtttttttatgttggatttttttgagatttagtatatgttttttgttaggtttgtaaggaagggaagagtcgttaggtattttttatttttaggtttgatgattgttattataggagttaaataattttattgttattttttagaatttagagttgttgatttatttttttaatagaagggtgttgttttaatgttaattattgttttttttttttaaagtatttagtttataattgtatatttataagtttattagattattgtatttttttttcggaatagtgtttgttatataatgggtatttaataattatttgttgaatggattaattggttatgtgatagatgaattggaataattggttttttttaggtttttattgaattagtagtttgttgcgaaaggtgtttttagtgattttgaggtggaataggaatggaacgtggaggtggaggatttttttattcgattttagttttggtttttttcggggacggggaggttagaggatttgggaaaaatattgttttttttattgaacgttattacgtagtagagtttattaaaagagataaagtgacgaaacgttgaaagttgcggggcgggaggaagtcggggtgagtggattattttttaggcggagtttttttttaagttttcgttcgcggtttcgaattgagtttttttagtcgttcgagggcgttgcgttgagttttatattttatgattgtttttatcgatttttatgaggaagtgcgatcgggaattttttatatattttcgtttgtttcgcggttttttttttttcgcgtcgatagcgtttacgtaagtatggtaggatttgttggtgggggtcgagtaatatttagtttaattttttttttttttcgtcgttcgtgttatgtcgggatgggtttaggtttttgtgtggattcgatatattagagtaatttaattttgtcgggattaattttaaagggat

SEQ ID NO: 235 - DNA, 5565 bp, Artificial Sequence
  chemically treated genomic DNA (Homo sapiens)
aaaaatgattgaatggattaatttagaatatttatgaggatttattaaatgtttttattttattcgaagaagttttgtatttttcggtttgttaggatttgtaaatagggtgtgagtttgaggtttggggattttgtgttttaatatttatttggattttatttttgtttttatttttgatttttatttatttttttatattagttaaagattgaagggaagaggaagagaagagggtcgttagtggaagggtattgtgtatgagggttttttagtgaggtttttgggaaggtttagtttttggagagttgggtaggaaatagtttatgtgaatgagttagggttggtgagaaagggaattagtgaagaaggtggggatatagtgggagtaggaatttttatagtttttttatttatggttgttaaatttgtgttttttttcggagaggattattgtatttgtaggaaataagggataaagtttagtttgtggttcgtttttatttataaagtattaatagttttacgtaaagggtgtgttataatataatttttaaaatggtagaattgttatttttatataaatatatagtgagaatttttataagataattgttaggatgataaagttggtttaaagaatgatttgagaaattggtgtgtgtgtgtgtgtgtgtgtgtgtgtgttggaataatatagttaagttatttataaaattggttattgttttgtaggttaataagattgaaataggaggtaggatttaattttcgaggtggggtttagatattaattagattgaggattagttaaaatagggttagggtagaagtagttttttataagatttgttagttagttcgttatgttagtttattattgttatggaaatatttgggagttattgtttttttttatggtaatgatttgatgatttaaaagttttttttttttttttagaaatttttgtataaattgttttttgttttgttttgttgttgttgttttgttttgttttgttttttgagatagagattagtttttgtggtttagattggaatgtaacggtgcgatttcggtttattgtaatttttattttttaggtttaagagattttattgttttagtttttcgaatagttgggattatagaagtttgttagtacgttagttaattttttgtatttttagtagagagggggttttattgtgttggttagtttggttttaaatttttgattttaggtgatttatttaatttatttttttaaagtgttgggattataggtaggaattatcgcgttcggttttaaattgttttttaatttgtatgtaatggaaagtgggtataaatatgattgtaaaattgttttgagttattgttattttttgtttatagagtattttttttttgtaggagtagttattgagttgtaatattgtttttttaataaaattgtttttttttattttcggtttgtttttgaatttttttttgggtaaagttaagaacgtttattagttaagttttattttggggtttatttgttttgtattaagattattatttttggggttattattattattttatttatatttttattagataaaaattttttgtattttatttatttttgataggttaatatttgatattatagattttgagttttaatttagaaaaataagaaagagaaaattttatttttttagaatagtattttttaattaagattttaaagaaaggattgagttttaatttgtttagcgtattatttgttgataattaattaattttttttttttgaaattagagtggtgttagttgtgtattatttgtgggagagttgagaaaatagtttttttaattattttttgtgttttaagaacggagtgattttgattttttagaatttttttgttttgtttttaagttttggataatttttttttttttttttttttttttttttttttgagatagttttattttgttgtttaggttggagtgtagtggcgtaatttcggtttattgtaatttttattatttgggtttaagtaatttttttattttagttttttaagtagttggtattatagtcgtgtattagtatgtttggttaatttttgtatttttagtagagatggggttttgttatgttggttaggttgatttcgaatttttgattttaagtgatttgtttattttagttttttaaagtgttggattataggtatgagttattatgtttagtcgaaaaattttttttaagaaggaaaattaaaggtgtttagttttttatattttataatgtgagagagtttagttatagtaatttgtatttttagtattagaggatttaattaggaaaaaatttgataaaaatgttttgagtataggaagagttttagtgagaatttgtattttatttaatattaggaaatttataggggagagaagttatgtgtatttataatatgagggaagagggattttgtgggtttaattttttttagttattagaaggaaaggtttttgttacggagaaattttagatttgtttttagtgggaagagaattgaatttataattttatattgattgaatattttaatatttatattagggagaaatttcgtaaatattttgattaagttagttttagttttagttttagtaggtaggggagattttataaagtagatattatttaaatgtgtagagtgtaggaatggttttggttagagagttattatagatggttgaaggaggtagatttataagttgggaaaatttttttattggggtttttttattttggaattttggtttataaagtatcgtatttttgtagttgtatttagaatattttttttgttgtttgttttaggttagtttttggtgtgtgttaataatttgtaagggttaataaagaattgttgggttaaatagatttggtttatattttggttttgttatttattggttttgtgatattaggtagattaattaatttttttgagttttattttaatttgtttaagatgggattaatatagtatttattttataggtgatgagaattagtgagaggatgaatgtaaatgtatggtgagtatttagtgaattaggttgttttttattattttttttttttttggttgatttattttttagaatttataagtttatagtttttttgagtttattagtttgagtattggggatggagaaacgttgttttgtgtgtagttgtttaaacgatggttttgatgttatataatttttttatggtttaggaggtttttaagtggttttagagaataaagtataaagttggggaagattttttttgggttttgtttaaggattttcgaggagatatataaatatttttttgtttttgtttttggttagttttttagagtagtagttttggtgttagtagtaaatttttttgaatgttttaaatatagttagaggataggtttgtagtgagatgacgatagaatatgatagttatattaggttattagagataatttgtttgttttgtagatgaggtagagttattagatttagtaaaaatataaaatgttaattatatttgaattttagatatataataatgataataaaatttattttattataagtatattttaatgtaagtatttttattataagtatattttaatgtaagttgttttttttttttttttttagagatagtaagtgttttattttgttgtttaggttggagtgtagtggtatgattaatgttaattgtagttttgaatttttgggtttaagggatttttttgttttagttttttaaaaggttgggattataggtatgaatttttaggtttgtttatttcgtgtgttttatttggtaatgttgagaggatagttagatgtcgaggatagttagatttcgaggatagttagacgttaagggggaaagtaatttgttggtttatatagttagttaggtttattgtggagttttagtcgtaaatatatatattttagtttttaagtttttaaatatttatttagttagttatttgttttttgagatagttttgttttgttatttaggttggagtgtagtggtgtaattttagtttattgtaatttttgttttttagatttaagtgattgtgttttagtttttttagtagttgggattatatgtgcgcgtttgtattgtttagttaatttttgtatttttagcggaaacggggtttttttatattggttagagtggttttaaatttttgattttaagtgatttatttatttcggttttttaaagtgttgggattataggcgtgagttatcgtgttcggttagtttttttttttttttttttttttaattaggttgaatgtttgttgagttgggtgttttatattcgttgtttgttatataaagaattattgattatgggtttttacgagtaaaaatggtagaatatttatagggtataggggagatgggagtagggattaggttttagaatatttttttaaatgagggtgattagggttcgatattttattgttttaaggtttagtattttaattattaaatgggtataatggggtataaagggttattttgaggaataacggaggtgagtaatttttaaaaagtttatttttttaaaaattgcggagtatattttgtgtatatgttgtttttattgttatttatgaagacgcgggggaagttttggttgtgtaaagttgagaattgtatttaagttttttcgtttattttatttattaggggatttgggttaaatttttggtttggtttataaagaagattaagcggttagttttatttcgttttattttgatttataggatttatattagcgattaattttttttaatttgtaattgggtagtgtttcgggttagttaatagttaagattgtttttttcgtattttattttttttgattttgggggattttttatttagtttgtattggagttgtttggtgattagaagtttggagtaggtttggtgttgggtaggggtggggagtagggtggaaagtatggagtgaagaggtttagggagggggtttttttattttcgtttttttgttcgttttgatttcgggggtttttataggtttgtttttatttgggatttttgtttttttttattttagtttttttcgttttaggtttgttgtgtttagttttttaggatttttttttttttacgtttttggttttattgtttggttaaagtaggatttttttttttttttattatttttttttcgattgaatagatggatagagattcgggtttacggggagaggaagggttagtcggtgtcgggaaagggaagcggtttggggaaaataaaatagagggaggagttagggagaaggtggttttaggagggaggaggagggaattcgttaagagggattggggtttgagacggaatgggggcgggtttcgggcggggtgggggtttttgggtttttagggtgggagttggtttcgaggttggttggtttcgtagg

SEQ ID NO: 236 - DNA, 5565 bp, Artificial Sequence
  chemically treated genomic DNA (Homo sapiens)
tttgcggagttagttagtttcggagttagtttttattttgggagtttaggggtttttatttcgttcggggttcgtttttatttcgttttaggttttagttttttttagcgaatttttttttttttttttttggggttattttttttttggtttttttttttgttttgttttttttaaatcgtttttttttttcggtatcggttggtttttttttttttcgtgggttcgggtttttgtttatttgtttagtcggaggggaggtggtgggagggggagggggttttgttttaattaaataatgaggttagaggcgtgggggaggggaggttttggggggttgagtataataggtttgaggcgggaggggttggggtaggaggaggtagaagttttaggtggaagtaagtttatagagattttcgagattaaggcgggtaggaaggcgggggtgaggagattttttttttagatttttttattttatgttttttattttattttttatttttgtttagtattaaatttattttaaatttttggttattaggtagttttagtgtagattgagtagagagttttttagggttagggagggtggggtgcggggggggtagttttagttattggttggttcgggatattgtttagttataaattaaggaagattgatcgttggtgtgagttttgtaaattaggatgggacggaatgggattgatcgtttggttttttttgtgggttaggttaggaatttagtttaaattttttggtaggtggggtgaacggggaagtttgggtgtagtttttagttttatataattaaagtttttttcgcgtttttatgagtaataataaaaatagtatgtatataaaatgtgtttcgtagtttttaaaggaatgaattttttggaaattgtttattttcgttattttttaaagtaattttttgtgttttattgtatttatttgatagttaagatattgagttttagagtagtgaaatgtcgggttttgattatttttatttggagaagtattttgaagtttaatttttgtttttattttttttgtgttttgtaggtgttttgttatttttgttcgtagagatttataattagtagttttttgtataatagataacggatgtgaggtatttagtttaataagtatttaatttaattaaaaaaaaaaaaaaaaaaaaaagttagtcgggtacggtggtttacgtttgtaattttagtattttgggaggtcgaggtgggtggattatttgaggttaggagtttgagattattttggttaatatggggaaatttcgttttcgttaaaagtataaaaattagttgggtagtgtaggcgcgtatatgtagttttagttattagggaggttgaggtataattatttgaatttgggaggtagaggttgtagtgagttgaaattgtattattgtattttagtttgggtgatagagtaagattgttttaaaaaataaataattaattaaataaatatttaaaaatttgaaagttggggtgtatgtgtttgcgattagggttttataatagatttggttggttgtgtgagttagtaagttgtttttttttttgacgtttggttgttttcgaaatttggttgttttcgatatttagttgtttttttagtattgttagataaaatatacgaagtaggtaggtttgggggtttatatttgtaattttagttttttaggagattgaggtaggaggattttttgagtttaggagtttaaggttgtagttagtattgattatgttattgtattttagtttgggtaatagagtaagatatttgttgtttttaaaaaaaaaaaaaaaaaataatttatattgggatatatttatggtaaaaatgtttatattggaatatatttatggtaaaataaattttgttgttattgttgtgtatttgaaatttaaatataattggtattttgtatttttgttaaatttgataattttgttttatttgtaaaataaataggttgtttttgatgatttaatatagttattatgttttatcgttattttattgtaggtttattttttggttgtgtttggagtatttaggaaagtttgttgttagtattagaattgttattttaagggattgattaaggatagaaataggagaatatttgtgtgttttttcgggggtttttggataagatttagaaagagttttttttagttttgtgttttattttttgaagttatttgggaattttttaaattatgggaaagttatataatattagagttatcgtttgaatagttgtatataaaataacgtttttttatttttagtgtttaagttggtgggtttaaagggattatgagtttgtggattttgggaaatgggttagttaaaggaaaagaaggtggtggaaagtaatttaatttattgagtgtttattatgtatttatatttatttttttattaatttttattatttatgaagtaggtgttatattaattttattttaaataagttaaaatgaggtttagagaaattaattgatttatttaatattataaagttagtaagtgatagagttaggatgtggattaggtttgtttgatttaatagttttttattaatttttataaattattgatatatattaggggttaatttgaagtagatagtaaagggaatattttgggtatagttgtaagagtacgatgttttgtgggttaaagttttagggtgaaaaagttttagtggagaggtttttttagtttgtgggtttattttttttagttatttataatagttttttggttaaagttatttttgtattttgtatatttaaatgatgtttgttttgtgaagttttttttgtttgttgaagttggagttgaaattgatttaattaggatgtttgcggaatttttttttagtgtggatgttgagatatttaattagtgtaaggttgtgaatttagttttttttttattgggagtaggtttaggattttttcgtaataaggatttttttttttggtgattgaggagagttgaatttatagaatttttttttttttatgttgtaggtgtatatggttttttttttttgtgaattttttgatgttgaatgaggtataagtttttattaaagttttttttgtatttagagtatttttattaggtttttttttagttgagttttttaatattgaaggtataagttgttgtagttgaatttttttatattatagagtgtgaaaaattaaatatttttagtttttttttttaagagaaatttttcggttgggtatggtggtttatgtttgtaatttagtattttgggaggttgaggtgggtagattatttgaggttaggagttcgaggttaatttggttaatatagtaaaattttatttttattaaaaatataaaaattagttaggtatgttggtgtacgattgtagtattagttatttgggaggttgaggtggggggattgtttgaatttaggtggtggaggttgtagtgggtcgagattgcgttattgtattttagtttgggtaatagagtgagattgttttaaaaaaaaagaaaagaaaagaaaaaaagaaaaattatttaaaatttggaaatagggtaaaagaattttgagaaattagggttatttcgtttttgggatatagaaaatggttggagggattatttttttaatttttttatagatagtatataattagtattattttagttttagaggagagaagttgattgattattaataaataatgcgttgggtaaattagggtttagttttttttttggaattttggttgagaaatgttattttagaggaatagaatttttttttttttatttttttagattagggtttagagtttgtaatgttagatgttgatttgttaaaaatggataagatgtaaagggtttttgtttggtagagatgtgaatgagatgataatgataattttaaaggtaatggttttgatgtagggtaggtgagttttaaagtggggtttagttggtaagcgtttttagttttgtttaggaaagaatttaagggtaagtcggaggtagaagaaaatagttttattgaagaggtagtgttatagtttagtgattgtttttgtaaaggaggggtattttgtaggtagagagtagtagtagtttagggtagttttgtagttatatttatatttattttttattatatgtagattaaaaagtagtttaaagtcgggcgcggtggtttttgtttgtaattttagtattttgggaggataagttgggtgaattatttgagattaggagtttgagattaggttggttaatatagtgaagttttttttttattaaaaatataaaaaattagttggcgtgttggtaggtttttgtaattttagttattcgggaggttgagatagtagaattttttgaatttggaaggtggaggttgtagtgagtcgagatcgtatcgttgtattttagtttgggttataagagttaatttttgttttaaaaaataaaataaaataaaataataataataaaataaaataagaagtagtttatgtagaaatttttagggaagggaaaagaatttttggattattaggttattgttatggaaaggggtagtgatttttaggtgtttttatggtaatggtaaattgatatggcggattggttggtaaattttatggaaaattgtttttgttttggttttgttttagttagtttttaatttggttggtatttgagttttatttcgggagttgagttttattttttattttagttttgttggtttgtagggtaatagttagttttgtaggtaatttagttgtgttattttagtatatatatatatatatatatatatatattagttttttaaattattttttgaattaattttgttattttgatagttattttgtgaaggtttttattgtgtatttgtgtgagaatgatagttttattattttgagaattatgttgtggtatattttttacgtggggttgttgatgttttgtaagtaagaacggattataggttgaattttgttttttattttttataaatatagtagtttttttcggagaagggtataggtttggtagttatgagtgagggagttgtgggggtttttgtttttattgtatttttattttttttattgatttttttttttattagttttgatttatttatatgggttgttttttgtttagttttttagggattggatttttttaggaattttattagagagtttttatgtatagtatttttttattaacgattttttttttttttttttttttttagtttttaattggtatgaggaggtggatggggattagagatgaagatagagatgagatttaaataagtgttgagatataaaatttttaaattttaggtttatattttatttgtagattttggtaggtcgaggaatataaagttttttcgagtagaatagaaatatttgatgagtttttatagatattttaaattggtttatttaattattttt

SEQ ID NO: 237 - DNA, 6229 bp, Artificial Sequence
  chemically treated genomic DNA (Homo sapiens)
cgtaatgtagttaaagaagatggatattgggtcgggcgcggtggtttatatttgtaattttagtattttgggaggtcgagatgggtagattatttgaggttaggggtttgagattagtttgggtaatatggtaaaatttcgtttttattaaaaatataaaaattagtcgggcgtggtggtgtatatacgtttgtaattttagttatttggaaggttgaggtaggagaattttttgaatttaggaggtagaggttgtagtgagttgagatcgagttattgtattttagtttgggtaataaagtgagattgttttaaaaaaaaaaaaaaaaaaagaagaagaagaagaagaagaagatggatattgggttgggcgcggtggtttacgtttgtaattttagtattttgggaggtcgagatggatagattatttgaggttaggagtttgagattagtttgggtaatatggtaaaatttcgtttttattaaaaatataaaaattagttgggtatggtggtgtatgcgtgtttgtaattttagttatttggaaggttgaggtaggagaattttttgaatttaggaggtagaggttgtagtgagttgagatttagttattatatttttatttgggtaaaaaaatgagattttgttttaaaagaagaagaaggaggaggaggaggaggagattggaagggatgttagaggttatttggggtagtttttttattttttatttatttttttattttggtagatggagaaagtggggtttagaaagatgagataatttgtttagggttatattgtgagttaggtatgggttgagtagatgagattttagttttacgaattttttgaatttagggagtatgggaggggttgttagggggagttttgggtttttattttttaagttagtatttttatttttatttgtttgatatatattagatgttatataagattgtaaatgaaaaagaagtttttaaagtttaaaaattttggttttagattattttttatttgtttattttaatagtttttttttatttttttttttttttttttttttttttttttttgtttttggtaaaatttttagaaaataaataaataaataaaaatatgtttatgagaagaagtagatagatgtggttagtttaggtttgaatatattggtttttagtttgggagagatagagtttttttatttaaagaaaagtatttttagggtttaagttgataatgatgtagtgtgtcgtgttgataggtaatgagtattttattagttaaggtgagtaaggttagatgatttgtttaaatattagtagtaattgtttttagatggtagaatttataggtttttgttgttgggttttgttttttgtttttttttgagatggtgttataggatttttggggtgttattttttggtcggaaatttttgtggttggtggtatttttgtttaagttttgtttaggtttattgggtttgttttatttattttttttggtaggtagtatttagtttatattattagtttgggttttatatttgtttagggtaagttaggtatggaatagtgaagggtgtgtgagtgaatatggggtttggttattgtatatagttagatatgtcggttgttgtagcggggtgagtagttttaggtgttagtatgggcgttagttttttgagaggttgtggttagattaagtatattataagtagtttttatagttggtatcggggaatacggtggtatttagaagtttcgagatgttaggaattatagggtttcgaaaagggagttatagttttagtttggggagtttttaggtttgggttttttagagggtcgtagtttttttttttttttttttatttgtattatggtaagtaaggggtatgttttagttttgtttgtgttatagtttttttagttttattatttgatgggttttaagtttttattttgtaattaggaagaatgaggtatgtagataagtggggagtgagtaagacgaagaggagttttattgagcgatagaatagtttagttttttgtagagttttttttagggggtagtttttttttatagttagggtgttttgatgagtgtttagttgttagtagagaggagattttggaatgggaagtttttttttgtaggtaggttattttgtcgattttttagtttttagaagagggaagattttggaatgggaagtttttttttgtaggtaagttgttttgttatttttgtagtttttagtagagaggaggttttggagcgggtagtttttttcggtagttggttatttaatgtttgtttagttttggttgagtttgaagtttttatgagttttagagaggaggaagtgtatattgattggtttatgggtggttataggtaagtttagaaaatatattataagtttttattttggtgtgtgggattggtagtttggtttttagttttgaggttttttttggtttgaaggtagggttttattagggatttatttttttttatttaggagtttgtttgttttttgttgttgtttatggtgtttaggttgtttatgttaaggagcgtttgtaggttagtgtcgagttgtttttagtttttttttggttttttttttatgttagttagtgtttaaagtttagagggggttaaggtagtaggggtttagtgtgttagtattgttttaagtatgtttatatttagttaggttgcgatagtatttaggtttagtattaattttgttttaagattagagtgcgcgttaagaggagggagaagtttagtagtggagtagatatttttgagtttgaagggtggggcggggggttttttcgggtttttaagattgtagggatgtttgggtttatagttgtagtttaggtagttgtagttgtatgggggatggcgggggttttttattttgtttatgaagtaggattagttgtggtttggtagttgtagtggtttttaggagggcggggtttttattgtttttagtttttattggttatatggagtatgtagttttggtcgtgtttttttgttgtagttagtgtgatgatagtagttattttagacggttcgttattgttattttttttttttttttttttttttgagatggggttttgttttgttttttaggtaggagtgtagtggtaagattaaagtttattgtagttttaattttttgggttttagtaatttttttagtttagttttttaaatagttgggattatataggtgtatgttattatatttggttattttttaaatttttagtagagttggagttttattatgttggttaggttggtttcgaatttttgattttaagtgattcgtttgttttgattttttaaaatgttgggattataggcgtgagttaaagtatttagatttgttgtttttttaaatgttggtaaaagttagtgattaagtgtttattatgtgttaagtgttttgtatgtgtaggttattaaaatgttataataattagatgatataggatttcgtttttagtgtatagataaaattgagggtttaggaggttaagtaattttttaaagatatgtaattaggaagtagtaagtttagaaatagattgttgtgttttttttttattaatgtattgtttttttttttttgtattttttaagtttttggtaatgaattgtatgttatttttataattatgaaaagttttataagggatagatttttttaaagatttttttcgttttggtgttttgtgtttttttggtttttagaattttattttgtacggtttttattttatatttttataggtattggttttattgtttttatttttatattagttgttgttggggtaggacgtttaatgttttagttttgttgaagtttgtttgaaatgtttttggtgagtttttggttattggggaagtttagggggtaggtttgaagaaggggaagtaggaagggatgtgaaatttggttatagtttggagttatttttgttgggtagtttatagggtttttgggcggagggtaggagtatttagttggagttgataataggaggtaggtgaggttagagttttagagggagggggttgtagagttttgggatttaggggagttggtttaggaggttgggtagttgaggtagggagggagggaaataattgtgtttgattttaggatagggatgggggtgtagtattgatttaggatttagaatgggtgagtggagggattttaattttttgagttagggtttgggggagggtgagaggcgatgagttagatttaataattgaagggtaagattagggtttttgggttttggttttataatacgtaagaaattaggaaaagtttggggtgttagagttggtagtgggatttagtagaggggattgtaggggtagttagttatttatgtttaggtggatgttgaaaggcgttgagtatgtagaagagtgagtaggtgtcgttttgggcgtttgtgaatttttgtgtgtatgtagagttttattatttgggtgagttagtgttaattaaataaggagtaggcgtttaatatatatttgtttaatgaaatcgattatttgtgggagtgtatgaatgtgtgtgttcgtgtaagtgagggatagggtttatttgggtattagttgtgtgtttaggggggtatagtggatttttgagtttgtttattgtgttttgtaggtgcgtggatgagagttgtgtttgtgtgagtgtgtgaagatgtgggtgtgttttgttgtatgtgtggatgtgtgtgagtttgtggttttgtgtatatgcgtggggttttggggttggattgagagtggatattgagagttttagagggtgtatgtgtatttggggaggattgtgtatatattattgtgtgtatgggatttaagggtgggagttgggtgtgagtgtgatgtttaatttgtttaggttttttcgtgtttttatagaggtattatggagggttttcggggatggttggtgttttgtgtgttggttatatcgttggtttttatggtgatcgaggatttgtgtcgagtattagacgggaagaaaggggaggtaggaagatttggtagacgggggcggttaggttttaagggggagtaaggggagtcgggtaagtattttttttcgggatttagttttttggattttggtttgatttggtttttagggtgaaggtttggggtggtattgagaattaggagttcgtttgtttttagtgttttatgaattttttttagtttgtatttggttataggggttaagggaggtttagttttttcgggttatgtttttaggtttttttattttttgtgtattgtttgggtttttttttttcggttttattttttttttttggagaatgatttgttttgattagtgaaagtgaaagttttggtagtaatgttgagtttttgtttatgttttttttgttagaaaaacgaggatttagagtttagatttaggagttattgttttgttgtgtgattttaagtaagttattggttttttttgagtttaagtgggtttatttgtaaaatggaaaaataatattgtttggtatatagagagggattaaataattgaatttgtttttttatttttttttagtatttttaatattgtttttgtttttttttttttagtttttttaggttttagagatttatattttagaagaaaggttaggggtaatggaaaagggaagaggttttgattaaagtagaaagggagttttatggaattattttgggttttttagtttaaagtagattagaaggattatatagatatttgtaataatttgtattcgggtattttatatgtggtatttgaatttgaagttaagttaaggttagtgttttagaggggtatgaagtttttagttttgggtaggaatatagtagagtagttagagttttatgtattttttagaatttgatatttttttaagtgtttgtttatatttttttttattttatagatgaagtggaggtttagagaggttgagatatttgtttaaagttatatagttaattagaatcgatgttttgaaggtttaggtgttttattgttttttattttatagatttagggggtttagttttttttttgaggattagtaggtattggatttttatttttaatttggtatttttttttatagg

SEQ ID NO: 238 - DNA, 6229 bp, Artificial Sequence
  chemically treated genomic DNA (Homo sapiens)
tttgtggggagaaatgttagattggaagtgagagtttaatgtttattggtttttagggagagagttggattttttgagtttatgggataaagggtaatgaagtatttgggtttttaggatatcgattttgattggttgtgtgattttgggtaagtgttttaatttttttgagtttttattttatttgtaaagtggagagaagtgtgaataggtatttgggaaagtgttaggttttgggaaatgtatggaattttggttgttttgttgtgtttttgtttaaggttgaggattttatatttttttggggtattgattttgatttggttttaggtttaggtattatatgtaggatgttcggatgtaaattattgtaaatgtttatgtgatttttttggtttgttttggattaggaggtttagggtgattttatgagattttttttttattttggttaggatttttttttttttttattatttttggttttttttttagaatgtgagtttttgaagtttgaaggggttggggagggggaagtagggatagtgttgggggtgttggaaggaagtgaagggatagatttagttatttgatttttttttatgtgttaggtagtgttatttttttattttatagatgagtttatttaggtttagagagggttaataatttgtttgaggttatatagtaaggtagtggtttttgagtttaaattttgagttttcgtttttttggtaagagaaatatgaataaggatttagtattgttgttagaatttttatttttattggttaaagtaagttattttttagagggggaaggtgaagtcgaagaaagagggtttaggtagtatatagggagtggagaggtttgaggatatggttcgagaaggttaggttttttttagtttttgtggttaagtataaattggagaggatttatggggtattgggggtagacggatttttgatttttagtgttattttaagtttttattttggaggttaagttaggttaaggtttaaggggttgggtttcgaggaagggtgtttattcggttttttttgtttttttttgaggtttggtcgttttcgtttgttaggtttttttgtttttttttttttttcgtttggtgttcggtataagttttcggttattatagaggttagcgatatggttagtatatagagtattagttattttcggggattttttatgatgtttttgtggagatacgggagggtttgggtaggttggatattatatttatatttagtttttatttttgagttttatgtatataatgatatatgtatagttttttttaagtgtatatgtattttttggggtttttaatgtttatttttaatttagttttaggattttacgtatatatatagaattataaatttatatatatttatatatgtaatagagtatatttatatttttatatatttatataaatatagtttttatttacgtatttataaaatatagtaggtaaatttagaaatttattatatttttttagatatataattgatatttaaatagattttgttttttatttgtacggatatatatatttatatatttttataggtaatcgattttattgaataaatatgtattgagcgtttgttttttatttaattaatattggtttatttagatggtggagttttgtatatatataggaatttataaacgtttaaagcgatatttgtttatttttttgtatgtttagcgttttttagtatttatttgagtatgggtgattggttgtttttatagttttttttgttgggttttattgttagttttagtattttaggttttttttggttttttacgtgttatggggttaggatttaggaattttggttttattttttagttgttaggtttaatttatcgttttttatttttttttaagttttggtttaaggagttaaggtttttttatttatttattttgggttttggattagtgttgtatttttatttttgttttagaattaggtatagttatttttttttttttttgttttagttgtttagttttttgggttagtttttttgggttttagaattttgtagttttttttttttgggattttggttttatttgttttttgttgttaattttaattggatgtttttgtttttcgtttagggattttgtgggttgtttagtaggagtggttttaggttgtggttaagttttatatttttttttatttttttttttttagatttgttttttgaatttttttagtggttagaagtttattagggatattttaagtagattttagtaagattgggatattgggcgttttgttttagtaatagttggtgtgggagtgggggtagtgaggttagtgtttgtgaggatgtggggtggaggtcgtgtagggtgaggttttgagaattagagaagtatagaatattagagcggaaggaatttttaaaaaaatttgttttttgtaggattttttatgattatgaaagtgatatgtaatttattgttaaaagtttggaaaatataaagaagaaagaatagtgtattggtgagaaggaagtatagtaatttgtttttagatttgttgttttttagttgtatgtttttgggaaattatttgattttttgagtttttagttttatttatatattgggaacggggttttatattatttgattattataatattttaatgatttgtatatataaaatatttggtatatggtgaatatttagttattagtttttgttaatatttaaaaaaatagtaagtttaggtgttttggtttacgtttgtaattttagtattttgggaggttaaggtaggcggattatttgaggttaggagttcgagattagtttggttaatatggtgaaattttaattttattaaaaatttaaaaaatagttaggtgtggtagtatgtatttgtgtagttttagttatttgggaggttgagttgggaggattgttagagtttaggaggttgaggttgtagtgagttttgattttattattgtatttttgtttgggagatagaataagattttattttaaaaaaaaaaaaaaaaaaaagagatggtaatggcgggtcgtttggaatggttgttgttattatattggttgtagtagggaggtacggttagggttgtatgttttatgtagttagtgggagttggggatagtgggaatttcgtttttttgggaattattgtagttgttaaattatagttgattttgttttatggatagggtggggggttttcgttattttttatgtagttgtagttgtttaaattgtagttgtggatttaggtatttttgtaattttgggggttcgggaaggtttttcgttttattttttaggtttagaagtgtttgttttattgttgggtttttttttttttttggcgcgtattttgattttagagtaaagttggtgttgagtttgggtgttgtcgtagtttggttgggtgtgggtatgtttggggtagtgttgatatattagatttttgttgttttggttttttttggattttgggtattgattagtatggaaggaaagttaaggggaaattgagggtagttcggtattggtttgtagacgttttttggtatgaatagtttgggtattatgaatagtagtaggagatagataggtttttgggtggaaggggatgggtttttggtgaggttttatttttaagttagggagggttttaaggttgggggttaggttgttagttttatatattagagtgggaatttatggtgtattttttgggtttgtttatagttatttatggattaattagtatgtatttttttttttttgaggtttatgaaagttttaggtttagttagagttgggtagatattggatgattagttgtcgagaggagttattcgttttagggttttttttttgttgagagttgtagagatggtagaataatttgtttgtagaaaggagttttttattttagggtttttttttttttgagagttggaaagtcgataggatgatttgtttgtagagaggagttttttattttagggttttttttttgttagtagttgaatatttattaggatattttggttgtggaaaggagttgttttttgagggaggttttgtaggaggttgagttgttttatcgtttagtaaagttttttttcgttttgtttattttttatttgtttgtatattttattttttttggttgtaggataagaatttgggatttattaaatggtggggttgaaagagttgtaatataaataaggttgaaatatgttttttgtttgttatgatgtaggtgaagggaaggaaagaagagttgcggttttttggggaatttagatttgggagttttttaagttggagttgtgatttttttttcggggttttgtggtttttggtatttcgaagtttttgggtgttatcgtgtttttcggtgttagttgtggaagttgtttgtggtgtatttggtttagttataattttttagagagttggcgtttatgttggtatttggagttgtttatttcgttgtagtagtcggtatgtttgattgtgtgtagtggttagattttatgtttatttatatattttttattgttttatgtttgatttgttttgggtagatgtggaatttaggttggtaatgtgagttgagtgttgtttgttaggaggagtgagtgaaataagtttagtgggtttgagtaaaatttgggtaaaggtgttattagttatagaggttttcggttagaaaatgatattttaaagattttgtaatattattttaaaaaaaaataaaaaataaaatttagtaataaaagtttgtgaattttattatttagagataattgttgttagtgtttgaatagattatttagttttatttattttaattgatgggatgtttattatttgttagtacggtatattgtattattgttagtttggattttgagaatgtttttttttagatagagaggttttgttttttttagattggagattaatgtgtttaggtttgggttgattatatttgtttgtttttttttatgagtatgtttttgtttgtttgtttgttttttgaaaattttgttagaggtaggaggaggaaaagaggaggaggagggaggagataagggaaggttgttgaagtgggtagatgaaggatggtttagagttagggtttttgagttttggggattttttttttatttgtaattttgtgtggtatttgatgtatgttaaatagataaaaatggggatattggtttgaagggtgggggtttagagttttttttgatagttttttttatgttttttggatttagaaagttcgtggagttggaattttatttgtttagtttatatttaatttatagtgtgattttgggtaagttattttatttttttgaattttattttttttatttattaagatgagggagtgggtgggaggtgggaaggttgttttaaatggtttttaatattttttttagtttttttttttttttttttttttttttttttttgagatagagttttatttttttgtttaggtgggagtgtagtggttggattttagtttattgtaatttttgttttttgggtttaagagatttttttgttttagttttttaagtagttgggattataggtacgtatgtattattatgtttagttaatttttgtatttttagtagagacggggttttgttatgttgtttaggttggttttaaatttttgattttaggtgatttgtttatttcggttttttaaagtgttgggattataggcgtgagttatcgcgtttagtttagtatttattttttttttttttttttttttttttttttttttttttttttgagatagttttattttgttgtttaggttggagtgtagtggttcgattttagtttattgtaatttttgttttttgggtttaagagatttttttgttttagttttttaagtagttgggattataggcgtgtgtgtattattacgttcggttaatttttgtatttttagtagggacggggttttgttatgttgtttaggttggttttaaatttttgattttaggtgatttgtttatttcggttttttaaagtgttaggattataggtgtgagttatcgcgttcggtttagtatttattttttttgattgtattgcg

SEQ ID NO: 239 - DNA, 6419 bp, Artificial Sequence
  chemically treated genomic DNA (Homo sapiens)
atagttttttattttttgttgtttttaattgatagagtttttttttttaaatatagttttttaaagggattgtttttttttatttttttaattatttttttttttgtttaattatttaggaatttttggatgatagtgataataataaaatagttaatatttattaagaatttttaatatgttaggttttgttggaagttgtaatttatgttttcgtatatattttatgagggagagagtagtattatttttattttataggagggtaaattgtggttagagagaaggagtgattttttaagttttttagttaagaagtagtagagattttatgtgaacgttgagtgttgttttttttgtgatattataggttttcgttattaggtgaatgtgtgttgtttaataagagtagtaattatcgtggtggtaaaaagttatttttatcgaatattgattatgtgtttattattatttttggtgtgttttatgtattagtttttttattaggttgtttggttttaaagtttatgtttttattattaggtatagtggttttttaatataatattgagttttaagatttagtggatgtgggtttgatttttagttatataggagttgtgtgatttttattaaggtgtttgttttttttgatttcgttgttttatttgtaaaataagaaagtaagagtgtatttttaggggttgaatattaaattataggggataatggtatgtaagttatttggtttagagtttggtttatacgtatttaatttattaaagttgttaaattgttattttgtaaaatttttagtaagagtaagagtgagagttgatgtttatttatggataagtaggattatgtttttgagttattttgtttttagagtatagagtttgatagaatttaaagttgttattagtattttttggttatatttatttttatagttttttttttttggtgtatagtgtttggtataatttagggtttttagtaagaaattgattaggattaggttgaggggttgaggttggtttgtagagtataggagttaaatattagtaggttttgtttggttttagggagttttttatatgttagattttggggttgggatagttagtatgtggtagagagggtaggagtttggttataattttgttgttagaatagtttgttgggtgatttttgggtaggttgttttttaagtttcgatttttagtttttttatttgtaagatgggaaattaattataatttatttttttagggtgttgagaggattagagaatagtagtaatagtagtagtagttataagttttaatgagagtttggggtttaaggttttatgatttttttttatttatggttttatttgggtttttgtggttattttgggaagtaggtagagattattttgtttttttattttaagagaggatatagtttagtttttgaggaaaggttttttggaggaagaaggttttgatttaagtttcgaatgaagaaaaaatatttggatttgggtaaaggtggaatgggttgtttcgagaggtaatgagttgtttattattgaaacggtgtaaattatggatggaagagtttttggtagagatgttatttttttatattttgttgagaaagtttagtttgatttttttaaggaaataatgtgatgtgtagttagcgttgtgattagtttttagggttgagtgaatataacgtttgtgtagtaggggagtgcgttgaggtattatacgggggattttggtagaggtgttattgaggaaatttaagaataggttgaagggtttttaggaatttaaatatggaattgttataagcggtaattttttttttgggtataaattttaaagaattaaaaatagatatttaaatttttgtttataaatgtttatagtagtattttttataatagttaaaaggtggaaattttttaaatgtttattaatgatgagtggataaataaatagttaagcgagatggtgcgtgtttgtaattttagttatttaggaggttgaggtaggaggatggtttgagttttagagttcgagattagtttgggtaatagagtgagattttattttaaaaaaaattaaaaattttaaaattaaattgtagtgtgtaagtggaaggtttgtaagtggaaagatataaacggtatttttttttgtttttatattataataattaatatagaagatttttgtgattaaatgtggggggtttttttttatatattaagtaagtaattaaatttgttgggtgtttttttatttagttttgatattgtttaggaatagtattagattttataggttgagagtttagttttataagattgtttttttttagatattatttgtaagtttaggtttttagaatttttgattaattagttttaagttggggtttttataattttttgtttgggtttggattttttgttagagtggtttatagaagtcggggaaatacgtttataagtttattataaataatattataaaggatatagatgagatgtttagggtgaggtatgagggaagaggcgtgttattgttatgtttaggtttttgggtatgttgttttcgaggaattttttcgtgtttagttatttggaagttttttaaatttagttttttgggatttttatggaggttttattatgtaggtacgattgattaagttattgattattggtaattaatttaatttttagttttatttttttttttagaggttggggggtggggttgagagtagattttttaagtttgttttggtttttttggtgacgagttttattttgaagttatttaggggttggtagttattaattaattattagtatataaaaatattttattttggaaattttaaggattttaggagttgtttgttaggaaagaggtagaagattaaatatatattttgtaatattatatgtatttatataatggagtattatttagttataaaaaggaatgaagtattgatatatgttataatatagaaatatggatgaattttgaaaatattattttaaatgaaatgagttagatataaaaggttatacgttgtataattttatttatatgaaataataggaataggtaaatttatagggatagaaagtagatttatggttgttaggggttgggggaaggaggattgagaagaaattgtttaacgggtatagagttttattttggggtgatgaaaagttttggaattagatggaagtgagggttgtataagattgtgaatgtatttaatattattaaaatgtttgttttaaattggttaattttatgttgtaggaatgttgttttagttaaaaatatataggttgagggttaaattagatgaatttaaaggttattttgttttgagagttaatggtatggaatattggttatgttgattagtttgagatagtttatcggtttttttttagttttttgggattaaaaaggggttattattgtttttttgttagagttatagttttgagaatattttattagtagaaatagtttggtatgttggtagggatatcggttttatttttttttgtatgattttgagtaagtgatttggtttttttgagttttagtgttttttttggtgtaggaattatagtagatgtagggatgttttaagtatgtaaggtggttcgtttataagtagtattatattttgaatttagaagttttattgaataagagttttcggggaataaaattttaaatttatagtagtttagttgtttttttatttttgttttttgttatttgaatttttgtttttttttgttatattggttttttgttgatttttaatattttaatttttgttttgtttttgggttttttttatattttttgtttttttggaatatttttgtttttattttttttggatttttaggttttagtttaattattatttttaagagtggtttttttttggagaagatttttttggtgggaggattttttttataaaatttattattttttatttttagtttagttattttgttttttagtattttttttttttttttagagtattaattacggtttattattatttttatttattttatgttgatttatttatatttatttgtttatatttgtttttattaggggtataagtttaggagggtagggattgtattcgttttgttttttattgaatttttagtattttgtatagagtttggtagataggggataattagtgaatatatggatggaggaatggatggatggagggatagatggaggaatagagggatggatggatgaacggatggatggatagatggatagagggatggagggatgtaggggtagaaggatggatggatggatggatggagggtggatggatggatagatggatagagggatgtagggatggaaggatggagggatggatggatggatagtaggatggagggatggatggatggatggatgtagggatggaggggtagagagatggatggatggatggagaggaggatggatggatggatgtagggatggatagagggatgtatgggtggatgaatggatgtagggatggagggatagagagatagatggatggatggatggatggatggatggatggatggatggatagggggatggagggatggatgtagggatggaggatagagagatagatggatggatggatgaatggatggatgtagatagagggatagagagatggatggatggatggttggatgtaggaatggagggatagagagatggatggatggatgtagggatggagggatagagagatggatggatggatggacggatgtaaatggagggatagagagatggatggatggatggatggatggatggatggatgtagatggaggaatagagagatggatggatggatggatggatggatggatggatggatggatggatgataggattattacggtggtaattttttatattgttttttttataggaggcgtttgatatagtatgatgatgaagattttatggggtagtattttagtattgatgttgtttttgtttttgggtttaatcgatattttttaggtttagtttagttgtatcgggtttttagttatttttggtatttcgggtatttttgggatatttggtttcgatggttaatttgggattttagggataaaaggagagaaaggtattatgggatttagtaggatattggtaatattgattaaatttttcgttttttgttttttaagttatagttgtttatttttgagattgtaaaagtattggtaaatttagtagtttgttgaatttttgtagtaattttgtaaggagggaattttgatttttattttatagagaggaaaattagtatttagaaagtttgttgatttatttaaggtagtttagtaaatgttgaggttaagattagattacggattttttattattaaatttaggtggagagggagtgtcgttgtggttatagagttttgtgtttaaatttattttttgggtaaatgatttttttttgaattgttatttttttatttgtaagatgggggtaatggtatttttttggggttgttatggggtttaaatgagatttttagttttgaaaatttttttgtaaaatttggtttatttatttatttaatttacggttatagagtaattgtttgtattagttattttttttatataattttatttaatttttataattttataaaatatttttatttttattttatagatgaggaggttgattttaggaaatgtgatttagttaaggtgatattattattaatggtagatgtgatacgtaaagtatatttttttgtttttagattttatttttttaggttttattttttgttattttattggaaaatcggttttattttgtgttgtgttaaattaaggggtagtggttgtttggggggtggagtgagaaggagtttaaagtttatttttaggagtagtaagagtgaaggttatggttgattagggatgtttgttaggggtgagggatagagggagatagtatttattatttttgttttagttgaagaaggatttttatataagttggggaggagggtcggtttagtattttttttagtaaggagttatttttttttttacgattagtagtttttaagaaggttaagtatattatagatttaggaagttgggttggagggagatttagagtttttgtttgatattgtttttttcgttttatagatgggagattgaggtttagagagaggtagggttttgtttaaggttttagcgtaggttttttttttttggttttagtgattttatttttttggtttttgtttttttagg

SEQ ID NO: 240 - DNA, 6419 bp, Artificial Sequence
  chemically treated genomic DNA (Homo sapiens)
tttggaaaagtagagattaaagaagtgagattattgagattaaaagaaggaggtttgcgttggaattttgggtagggttttgtttttttttgagttttagttttttatttgtaaaacgaaggaggtagtgttaggtaggggttttgggtttttttttagtttagttttttgagtttgtgatatgtttgatttttttgggggttgttgatcgtggggaggggaatggttttttgttaaggaaggtgttaggtcggtttttttttttagtttgtgtgggggtttttttttagttagagtagggataatgagtgttgtttttttttattttttatttttggtagatatttttaattaattatggtttttatttttgttgtttttggaaatggattttagatttttttttattttattttttaagtagttattattttttggtttggtataatataagataagatcgattttttagtagagtggtagagaatagggtttgagaagatgggatttggggatagagagatgtgttttgcgtgttatatttgttattagtagtggtgttattttaattgagttatattttttgaggttagtttttttatttgtgaaatggggatgaagatattttgtgggattgtaaggattagatgagattatgtgaggagagtgattggtatagatagttgttttataatcgtaggttaaatgaatgaataaattaaattttatagaggggtttttaaggttgggagttttatttgaattttatgataattttaaaaaagtattattgtttttattttataggtgaggaaatagtaatttagagagaagttatttgtttaggaggtaagtttaaatataggattttgtggttatagcggtattttttttttatttgagtttaatggtaagagattcgtggtttggttttagttttaatatttattgggttattttgagtaagttagtagattttttagatgttagtttttttttttgtaaaatgggaattagaattttttttttgtaaagttattgtaagggtttagtaagttgttggatttgttagtgtttttgtagttttaaaggtaggtaattgtgatttgggaggtaggagacgggaaatttggttagtattattagtgttttgttaaattttatggtatttttttttttttttatttttggggttttaggttggttatcggggttaggtgttttagggatattcgggatgttagggatggttgggggttcggtgtagttgagttgggtttgggagatatcgattaggtttaggagtaggagtaatattagtattgggatgttgttttatgggatttttattattatattgtgttagacgttttttgtggagaagataatgtgagaggttattatcgtggtgattttattatttatttatttatttatttatttatttatttatttatttatttatttttttatttttttatttgtatttatttatttatttatttatttatttatttatttttttatttttttatttgtattcgtttatttatttatttatttttttatttttttatttttgtatttatttatttatttttttatttttttatttttgtatttaattatttatttatttatttttttatttttttatttgtatttatttatttatttatttatttatttatttttttattttttatttttgtatttatttttttatttttttgtttatttatttatttatttatttatttatttatttatttatttgtttttttatttttttatttttgtatttatttatttatttatgtatttttttgtttatttttgtatttatttatttatttttttttttatttatttatttatttttttatttttttatttttgtatttatttatttatttatttttttattttgttgtttatttatttatttttttatttttttatttttgtatttttttgtttatttgtttatttatttattttttatttatttatttatttatttttttgtttttgtatttttttatttttttgtttatttatttatttattcgtttatttatttatttttttatttttttatttgtttttttatttatttatttttttatttatatgtttattgattgttttttatttattagattttgtgtaaggtgttggggatttagtgaagaataagacggatatagtttttgtttttttggatttgtgtttttagtggggatagatataaataggtagatataaatgggttagtataaagtaaatagaaatagtgatagatcgtgattggtgttttgaaagaaagagaaggatgttgggaggtagagtaattgggttggaggtgggaggtggtgggttttgtgagggaagtttttttattaggaaagttttttttaaggggaagttatttttggaagtgatgattaggttgagatttgaaggtttagaaaaggtgggggtaagaatgttttaggaggatagagaatatggagaaggtttagaggtaggatagaggttaggatgttgaggattagtaggaggttagtatgatagaggggagtaagagtttaagtgataggaagtaagagtggagaggtaattaagttattatgagtttggggttttatttttcgaaagtttttatttagtagagtttttgaatttagggtatgatgttgtttatgaacgggttattttgtatgtttagagtatttttgtatttattgtgatttttatattaaaggggatattgaggtttagggaggttaagttatttgtttagagttatataggaaggaatgaagtcgatgtttttgttagtatattaggttgtttttgttggtagaatatttttagagttgtgattttggtaagagggtagtgatggtttttttttaattttaaagaattaggaagaagtcggtgggttgttttaaattggttagtatggttagtgttttatgttattagtttttaggataaagtggtttttaagtttatttagtttaatttttagtttatatatttttaattgaggtaatatttttataatataaaattaattaatttaaagtaagtattttagtggtattgaatatatttatagttttgtgtaatttttatttttatttagttttaagattttttattattttaaaataaaattttatgttcgttaagtagtttttttttaatttttttttttttagtttttgataattatgaatttgttttttgtttttatggatttatttatttttattattttatataaatggaattatataacgtgtgattttttgtgtttgatttattttatttagggtaatgtttttaaggtttatttatgtttttatgttgtagtatgtattagtattttatttttttttataattgaataatattttattgtatgggtatatgtgatattgtaaagtatatatttggttttttattttttttttggtagataatttttaaaatttttagaatttttaaagtgaggtatttttgtatgttaatgattgattgatggttgttagtttttaggtagttttaggatggggttcgttattaggaagattaaggtaggtttagagggtttatttttagttttattttttaatttttggggaggggagtggggttgaaggttaaattgattattaatggttaatggtttaattaatcgtgtttatataataaagtttttataaaaattttaaagaattaggtttagagagtttttaaatagttgaatacgaggaggtttttcgggggtagtatgtttagggatttgggtatgatagtggtacgtttttttttttatattttattttgagtattttatttgtattttttatagtattgtttataataaatttgtaaacgtgttttttcgatttttgtgggttattttagtaaagaatttaaatttaagtagggggttgtgagaattttaatttgaagttgattggttagaagttttgggggtttggatttgtaaatggtgtttgagggggagtagttttgtgggattgagtttttagtttgtggggtttgatgttatttttagatagtgttagaattgagtggaaagatatttagtagatttgattgtttgtttggtgtgtggggagaaattttttatatttggttatagaagttttttgtgttgattgttgtggtgtgagagtagaggaaaatatcgtttgtgtttttttatttatagattttttatttatatattataatttggttttggggtttttggttttttttgagatggggttttattttgttgtttaggttggtttcgaattttggagtttaagttatttttttgttttagttttttgagtagttgggattataggtacgtattatttcgtttggttatttgtttatttatttattattggtggatatttgggaagtttttattttttggttattgtgaagagtgttgttatgaatatttgtgaataaggatttgagtatttgtttttaattttttggggtttatatttaggagaggaattatcgtttatggtaattttatgtttaagtttttgaggattttttagtttatttttaagtttttttaatgatatttttgttaaggtttttcgtgtggtgttttaacgtatttttttgttgtataaacgttgtgtttatttagttttaagaattaattataacgttagttgtatattatattatttttttggaagagttaagttgaatttttttagtagagtgtgaggaaatgatatttttgttaagggtttttttatttatagtttgtatcgttttagtgatgggtagtttattatttttcgaggtagtttattttatttttgtttagatttaaatgttttttttttattcgaagtttgggttaaagttttttttttttaggaaatttttttttagaggttgaattgtatttttttttaaaatgggggagtagagtggtttttgtttattttttagagtggttatagggatttaggtgagattatggatgggaaagagttataaagttttgagttttaagtttttattgggatttgtggttgttattgttattgttgttgttttttgatttttttaatattttggggaagtgggttgtgattaattttttattttgtagatgaggaaattgaggatcggaatttagaaagtaatttatttaaaaattatttagtaaattattttaatagtagggttgtggttaaatttttattttttttgttatatgttggttgttttaattttagagtttggtatgtggagggttttttgggattagataaggtttattgatatttggtttttatgttttgtaaattagttttagttttttagtttagttttgattaattttttgttgaaagttttgagttatgttagatattgtgtattaaggaaaggaagttgtaaagatgagtgtggttagggaatgttggtgatagttttaggttttgttaggttttatgttttgaagatagggtggtttaggggtatggttttgtttatttatgaataagtattagtttttatttttgtttttgttaaaggttttataaaatggtaatttaataattttaataagttgggtacgtataggttaggttttgagttagatggtttgtatgttattattttttgtaatttgatatttagtttttgagaatgtatttttgtttttttattttatagatgaggtaacgggattagagagggtaagtattttgataaaagttatatagtttttgtgtggttgggagttaaatttatatttattggattttaaaatttaatgttatgttaagaggttattgtatttggtggtaaaaatataaattttgaagttagatagtttgataaaaggattaatgtatgggatatattaagggtagtggtaggtatatggttagtgttcggtgaaagtggttttttattattacgatgattgttgtttttgttaggtagtatatatttatttggtggcgggagtttgtagtgttataaggaaagtaatatttagcgtttatataaggtttttattgttttttagttaagggatttgggaaattattttttttttttggttatagtttatttttttataaagtggggataatgttatttttttttttatagggtatgtgcgaggatatgagttatagtttttaatagagtttggtatgttggaaatttttaatgaatattagttattttattattattattgttatttaagaatttttgagtggttgaatagaagggaagatggttggagaagtaaaaaaagataatttttttgaaagattgtgtttagagggaggggttttgttagttggaggtagtaaggggtggagagttgt

SEQ ID NO: 241 - DNA, 5879 bp, Artificial Sequence
  chemically treated genomic DNA (Homo sapiens)
tgtttttatagtaggtttttaggttggcgtttagagaagttttggaattagttgaaggtgtttgatttttaggagcgtgaaagtatttttgtttaatttttgggattgaattatatagatatggatatattatttgtatttggaaattttaaaattatgtttttggtttttattgggtgattttgatttaatttaatatttgagttttagtttttttatttgttaaatgggagtaataataataatttttataaaattgggtttataaagtttagagaaaaggaatggaaagtatttagaattatgtttggagtacgtacgatatacgtatagtgagttgggagtcgttaggttgaatgttattgtttgttatatgatgtgaagtatagtaatattttaagtttttgtgattgagggagattttttggaagggttataggaggttgcggagtttggatgttgtttttagtttttgtttaatgtttttttgaatgtagttttaaaatagaaaataaaattgatttttgtagaagtttttagagggaggtgttgttatttcgtattttttgggatggcgatttttattgaacgtttgtgttttagggtggattattttgtgtttgtttttaagtagagattagtaaaggagttttttggtttttagtgcgtgattttgttagtgtttttaggagatatgtaagttttttgggtgaaggttgatttgtattttttgaattttgttacgtgtagatatgggaaattgatttattagtgttttgtgtgtgtaggtgatttttatatatatagttgttatttttttttttaattgggtattagtgaatatgcgggtatgaggagtgattgtgtattattttagttgttttttttcgggtagttttttggttagagggggtgggggtgggggaggggagaggggtatttagaatttagagaatattggtttatgttagatattatattatatttgggtttatatttttgtattttttttggtgtgtgggcggggggggtggggggtagtttagtgaagtttagaagatttgttggataaattttaaaagagttagagttgtaatatttatttttgtattttattaattttttatgatatttttttttttttcgtagggatttgggataatttggttttgttgttttttaattgttaggtatttttttttaatttttattgttagagggaattggaggatatttatagtttgtttttgttttgatattttgagtagagaaaaggtattaacggttttttttagttatttaattattagaagtaagtaatttttttttagataatattttgttttagaagaagtcgtgatttagtttttttattgtgtttatttggtttaaatatatttgtggggtgttttgttattttttaatgaatgaattatagttataattaggggttaagttgtttaagaggttttttagagattatggatgttttttttttggaagttgtggtttgatggagtagttttattttagggttttatttgttcggagttgtgtatgttaagttcggtttagtttttatttttaatattagtcgtggttttgtgtagttaagtttttagttagtgtttagggttgtttgttagaaatggttatacgtgggtaaaagaagatttgatagtttttatatattttattttattgaatttttaaattttgaattagtttttttatttattgatttgttattattgttgattttttgaaaagttttttagtttttgttttttgttttttgttttttagtaggggattagaatgtttagttttatttagtaagaaaaatattgtatttttaattatttatagtgttggtaaaaaaaaaaaaaaaaaaaaaaaaattggggggtggtcgggcgtagtggtttatatttgtaattttagtattttgggaggttaaggcgggcggattattttatgtttgtaattttagtattgggatgggaggttgaggtgggtggattgtttgagaagtttaagattagtttggttaatatggtaaaatttcgtttttattaaaaatagaaaatttagttgggtatggtggtatacgtttgtaattttagttatcggggaggttgaggtataagaattgtttgaatttgggaggtagagtttgtagtgagttaagattacgttattgtattttagtttggtcgatagtgtgagacggttttagaaaaaaaaagaaagaaagaaagaaaaagaaaaaatttggggtaatttatgtttagtttaagtatttgaatagttttcggaaatgtatattttttttttgagaggtaaaggatgtaaatagtttttaagtagttttaatgtttttgtatagaaataagtttatttttgtaatattgtggtagagttttaatatagtatttagttttttattgggtttttttaaaaagttaatttttaatatagttgtttagggattaaattagattggaaaatttattttgattttatatattgttataaagaaatatatcgttgtttatattgagttgtaggagatagtatattttaaatttaagaaagttaaatgttttataataatattgtaatataatttttagttattttttttttattggtaaaatttttgatggtgtgataattttttgttaatttacgaaatttatatttggaagaattattagttttcgtgagtagttttatgtaaatagatgtattttaagtagattgtatgttttaggtgtttgttttttagtaattatggagtgtgtaatatttagagtaatattataaggggtaggattgtaaatagtaggttttggttaaaaatttttaatgttgtattgttgttagttgtaaagagatgtttgaatggaggtaagttttgttttgtgggtgaaattgatgatgtattgtattgttatatataaatttattaaatttagttattaggaattgtttggaattgtggttatgtatttttttttttttttaaagattagtgtgatagtaggttatgtatttgagatacgatattttttggtaattagagggagaaaaaaaaattaagtaggtttaggtttatgttgtattttgagagtttggttttatttgaatagaaataattttatagaaagtttttgtaaataatgtttaaatttgtattcgacgattaaatttattaaaaatgaattttgtatatgatgtgtgtggtttgttttttgtattttttttttattatttatagaaaattatttagaaaatattaagtgttagttttattatgagttagtaagatatatttttttagtagtttatatgttttgtatattttgggaaggtaggattgttgatttttaataaatttgaattttgtttttgggttatattaatttattggagaaatttatagaatttagggaaatatatttatcggttttatataaaagatatgattaaggatatagataaggagatgagtagggtggggaatggggaagaagtttttagtttttatgtcgtttttggattattattttttaggaatttttatgtatttagttattagaggttttttaaattttgttttcgggtttttatggaagtttttggatttatttaaatgatataagttggttttttgtttttagaaaaatgatgttttattagaatttggatgtaaggttggaggtgtagagagggaaggttataaaaattaattatggattttgtttttgaggatgttatagtttggttgggtttaatttggttaaagtagtaacgttaggaggtttttgttgaaaagagaatgaagtatatgggttgggtgcgtataagtatgagtttcgagtcggtggaaaaaaaggttttagaaggttttttttaggaaaatttttagatttttttttgtttttataatataataattaatatagaagatttatgtggttaaaggtttgggttttttttttttatattaagtagtagatattagttgggtgttttttaatttaattttaatagtatttatttggagatagtgttagattttataggttgagggtttagtttttaagatcgtttttatttttagatagtaatggtaagtttgggtttttgaaattttcgattaattcgttttaagttggggtttttacgatttttttttttggattatgttaatttattggagtagtttatagaatttagggaaatatatttatcggttttatataaaggatatgattaaggatatagatgagatgagtagggtggggaatggggaagaagtttcgaggttttttgtttattttgggttattattttttaggaatttttacgtatttagttgttagaggttttgtaaattttttttttttgggtttttatggaagtttttggatattagtatttttttttttagggtatatggtgggattttttttgggaagggatttaagatttataattagaaatgtggaaggagattagagttttgttttggggtaggtaaaaggagggtaggagaaggggagagtttgttttttgaggtttaatatatttaatattattatagaatattgtaataagggttataggagttacgatttaggaattgtggatgaaaattaatatatatatatattataatattatagttttttagaggaaagtgatcgtggaagggtttggtgagagttggcgggagataagagtgtattttacgtagtttaaaagttttgcgtgttttgagaatagtaggtggaaagtgggtaagcggttattagagggaattaaatagtttcggatagcggattcggtagcgtagtaagaaagtttcggaattcggattcgaggtttttcgggttgtatcggagtttttagtagagggcgcgatttcgttcgttggttttaggtcgttagagcgtcggcgcgggaagcgttttcgggtaggggcggggttttcggcggcgttttaggtcgcggggcgtttaggtttgggttgttttttgtatttgtacgtgttcgtagtcgttttcgcgatgttgtttttgttgcgttgcgtgtttcgtgtgttgggttttttcgtcgtcggttttcgcgttgtcgcgttcgtttcgttttttcggtagtttttgtagtcggtatttcggttgtgtattcggtttttcgggttgtttagcgtgcgcgtaggtttcgagcggcggtcgggttttttgcggtttcgcggattttgcgtttgtggttgtggttgcggttcgttgtatatcgacggtgaggtttagcgggtcgggggtgtggtttgcgtttaatagagggaaaacgtagattaggaatagggtttgtaatcgatttttgaggtttgggatatttttttattgattggtaattagcgggttaaatttacgtatgattatattttttttattttttttatttagtagtttcgtttttttttggtagggggtgaataaaattaaatattagggtatttttttttttagttttattttatcgaaagtggatttttgggaaggtttatggtcgtggttgaaaatagtatagttatatcgtttggtaagtggaagaggattggaaatttttttggtttatagcggaaagtggtaatgcgtttattgttggaaattatttttttagaattaggtttagttttttattattattatggtatttttatcgataaggaaataggtttttagagtaatcgtaatagtagagagattagaaatagtttaggtttttggttgtaataatttgggtaatagttttatgttttagattaattggtttttttttttatgtatttggattttttttttagg

SEQ ID NO: 242 - DNA, 5879 bp, Artificial Sequence
  chemically treated genomic DNA (Homo sapiens)
tttagaaaagaaatttagatatataaaaaggaaagttagttagtttaaaatataaaattattatttaggttattgtagttagaaatttggattgtttttaatttttttgttattacggttattttagaagtttgtttttttatcggtaaaaatattataatagtagtaggaagttgagtttgattttggaaaagtgatttttaataatgaacgtattattatttttcgttataaattaggagaatttttaatttttttttatttgttaaacgatataattatgttatttttaattacgattatgggtttttttaaaggtttattttcgatagaataagattaaggaaaaaggtattttagtatttaattttatttattttttattaaaagaaaacgaaattgttggataggggaggtgggggaaatatgattatacgtgggtttagttcgttggttgttaattaatggaaaaatgttttagattttagaggtcggttgtaggttttatttttggtttacgttttttttttgttgaacgtaaattatattttcggttcgttaaattttatcgtcggtgtgtagcgagtcgtagttatagttataggcgtagggttcgcgaggtcgtaggaggttcggtcgtcgttcggaatttgcgcgtacgttgagtagttcgaagggtcgggtgtatagtcggggtgtcggttgtaggagttgtcggaaaggcgaggcgggcgcggtagcgcggaggtcggcgacggaggagtttagtatacggggtacgtagcgtagtagaggtagtatcgcggaaacgattgcgaatacgtgtagatgtaaaggataatttaggtttaggcgtttcgcgatttgaggcgtcgtcggaagtttcgtttttgttcggaagcgtttttcgcgtcggcgttttgacgatttaaggttagcgggcggaatcgcgttttttgttggagatttcggtgtagttcgggaagtttcgaattcggatttcggagtttttttgttgcgttgtcgagttcgttgttcgaagttgtttaattttttttagtggtcgtttatttattttttatttgttgtttttaaagtacgtaaggtttttgggttgcgtggaatgtatttttgtttttcgttagtttttattagatttttttacggttatttttttttaggaggttgtggtgttatgatatatatatgtattggtttttatttatagtttttgggtcgtaatttttatagtttttgttataatgttttgtgataatgttgggtgtgttaggttttaggaaatagatttttttttttttttgttttttttttatttgttttaaagtaggattttaatttttttttatatttttgattatgggttttaagtttttttttagagaaggttttattatatattttgggggaagggatgttgatgtttagaagtttttataaaaatttaagaggagagggtttgtagagtttttgatagttgaatacgtagaggtttttggagggtggtggtttagggtaggtaaggaatttcggagttttttttttattttttattttgtttattttatttgtatttttggttatattttttatatgaaatcggtgaatgtgtttttttgagttttgtgaattgttttagtgagttaatataatttaaagaggggggtcgtgggaattttaatttgaagcgggttggtcggaagttttagaggtttagatttgttattgttgtttgaaggtgggggcggttttggggattgagtttttaatttatgggatttgatattatttttaggtagatattgttgggattgaattggaggatatttagttggtgtttgttgtttagtgtggaggggaaaaatttaaatttttggttatataagttttttgtgttgattgttgtgttgtgagagtaaaggaaagtttgagggtttttttgaaagaggttttttagaatttttttttttatcggttcggaatttatgtttgtgcgtatttagtttatatgttttattttttttttaataggaattttttagcgttgttgttttaattaggttaaatttaattagattgtgatatttttaagggtaggatttatgattaatttttgtgattttttttttttgtatttttaattttgtatttaagttttaatggaatattatttttttggggataagaagttagtttatattatttagataagtttagaggtttttataaaaattcgaggatagggtttggagagtttttgatagttaaatatatggaggtttttggagggtggtggtttagggacggtatggaggttgggagttttttttttattttttattttgtttatttttttatttgtatttttggttatattttttgtatgaaatcggtaaatgtgtttttttgagttttgtgagtttttttagtaaattaatataatttaaagatagggtttagatttattaaaaattaataattttatttttttaggatatataggatatataagttattaagaaggtatgttttattaatttatggtaagattaatatttaatattttttaaataattttttatgaataatggaaaagagatgtaagaaataagttatatatattatatataagatttatttttaatggatttgatcgtcgggtgtaaatttgagtattatttataagagttttttgtagagttatttttgtttaaataaaattagatttttaaaatataatataagtttgaatttatttgatttttttttttttttttagttattaaggaatatcgtattttagatgtatggtttattattatattggtttttaaagaaaaaaaaaaatgtatggttatagttttaggtagtttttggtagttggatttagtggatttatatatgatagtatagtatattattagttttatttatagggtagaatttgtttttatttaggtatttttttataattggtagtaatgtagtattaagggtttttagttaggatttgttgtttgtagttttgttttttgtagtgttattttgggtgttgtatattttatgattattagaagataaatatttgaggtatgtaatttgtttggagtgtatttatttatatgaagttgtttacgggagttggtgatttttttagatatgggtttcgtaggttggtaaagagttattatattattagagattttattaatggaaagagagtagttgaagattatattgtaatgttattgtgaaatatttaatttttttaagtttaaagtgtattattttttgtagtttaatataaataacgatgtatttttttgtagtagtatgtggagttagaatgggttttttaatttgatttaatttttgagtagttatgttaaaagttaattttttaaaaaagtttaataaaaaattaaatattgtattaaaattttattataatgttatagggataaatttatttttgtatagaaatattaaagttatttagaagttgtttatattttttgttttttagaaaaaaaatatatattttcggaaattgtttaggtatttaagttggatataaattattttaagttttttttttttttttttttttttttttttttttttgagatcgttttatattgtcggttaggttggaatgtagtggcgtgattttggtttattataaattttgttttttaagtttaagtaatttttgtgttttagttttttcggtagttgggattataggcgtgtgttattatgtttagttaagttttttatttttagtagagacggggttttgttatgttggttaggttggttttgaattttttaagtaatttatttattttagttttttattttaatgttgggattataggtatgaggtgattcgttcgttttggttttttaaagtgttgggattataggtgtgagttattgcgttcggttattttttaatttttttttttttttttttttttttattagtattatgaatgattaaaaatataatattttttttattaagtaggattaaatattttaattttttattggaaaataaaaaataaaaaataaaaattggaaaattttttagaaagttagtagtggtaataagttagtaagtggaagaattggtttaaagtttaagaatttagtaagataaggtatataggagttgttagatttttttttgtttacgtataattatttttgatagatagttttaaatattagttgagagtttgattgtataggattacggttagtgttggaaataaagattgagtcggatttgatatatataatttcggatagatgggattttggaatggggttgttttattaggttatagtttttagaaagagagtatttatgatttttgaagagttttttgggtagtttggtttttggttataattatgatttatttattaagaaatgataaaatattttatagatgtatttggattaagtaagtataataaaagagttaaattacggttttttttagggtaaaatattatttggggaaagattatttgtttttgataattaaatagttaagaggaatcgttagtgttttttttttgtttagaatattagaataggaatagattgtggatattttttaattttttttgataatgagggttagagagaggtgtttagtagttagaaagtagtaaagttagattgttttaagtttttacgaagaaggaaaaaatattatagaaaattaataagatgtaagaataagtgttatagttttagtttttttagaatttgtttagtaggttttttagattttattgaattgttttttatttttttcgtttatatattaaaaaagatataagaatgtaagtttagatgtggtgtggtatttggtataagttaatgttttttgggttttaggtatttttttttttttttttatttttattttttttgattaggggattgttcgaaaagaaatagttgaaatggtatatagttattttttatgttcgtatgtttattggtgtttagttagagagaaaaatggtaattgtgtatgtgggagttatttatatatataaaatattgataggttagttttttatgtttatacgtgataggatttagaaggtataaattaatttttatttaggaagtttatatgttttttgaaagtattgatagggttacgtattgaggattaggaggtttttttattggtttttgtttggagatagatatagagtggtttattttgagatataagcgtttagtagggatcgttattttaggaggtacgagataatagtatttttttttggaaatttttatagaagttagttttgttttttattttaaaattgtatttagagagatattaaataagaattaagggtaatatttaagtttcgtaattttttgtggtttttttagaaaattttttttagttataagaatttgggatattgttgtattttatattatatggtaagtagtaatatttagtttaacggtttttaatttattgtacgtgtgtcgtgcgtgttttaggtatagttttgggtattttttattttttttttttaaattttatgaatttaattttataaggattattattattatttttatttggtagatgagaaaattgaggtttaggtgttaaattaagttaaagttatttagtaagaattaaaagtataattttgaggtttttaggtataaatgatatgtttatgtttatatggtttagttttaggagttgagtaaagatgtttttacgtttttggaagttaggtatttttagttgattttaaggtttttttaagcgttaatttggaagtttgttgtaaggata

SEQ ID NO: 243 - DNA, 6092 bp, Artificial Sequence
  chemically treated genomic DNA (Homo sapiens)
gtaaatttagaagttttatttacgaggatttcgatatggtaagtataaaatgtttaattaatttttttttatatgtttttttttaatggtgtttaagtttataggatatagatttttttttttgatagggttttattttattgtttaggttggagtgtagtggtgtgattatagtttattgtagttttgatttttagggtttaagtgatttttttattttagttttttgagtagttgggattatagatatgttttagtatgtttggtatttttttttttttttgtggagatagggttttattatgttgtttaggttgattttaaatttttgaatttaagtaatttttttgttttggttttttaaagtattggtattataggtgtgagttattatatttggtttataggatatggattttgaataattggtataaatcgattggttttaaggtaaggttttaaattaagtttaagtttttttgttgtttttagatattattgaattttttttttagattttggtgatattaagtggtggtttttggaaatataattttaattttgtttgggatgattgttttggggtttggggatagtttattttttaaattttgtggttgtggggttggtgttgtaatatttttgtgttttattaattttttggaattttaaaaatagatttatggaaggtttgttttagaatttagtttttgaagttttggaggaattaatttgttttagtttaggtcgtagtttcggaagggattatagttttgtttagggattggaaatttattagttgggattaaatagaatataaattggaattgatagttttgtgattttaatatagatattttgggttttaattatttttgattttaatgttatagttttagtttgtaatgggatttgaattttaattttggagtttgattaatgggagggttatttgttgtttaaatttgaaaatgggagggttatttgttgtttaaaatttttattgttggtaattttttgttggagttttttaatattattatttaattttattgtggattttcgatagttatttagataatatggttgtatgaaattttattttatttatttttgagatagggttttattttgttgtttaggttggagtgtagtggtgtgattatagtttattgtagttttaaaattttgggtttaagttattttttttttttggttttttgagtagttgggattataagtgcgtgttattatgtttgattaattttttgattttttgtagagatgaaattttgttatgttttttaggttggttttgaatttttggtattaagtgattttttttttttggtttattaaagtgttgggattatagtattttggtatgagttattatgtttgattaatgaaatttgaggtgggaaacggagtatttaggttgaagtgtaatgttgtggttatagtttattgtaggtttgaatttttgggtttaagtaatttttttgttttttagttttttgagtagttgggattataggatggttaatttttaaatttttttgtagagatgaggtttttttatgttgtttaggttggttttgaatttttagttttaagcgattttttcgttttagttttttgagttgttgggattataggtgtgagttattgtttttggtaatgtattttaatttcgtggtaaaattgtagaaatgaatataaaatataggtgaggataggagagtttaatttttttggtaagatcgggtagtgttgagttttaaggaaaaggagaaggaattttggatatattgataaggcgtttttttttttttggtattaattgaagtatgtttttgatggggaggaagttgttgttattgttgtcgtgtttggtgtttggagaagttaatatggtttgttatttgttaaaagtttattgagtattaggtatatgttgaatgtttagtatacgttattttgtttaattttggttataatgggttttgatagtgatagttgtgtttgaagtaggtgttattatttttattttatatttgataaagttggagtttagagaggtatagtaatttttttaaggttatacggttaaaatgaaaggtaatgaatggtttgaatttattttggtatatttaattaattaatttttagatatttattgagcgtgttgtattagttattatttttagttgtaagtagtagaaattaattttggttgagtttagtagaagatgaatttattaaagggattttggattgtttatggaaattttaggggagttatagagttattgtggaagttttttagtagggataatggttagaatttggttgtcgttgttgttatttttttgattatggtttggatgtttcggtttgtaatgtttatttattggggttggatgttgggtgttgttgagaattttattttttttgtgattttgttgtggttattattgtttttataggttttagggtttttgttttttggtattattggttttggattgaaagtttgggtttttgatgaatggaacgtgtgtgtatgtgaaattgtttttgtaaagatgatgatagtgagggaagtttagtatgggtgattttattttgtttttatttttataggttggttgtttttatttatttttgggtataggttaagttaattatgggaggaatttagtttatagtttaattttgaagtaaagatgatattagtttttttttaaaatgaatttttttttagtttagggatttgtttttgtaaaattaatgaaaggttataagattaggattatgggaggggtttgaattttgttaagatgtgggtgtagttaatcgatgattagttattgatttttagtttgtttttttataattttttgttgtttaggagttatgcggttagaggttataagatttgtgatttttttaattgtttttatagataatattattattgtaaaattaaatattggttttttgagatattttttagatttttgtattttgaaatgatttatgatttaattggttttgtgatttttatttagaggtggatttagtgtataaggtttgttttttatatttttatgattttatttttaacgaattagtagtatttattttttgtttttatcgtttattaaattttttttaagaattttagtttttgagtttttgtggggattgatttgagaaataaatttttatttttttatttggttagttttgtgttgttaaattttttttttattgtaatattatggttttagtgaattggttttgtttacgtagtaggtaggaagaatttttcgggtgattataaattagtttgttttagagttgttggaggtgggggtgatatattttttgtgtttgtgtttttttttttgggaggtcggttttgtttttaagattgatattatggggaatttttttaatgtggtaaagtagtttgaatgttgggtagttaggggagttatagatggttgtatatatatttgtgttttgtatgatattgttagatatggcggataatattaagacggattagatttagtatttgtttttcgagattttacgggtttatgatttttttttttttaatatgtatatttattaggtattatagtgtgtaaagtttgtttattcgaattattttattaggtttatttgatagttatgtagggtaggtagaattgataggatttttgttttatatttgaagaaattaggtttgttaatagtgagttaggtttaaaaaaaaaaagaaattaggaagttaggtgatgagtttaagatattattattggtgaggagtagagttgggatatgagtttattttttgattttaggtttagtgttaagttaattaaaggggtataaaggggagttgagattagggaaggttttgtggagtggtattgttttttagttttttgtttgtaattttaaaatttaaaggattttgaaaataaagtttttgttttttttttgtaatgggattttattttgttgtttaggttggagtgtagtggtgttttttgtagtttcgatttttttggtataagtgatttttttgttttagttttttgagtagttgggattataggcgtgtgttataatatttggttattgttttttgtttgtttgtttttaagtttgggattaaaatttaatttggtagtaaaatttgattcgaattgatgtgatttgtaatttttagttatttatttatcgtaagattaatgtgtttagttgtagaaattttaatgtttgttaatagggggttattttggtttataaagggagggagaggaggaggtgttatttaatattgggtttatggattatatagtttaaaaaaatttataaaattttaaaatatatttggttttaagggttatggataagggagtttgggttggatttgaaagggggtttggttgtggggtagaatttcgatgtttggaagggatgtggagggatgttatgaagaggaagttttacgttatattattttgggttttggtgttaagttattattaattattatatttgttttaaagtagagatgatttatatttttgataattatttttttttaatttatgatttatatatatttggagggttggattttttgggtttggttattttttttggtattaattttcgtttttttttagaaattatttgattttttcgaaaatttagaaatatattttttggttgaaaaatagtattaagtaatcggtgaaattttttatttttttttttttcgttggagttttggatagagggttttttggtttgggaggaggacgttgtttttgttttaaaagtagagggagttttaagattaaggttgagtttttttaagttatggttttttagttttttttgtttagattagggaattttagatatgtatattcgggtagggaattttatgaatagaattaggatagggaggttggtcggaggtttttgtagagggagcgttaaggttttgtgttgttgtttttgggggttagaggggttgtttagtatgtttattggtaggagagagggaattgatttatttgtttttattagtttttgaaggtaaaatttttataaacgaggagtagagttttgatggaggaaaaaggaaaggtagaaaattttacgtaggagggtttggggtaatgatagagggttgataaaggtagtataaaaaaaggtagaatatagataatttattttttttaggtttattttatttatttttattttatttttttatttattattgtttttagggttaaagtaattttagtaattttttattaggaattgtggggagatagtttgtatttttagtaagttggcggtggggggtagggataaattttaaataaattttggaaaacgaatgtaggaagtttttatgttttttgttatttggttgtttttttttttttttttcgtataattttgtattagtggggtagtattttttttttagatcgtttgttttagggtttttgtttttttttagtgaaagaagtttttgtttttatcggtgggcgttgggagtattagcggagatgtacgtaatgataaatagtagatagggttgtttgaggagatgaggtgattacggttaaagaagaggggttgttttatatggatgattatgatgcgttaagattgttgaaaatttgagtggaaatgggagtatcgtttttgagggtaggagagagattgatatcgcgggggtggggttggtggaggataatagaggaagaagaaaattgggagaaagtattcgatttttttggagaaaaattaggagaaagtttagagaagtaatgagggaaggatataatttagttatagtttagaaagttagtcgaagttaattagggagggtgtgaggggtacggtgttatgtggggatgttggtgatatggttttgtgtgttatatttttgaaggtgatattgagttttaggtgacgtcgtattattaaagaaggtgtttgtgtttgttagataaatatagttaggtttgttattttttagg

SEQ ID NO: 244 - DNA, 6092 bp, Artificial Sequence
  chemically treated genomic DNA (Homo sapiens)
tttaaggggtggtaggtttggttgtatttgtttgataaatataagtattttttttggtggtgcggcgttatttggggtttagtgttatttttaaaggtataatatatagggttatattattaatatttttatatggtatcgtgttttttatattttttttagttaatttcgattaattttttagattatagttaaattgtattttttttttattgtttttttagatttttttttaatttttttttaaaggaatcgagtatttttttttagtttttttttttttttattgttttttattagttttattttcgcggtattagttttttttttgtttttaagaacgatgtttttatttttatttaggtttttaatagttttggcgtattatgattatttatgtaggatagttttttttttttaatcgtgattattttatttttttaagtagttttgtttgttgtttattattgcgtgtattttcgttgatgtttttaacgtttatcgatggaggtaggagttttttttattaggggaaggtagggattttgggataagcggtttgagaaggaagtgttgttttattgatatagggttgtgcgaggaaggagaaaagggatagttaaatgataaggaatataaaaattttttatattcgttttttagagtttgtttggagtttgtttttgttttttatcgttaatttattgaaaatataagttatttttttatagtttttagtaaagggttgttaaaattgttttaattttgaaaatagtggtaggtaagggggtgaagtaggggtggatggggtgagtttaagagaaataggttgtttatattttgtttttttttatgttgtttttgttagttttttattattgttttaagtttttttacgtgaagttttttgtttttttttttttttttattaaagttttgtttttcgtttgtaaggattttatttttagaagttggtaggagtaagtgggttagtttttttttttttgttagtgggtatgttgggtaatttttttggtttttagggatagtagtatagggttttgacgttttttttgtaggaattttcggttagtttttttgttttggttttgtttataagattttttattcgagtgtgtatgtttgaaattttttgatttaaatagagggggttgggagattatgatttagggaaatttagttttgattttggagttttttttgtttttgaaataaggatagcgttttttttttaggttagagagttttttatttagggttttagcggggaaaggaggaatggggaattttatcgattgtttaatgttattttttagttaaagggtgtgtttttgagttttcgggaaagttaagtgatttttgggaaaaggcggggattggtattaggggaaataattaaatttagaaagtttagttttttaaatgtgtgtgaattatgaattaagggaaagtagttattagaaatgtaagttatttttgttttaaagtaaatgtaatggttgataatgatttaatattaagatttaaggtggtatggcgtgaggttttttttttataatatttttttatattttttttaaatatcgaaattttattttataattaagtttttttttagatttaatttagatttttttatttataatttttgaagttaggtgtgttttgaaattttatagatttttttaggttatgtagtttatggatttaatattaggtaatatttttttttttttttttttttatggattaggataattttttattaataaatattaagatttttgtagttaaatatattgattttacggtaaatggataattaaagattataaattatattagttcgggttaggttttgttgttaaattgagttttagttttaaatttgaaaataaataaataaaaaataatagttaggtattgtgatatacgtttgtagttttagttatttaggaggttgaggtaagaggattatttgtgttagggaggtcgaggttgtagagggtattattgtattttagtttgggtaatagaatgagattttattataaaaaaaagatagagattttgtttttagagttttttggattttagaattgtagataagggattgaggggtagtgttattttatagagttttttttgattttagtttttttttatgtttttttagttggtttagtattgggtttggagttagaagataggtttatgttttagttttgttttttattagtggtgatgttttaggtttattatttaattttttagtttttttttttttttaaatttggtttattattgatagatttagtttttttaaatataaaatagaaattttattagttttgtttattttatatgattattagatggatttaatgaaataattcgagtgaataagttttgtatattatggtatttaataaatgtgtatgttaaaaggaagagaattatgagttcgtaaggtttcggaagataggtgttgggtttgattcgttttggtattgttcgttatgtttagtagtgttatgtagaatatagatgtgtatgtaattatttgtgatttttttggttgtttagtatttaaattgttttgttatattagaggagttttttatgatattagttttgggaatagagtcgattttttaagaaagaagatataggtataagaagtgtgttatttttatttttagtagttttggagtaggttaatttgtaattattcgaagggttttttttgtttgttgcgtagataaaattaatttattgagattatggtattgtagtagagaaagagtttaataatatagagttagttaagtgaaaggatgggagtttattttttaaattagtttttataagaatttagaggttagggtttttaaggagaatttggtgggcggtaagagtagagaatgggtgttattgattcgttggggataaaattataggagtgtagaaaatagattttgtgtattaagtttatttttgggtgggggttataggattagttgagttatgaattattttagaatgtaaaagtttgaaaaatattttagaagattaatatttggttttataatagtgatgttatttataggagtaattggggaagttatagattttgtgatttttggtcgtatgatttttgagtagtaaaggattatagaaaggtaagttaggggttaatggttggttatcggttagttatatttatattttagtaaaatttaagttttttttataattttaattttgtggttttttattagttttataaaggtaggtttttgagttaggagggggtttattttagggagggattaatattatttttgttttagagttaaattgtaaattaaattttttttatggttagtttggtttatgtttaggaatgagtgaggatagttagtttgtgagggtagaggtaagatggagttatttatgttagattttttttattgttattatttttgtaaaggtagttttatatgtatatacgttttatttattagaggtttaggtttttaatttagagttagtaatgttaggaagtagggattttagagtttgtagggatagtggtggttatagtaagattatagaggaggtagagtttttagtagtatttagtatttagttttagtgggtaagtattgtaagtcgaagtatttaggttatggttaaagaagtggtagtagcggtagttaggttttgattattgtttttgttgggaagtttttataatggttttgtagtttttttggaatttttatgagtaatttagggtttttttaataaatttattttttgttaaatttagttagagttggtttttattgtttgtaattaaaaataatggttgatataatacgtttagtgagtatttgaggattggttgattgaatgtgttaaagtgaatttaaattatttattattttttattttagtcgtgtgattttgaaaaagttattatgtttttttgagttttagttttattaggtgtaaaatgggaataatagtatttattttagatatagttattattgttagggtttattgtggttaagattaaataaaataacgtatgttaagtatttagtatatatttggtatttagtaagtttttaataaataataaattatattaatttttttaaatattaaatacggtagtagtagtagtagttttttttttattaagagtatgttttagttaatattaaggaaaagaggacgttttattaatgtgtttagggttttttttttttttttttggagtttaatattgttcgattttgttagaaaagttagatttttttatttttatttgtgttttatgtttatttttgtaattttgttacgaaattgaaatatattgttaggagtagtggtttatatttgtaattttagtaatttagaaggttgaggcgggaggatcgtttgaggttgggagtttaagattagtttaggtaatatagggagattttatttttataaaaaagtttaaaaattagttattttgtggttttagttatttaggaggttgagaggtaggaggattgtttgagtttaggagtttaagtttgtagtgagttatgattatagtattgtattttagtttgggtgtttcgttttttattttaaattttattggttaggtatagtggtttatgttaaagtgttgtaattttagtattttggtagattaaaaagagaggattatttgatgttaggagtttaagattagtttggggaatatagtaagattttatttttataaaaagttaaaaaattagttaggtatagtggtacgtatttgtagttttagttatttaggaggttaagggaggaggataatttgagtttaggattttgaggttgtaatgagttatgattatattattgtattttagtttgggtaatagagtgagattttgttttaaaaataaataaaataaaattttatgtagttatgttatttaagtagttatcggagatttataatgagattaaatgatggtattaagaagttttaataagggattgttaataataaaggttttgaataataaataatttttttatttttaaatttgaataataaataatttttttattaattaaattttaaaattaaagtttaaattttattgtaaattgaaattatgatattaaagttaaaagtaattgaagtttaaagtgtttatgttaaagttataaaattattagttttaatttgtgttttgtttaattttagttagtgggtttttaatttttgggtagagttgtggtttttttcgaagttgcggtttgggttggaataggttagtttttttaaggttttaaagattgagttttgaggtaaattttttatgagtttgtttttaaaattttagaaagttaatgagatataagaatattgtaatattagttttataattataaaatttagaaaatgagttatttttagattttaagataattattttaagtaaaattaaaattgtatttttagaaattattatttaatgttattaaaatttgaagaagaaatttagtggtatttgagggtaatagaaaagtttaagtttagtttaaaattttattttgaggttagtcgatttatgttagttgtttagaatttatgttttgtgggttaggtgtggtggtttatatttgtaatattaatattttaggaggttaaagtaggagggttgtttgagtttaggagtttgagattagtttgggtaatatggtgagattttatttttataaaaaaaagaaagaatgttaggtatgttagagtatgtttgtagttttagttatttaggaggttgaggtgggaggattatttgagttttggaggttaaggttgtaatgagttgtgattatattattgtattttagtttgggtaatagagtgagattttgttaaaaaaaaaagtttatgttttgtgaatttaaatattattggaagaaaatatgtagaaaaaggttaattgggtattttgtatttgttatatcgggattttcgtaggtggaatttttaaatttgt

SEQ ID NO: 245 - DNA, 5239 bp, Artificial Sequence
  chemically treated genomic DNA (Homo sapiens)
ttgtaattttagttatttgggagtttgaggtaggagaattttttgaatttaggaggtggaggttgtagtgagtcgagatcgtattgttttattttagtttgggtaataaagtaagattttgttttaaaaataaaaaattaaaaaaattaaaagtaaaaatttaattttgattaggagatgaagtatagaattggggtattggttttttttttttggaattgtatttttggaagtagatattagaagtttagaattgataagaagaaatttggataagatggaagaagttggtaggagaggtatgtttgttttttagatattatttatttgtttttttttatttggagtgaaaatacggttatatttgttgggtttttgaatggtataagaaatagagaagttaaggtcgtttttatttggtggggtttattgaaaagttaatcgggagtgtcgaggggaataaaggtttggtatttttagttttataggttaggttatggtttttttatattcgattgggttttttggagagttgatagtggattataattgattttttgttaatggaatatgaatggaagagtggggtgggaggtagatttgatggagattttgttttaattatgtagataaggataatttttaaaggtatgaattatagatggaaggaagttggaggtttgaaggaggttgatgagtagttttgttagttagggttatatacgttattttagttttgtttgtttattttgagttttttattttgtttttattttttttttgttgagatggagttttgttttgttatttaggttggagtgtagtggtacgattttcgtttattgtaagttttatttttcgggtttacgttattcgtttgttttagtttttcgagtagttgggattataggcgtcgttattatatttagttaatttttttttttttgtagttttagtagagatagggttttattatgttagttaggatggtttggattttttgatttcgtgattcgttcgtttcggttttttaaagtgttgggattataggcgtaagttatcgtattcggtttttgaggtttttatttatttattttttttgagatggagtttcgttttgttttttaggttggagtgtagtagcgcgattttagtttattgtaaatttcgtttttcgggtttttgttatttttttgttttagtttttcgagtagttgggattataggcgtttgttatcgcgttcggttaattatttgtattttttagtagagacggggttttatcgtgttagttaggattgtttcgattttttgattttgtgatttattcgtttcggttttttaaagtgttgggattataggcgtgaattatcgcgttcggtttttgaggtttttatttgaaagtgtagtaaaattttattttatttaagttattgtattttagggtttttttattatagaagtttaacgtgtattttaataaatatatttttttgagtgttgtttttggtttttatattgattttttgttaggtatattagttagatatggtttggttttgttataattaagttagaataatagtagtttaaatggtttgagtataagtggtttaggttaattttattagttttataggattggagagtagggtttttttaattttgtttttttattattatttatatgtgatttttattttgtgatttaggtggttgttttagagtttattattttgtttatattttagttggtgggaagggaagaagttttatatattgaggagtaaatatttttttttaagaatatattttgtgggtttagaaaatttgggagttttattatttaagtaggaagagagaatgaattttgttatattgtgttaagttgatgtagtttaataaatattgggaaaaatttatgaaagaaaggtttttttttttgaaggtagttgttatatattagtttgatggttttaaaaggtatttaaagtttagtgatttgaatgtttagttaggttaggttttattacgttttggtaattaataatttagaaatatttgttgttataggagggtttataaaatatagttattaattttttttattttgatgtgtttgtttttttgtcgtgtgattttgttattttttttattaagaggtaaattttatgtttttagttttaaatttgggttgattttgtgatttgttttgattaatagaatgtggtagaagtgatgttatgtgatttttggggttaggtttcgagagattttgtagtttatgttttggattttttagaagttgttttgagattgttatgttatgagggttagggaggaaggatttgttgttttattgttaattgaatttagtttttagttgattgtcgttgtatggaagattagtagaagaattttttggttaatatgagaaagaataaattatttttaaattttttatatattgggtgggtatttttttttttgtattagtagaaatgtaatgaattaaaataataaaggtttattttttggttatattatttatttattgagagttagtcgagtattgcgtttttttttttttttttgagatagagtttttttatgttatttaggttgaagtgtagtggtgtgatttcggtttattgtaatttttgtttttcgggtttaagcgatttttttattttaattttttgagtagttgggattataggcgtatgttattacgtttagttaatttttgtatttttagtagagatggggttttattatgttggttaggttggtttttaatttttgaatttaggtgatttttttgtttcggttttttaaagtgttgggattataggtgtgagttattgtgttcggttggtattgtgttttcgatattatttagggattttggttggtggagtagttattattttagacgttattatatagaggggaagagtagggtgaagattatattgagtttttattaggaagtgatatatattatttgtatttatattttattggttaaaataagtggttggggaaattttattttattatgtgattgaaagaagataaggttatagtatttgtgaatatttttaaatattttttatttttacgatagtttattttttttttgtaataatttaagtggttgtgtagggttggtatgatattaatattgtgttagatatttaggtttttttgtttgtttgttttgttatttttagtatgttgtttttatttttttggtggaagacggattttcgttaggtttatattttagtttatgaaaagaaaaggtatattgtttttttattttagggatataatttggaaatgatatatataagttttattaatattttattagttagaattaagttatttggttatttagttgtaagggaagttaggaaatatggtttttagttgggtgattgtgtgtttttttaattattttttattgtggaaggagggagaaaagatatttgaggggtaggggaggtattagtagttttgttatagtagttattttggagtttttaatattaggatgttttgatttttatgtatttagttttgtttaaggggagttttaatttgtgtatttttttttttttttttgagatagagttttgtttttgttatttaggttggaatgtagtggtatgattttggtttattgtaatttttgtttttcgggtttaagtgatttttttgttttagtttttcgagtagttgggattataggtttttgttattatattcggttaattttttgtaattttagtagagacggggttttattatgttggtcgggttggttttaaatttttgattttatgatttatttgttttagttttttaaaatgttgggattataggcgtgagttattgtgttcggttttattttttttttttttttttgagatgtagttttattttgttgtttaggttggagtgtagtggtataattttggtttattgtaatttttattttttaggtttaattagttttttaaggatttatttataaattaaaagggtttttacgaatttaaatgattattttagagaggttttatgtttatttttttattggttttatttatttttattttatattgtttaaaaaggtattgaaaagatttttgtgggttagggagattaatatattagttttaagtttttttgttttttgtattttatataagtgtaggttatgatttaaaggtatattttagttttcgtaaaagttttatttttttgagtaattaattttaaatgtatttattttgttagttgggaattttatttattagatttttcgtaaaaatgttgtaaatattttttttgtttttaaaattaagtgttgattttattttttttatttagattatttttagggaaggattgtagggaataaaaaagtattgttaatttttttatttattaagaagttttaaaaaaattagttttatttttttcggaagtttatttttaagaagatagaattgttttaggtttttaggaagtaaaatttatttggtataatttaaaagaatattaaaattttatttaaatgaaatattttgtaatattttggatggtttgtgggtttgtgtgttttagattattgattatttatataagagtaaggtgtatgtgtgtatatacgagtttaaatatgtgtttgtttgcgtgtttgtgagtatgcgtgtatggtgtatatgtgtacgtatgggtgggtggagcgtgggggtagtatataaagtttgtgggggagatttattgattttatagatatattagtattagggagatagggtaaaggttttattttttagtttagtttttaatttttgtttattatttttttaatagaagattattttttttgttattttttggttttttttttttggtagtaatgaagtagttgttgatttagttttagttttcgggaagttagatgattttttttttttcgcggttttttatttttcgtcgtttttagggaggatattatgggtttattgatggtttttttttgtttgttgtttttgtatttaggtaggaggtagggaagggggaacgttagggttttgtgtgtgaggttggtgtttttagtttgaatttttatgtgtgaaatagttttttttgtttttttttttttatttgtgttttttttttttttttattgttgtttttttgtttttacggttttagg

SEQ ID NO: 246 - DNA, 5239 bp, Artificial Sequence
  chemically treated genomic DNA (Homo sapiens)
tttagagtcgtgggaataaggagatagtaatggagaaagaaggaagatatagatgagaaaaggaaagtaaaagagattgttttatatatgggaatttaagttgggagtattaattttatatataggattttgacgtttttttttttttgttttttatttgggtataggaatagtaggtaaaaaagaattattagtgggtttatggtgttttttttaggggcggcgagaggtagagagtcgcgggagggaaaaggttatttgatttttcgaaaattagagttgggttagtagttgttttattgttgttagagaagaaaaattagggagtggtaagggggatggttttttgttagggaaataataagtagggattggggattgaattgaagggtgaaatttttgttttgtttttttgatgttaatatatttatagggttaatagattttttttataggttttgtgtattgtttttacgttttatttatttatgcgtgtatatgtgtattatatacgtatgtttataaatacgtaggtaaatatatatttgggttcgtgtgtgtatatatgtattttgtttttgtgtgaatagttaatagtttaaagtatataaatttataaattatttaagatattgtaaaatattttatttaagtaaagttttagtgtttttttgggttgtattaagtgggttttattttttgagagtttagaatagttttgtttttttgaagataaattttcgaggggggtgaaattaatttttttagaattttttgataaataggaagattgataatatttttttattttttataatttttttttagagataatttaggtggaaaaaatgaaattaatatttagttttggagataggaaaaatgtttataatatttttacggaaagtttagtagatgaaatttttaattggtaaagtaaatatatttggggttggttatttaaaggaataaaatttttgcgggggttgggatatgtttttaaattataatttatatttgtatgaaatgtaggaagtaaagaaatttgaagttagtgtgttagtttttttgatttatagaagtttttttaatatttttttgaataatgtagggtaaaaataaataagattaataaaaaaatgaatatgaaatttttttgaagtgattatttaggttcgtaaaaatttttttgatttataagtgagtttttagagaattgattgaatttagaagatggaggttgtagtgagttaagattgtgttattgtattttagtttgggtaatagagtaagattatattttaaaaagaaaaaaaaaaaataagatcgggtatagtgatttacgtttgtaattttagtattttgggaggttgaggtaggtggattatgaggttaggaatttgagattagttcggttaatatggtgaaatttcgtttttattaaaattataaaaaattagtcgggtgtggtggtaggggtttgtaattttagttattcgggaggttgaggtaggagaattatttgaattcgggaggtagaggttgtagtgagttaagattatgttattgtattttagtttgggtgataagagtaagattttgttttaaaaaaaaaaaaaagagtatataaattgagattttttttggatagggttaagtgtatgaaaattaggatattttggtgttagggattttaaagtggttgttgtggtagagttgttagtgttttttttgttttttaagtattttttttttttttttttatagtaagagatggttaggggaatatatagttatttagttaaagattatattttttagttttttttgtagttaggtagttaggtgatttggttttggttaatgggatgttagtagaatttatgtatgttatttttaagttatgtttttaaaataaaaaggtagtgtgttttttttttttatgggttggaatataaatttagcggagattcgttttttattaggaggatgagggtaatatgttggggatgatagagtaaatagatagaggagtttgggtgtttgatatagtgttgatgttatattagttttgtatagttatttagattgttataagagagaaataaattatcgtaaaggtggggggtatttaaggatgtttataaatattgtagttttgtttttttttaattatatggtaggataggatttttttagttatttgttttagttaataagatgtgagtataagtgatatgtattattttttgatggaagtttaatgtagtttttattttgttttttttttttgtatggtaacgtttgagatggtggttgttttattagttaagatttttgggtgatatcgaaagtatagtattagtcgggtatagtggtttatatttgtaattttagtattttgggaggtcgaggtagggggattatttgagtttaggagttagagattagtttgattaatatggtgaaattttatttttattaaaaatataaaaattagttgggcgtggtggtatacgtttgtaattttagttgtttaggaggttgaggtaggagaatcgtttgaattcgggaggtagagattgtagtgagtcgagattatattattgtattttagtttgggtgatatagggagattttgttttaaaaaagaaaaaaaaagcgtaatattcggttgatttttagtggataagtaatatgattaaaaaataaatttttgttattttaatttattgtatttttattaatgtaggaaaaaaagtatttatttaatatgtaggaaatttaaaaatgatttatttttttttatattggttagaaggtttttttgttgattttttatgtagcggtagttagttaggggttgagtttagttaatagtaggatagtaggttttttttttttagtttttatagtatggtagttttaggataatttttgaggaatttaaaatataagttgtaaggtttttcgaggtttagttttaaaagttatataatattatttttgttatattttattggttaaagtaaattataaggttagtttagatttaagattggaggtatagaatttattttttgataggaggaatggtaaagttatacggtaaaggggtaggtatattagaataggagagattgatggttatattttgtaagtttttttatggtaataaatatttttaggttgttggttattagaacgtaatgaagtttaatttgattgaatatttaaattattaaattttgggtgttttttaaagttattaaattaatatgtaatagttgtttttaaaagaaagggttttttttttatgagttttttttagtatttgttgagttatattaatttggtatagtgtggtagaatttattttttttttttgtttaagtaataaaatttttaagttttttgggtttatagagtatgtttttaaggagaagtgtttattttttaatgtataaaattttttttttttttattagttggaatgtggatagaatggtggattttggaatagttatttagattataaaatggaagttatatgtggatgatgataaagaaataaaattaaagaggttttgttttttaattttgtagagttaataggattgatttggattatttatgtttagattatttaagttgttgttattttagtttggttataataaagttaaattatgtttaattgatatatttagtaagaaattaatgtgagagttaaaggtaatatttagagaagtgtgtttattaggatatacgttaaatttttgtaataaagagattttaaaatatagtaatttaaataagatagaattttgttgtatttttaaataagagttttagaggtcgggcgcggtggtttacgtttgtaattttagtattttgggaggtcgaggcgggtggattataaggttaggagatcgagataattttggttaatacggtgaaatttcgtttttattaaaaaatataaataattagtcgggcgcggtggtaggcgtttgtagttttagttattcgggaggttgaggtaggagaatggtaggaattcgggaggcggagtttgtagtgagttgagatcgcgttattgtattttagtttgggagatagagcgagattttattttaaaaaaaataaataaataagagttttagaggtcgggtgcggtggtttacgtttgtaattttagtattttgggaggtcgaggcgggcggattacgaggttaggagatttagattattttggttaatatggtgaaattttgtttttattaaaattataaaaaaaaaaaaattagttgggtgtggtggcggcgtttgtagttttagttattcgggaggttgaggtaggcgaatggcgtgaattcgggagatggagtttgtagtgagcggagatcgtgttattgtattttagtttgggtgatagagtaagattttattttaataaaaaaaaaataaaaataaaataagaggtttagggtaagtagataaggttgagatggcgtgtgtggttttggttggtagagttgtttattagttttttttaggtttttagtttttttttatttgtggtttatgtttttggaaattgtttttgtttgtatggttgaaatagggtttttattaagtttgttttttattttatttttttatttatattttattggtaaaaagttagttatagtttattgttagttttttaggaggtttagtcgaatgtggaaggattatgatttgatttgtggggttaaagatgttagatttttatttttttcggtattttcgattagttttttagtagattttattagatgagggcgattttggtttttttattttttgtattatttaaaagtttagtaaatgtaatcgtgtttttattttaggtagagggaagtaggtgaataatatttaaaaaatagatatgttttttttgttagttttttttattttgtttaaatttttttttattaattttaggtttttaatatttgtttttaagggtataattttaaagagaaaaaattaatattttaattttgtattttattttttagttagagttggatttttgtttttggtttttttggttttttgtttttgagataaagttttgttttgttgtttaggttggagtgaagtagtacgatttcggtttattgtaatttttattttttgggtttaagggatttttttgttttagatttttaagtagttgggattatag

SEQ ID NO: 247 - DNA, 6247 bp, Artificial Sequence
  chemically treated genomic DNA (Homo sapiens)
gatagattgatttagttagttaggttaaggttaatttgaattaattagtaatagggtggaagaaggggatggttttgttgtgggttttggagaaaaattttaggaaagtagttattttagtttggaattagacgatgggataggggttttttagttgtttttaggtttggttgtttttttgttggggaaggggagggatgggatataggggatagtgagtgaatttaggtaggtgtgagtcgggggtatttgggttttttatttagaaattatttttatttttttttttttatttttttttttttttttgttttgttttgttatttaggttggggggtagtggtgtagttatagtttagtgtagtttttaattttttttgttttagtttttcgaggagttgggattgtaggtacgttattatgttttgttaattttttttttttttttaattgtagagacgaagttttattgtattttttaggttggtttcgaatttttggatttaaataatgtttttatttcggtttttcgaaagtgttgggattataagtacgagttatcgtattttggtttttttttattttttttttgtattttagttaggattgttaaatagaatataggacgtttagttatatttgaattttagataaataataattatttttttagtatatgtagtttttagataatttacgaatggttagttcggttggttatattttttttttttgatttcgggaatgttgggttgggtgggttttaaaatggaaagtattttaatatatatttagattttttttttttttttttttgttggtttatttttgtgtattattttttttttaaatttttggatattaatgtatattttttagaaaaaagttacgaggttttgaagaattttcggttttattttttttttttttttttttttagtaggttattatttgttttagtttttaatttttttattttttattttgttttttttttttggttattttttggaggttagggtagggttagattttttttaggtttaagtgatttttttgttttagtttttcgagtagttgggattataggtatttgttattatgtttagttaattttttgttgttgttgtttgttttgttttgttttgagatagagtttcgtttttgtcgtttaggttagagtgtagtggtacgattttggtttattgtaattttcgttttttaggtttaagtaatttttttgtttcggtttttttagtagttgggattataggtgttcgttattaattttagttaatttttgtatttttagtagagatggggttttattatgttggttaggttggttttgaatttttgattttaggtgatttatttatttcggttttttaaagtgttgggatgataggtgtgagttattatgtttagttagttaatttttgtattttttagtagaaatagggttttattatgttagttaggttggtttcgaattttcgatttttagcgattttttagttttagttttttaaagtgttgggatgataggcgtgagttattatatttggtttttttgagtttggtggtttttaggtattttggtttttttaattgttataataattagaattatttttagtcgtattgtttagttggattaatcgaggtttagagaaaagaggaatttaggtttgtcgttagatagaggttagataggaatttttttttaaggttgttaaattatagtgtcgaatgtttgagtttagaatgaaattaggaaatggggtggtttgaggagaaagtgggggatagaagatggaatggggtaattgggagatttagttttttttttttttttaatttttttttttttttttggtaatagggtttttttttgttatttaggttggagtgtagtggtgtaattttagtttattgtaatttttgtttttcggttttaagcgatttttttgttttagttttttgagtagttgggattataggtatttattattacgtttggttaatttttgtatttttagtaaagacggggttttattatgttggttaggttggtttttaatttttggttttaagtgatttgtttgtttcggttttttaaagtgttgggattatagacgtgagttattgcgtttggtaaggggatgtagttttaaaagttgaattttaattttggagagtaagtaggtatttttattttttttttttttttttttttttttttaaagagtgtgtcgtaattagtgtagatagacgttaggtttgtttttatgttttacgtttttttttatttttggtacggaaaagaatgtggtttataggaaattagagaaaattttttattaatttttttagtggggttttagaaatcgtttttttagggataagggggttttatttatagattttttttttgtttttattatttatttcgtatgtttgggtagtaatgttgtagaacgttagaggaatgttagttaaaatgatatcggttgtcggggtgtggtggtttatttttataattttagtattttgggaggtcgaggtgggcggattatttgaggttaggagtttgagattagtttggttaatatggcgaaattttttttttattaaaaatataaaaaataaaaaataaaagaaaaaaaaaattagttaggtgtagtggcgtatgtttgtgattttagttttttgggaggttgaggtaggagaattatttgaatttaggaggtagaggttgtagtgagttgagatggcgttattgtattttattttgggtgatagtataagattttatttaaaaaaataaaataaaataaaaaaaatgatattagggtattagtttttatttataaggttggtaaaaatttttaagtttattaatatgtttttgtgatgaggttgtggaagaaattgataatttattttatgtagggtttataagtgtgtaaattaatataatttttgtgtaggggaatttggtaatatttagtaagattattagtgtatttagagattgatttaatatatttttttttattgtaacgataattttatgaagtaggtggtaagggtttttttttttatgaataaattgaggtttagggcggtaattagtagtttatttaaagattatagttagttttagagttagaaaataacgtaggtttaagtttatttattgtagagagtttggtgtgaagttatagatgttagtttttttattaagaagaggttggtggttggatatagcggtttacgtttgtaattttaatattttgggaggttaaggtaggtgggttatttgaagttaggagtttaagattagtttggttaatatggtgaaattttttgtttattaaaaatataaaaattgttagacgtggtggtgtttatttataattttagttatttcggaggttgaggtaggagaattgtttgaatttaggaggtggagggtgtagtgagttgagatagcgttattgttttttagtttgggtgatagggtaagattttaaaaaaaaaatatttaaataaataaaatattttttaaaaagtaggaggttggttatttttttataatataataagaggtttgtaatttgtaagaatgaggtagttttttgtttattgaggtgaaatagtttttgaggtatattgtttatgaaaaaacgaaataaaacgaaatttaagatttaattgaagagattaggaagaatagtatgtgttatgtgttgtttatagggtatagtagtttatattagtattttgtgaggttgttgcgggaggattatttgagtttaggagtttaagattggattgggtaatatcgtgggatttttatttttataaaaataaaaaaattattcgggtatggtggcggttattcgtagtttcggttatttgggtggttgagttaggatgattatttgattttaggaggttgaggttgtagtgagttgtgattgtattattgtaatttagtttgagtgatagaatgaaaaaaaaatttttttaaaggaaaatataaaaagaatatgttgttaatagggatgggaggaagattatttttattgttatatatatttgtattttttagatgttgattaatatgaatatattatatatatagatatatatatagatatatatatatatataaataatataatttaatattttaagaggatattgatattagataggtataaaagttttagaaatgaggattttttttagtgatgattttttttattattaaagttatttaggtattttgataagggtaagtgaggggagtttttttggaaaataaatttatttggatagtgaatttttgtatatattttaaagtttatttgaaatgtttttttttataggaagttttttttgattttttaagaagtagagttttattttattggggaaaatatttttttttttttttttttttttttgttttgtatatgagttagaaaatattttatgaaattgggagtttttgtgttgggttttgttttttttttattttatttttttttttttagtatggaagtttttggaagtggggttttgatttttagtttatagagagatttttaggaagtgttcgattgataaacgtatggttaaaagtgaattggggatgaggtttaagatatttgcggtggggggttttttagattttagtgtttttttattataaagtgggtttaatagagaaaggtttgtgtttattaggtggttttgattttgggagagtttagggttagggtgtagttgtatttatgttgttggggaatatgtttttaggttatttattttatggatatgttggttttagggattgaaaagtttaggaaatggtattgagaaatttggggtagttttaaaaggggagaggttatggggagaagggggggttgagtgggggaaaggtaggagttagataaaaagttagttttagtaggcgttgtttatttttttttattttttttttttgtttttttgtttttttgattttgtattgttttagtattatgggatttattttaggttttagtttgttgtttttgttattaatttatttttttttggttttggggagttttatgtgagtggttatgattttatttataaatagggttggttttggggtggaagtagatatttgggggtttaggtttttgtagaatttagggtgtatttgggtgtttgtggatttaggggttagtaggttgggaatgattatatatatttgggttgtttgtgagtttgggtgtttgtggttgggtgtttgtggaatttaggtattatggaattggagtttatatatatttgggttgtttgtgagtttgggtgtttgtggttgggtgtttgtggaatttaggtatcgtggaattggagtttatatatatttgggttgtttgagagtttgggtgtttatgggttgggtgtttgtggaatttaggtatggtggaattggagtttgggatgtttttagaattgaggttatttgttggtttagggtgtatgtggtgtttattgatggtgcggttgggggtgtttggagattcggaggtttggattttataagatttgggagtttgtagtttggggatttgtaatttttagtgtgggtttaaagattggttatttcgggtttatgtatagttggggtatttggaattgattgtatttattaggattggggtgttggaggtttaggttgggtttggggtgttttaagatttgaggtttagaggttttggcgtatgtgggtttgggtaggtagagttgagggtgttcgggagtttgagtgtttatatatttggagtgtttagagaggtagaggtttagggtttggggtatgtgtgggtttaggcgattgtgggtttggaagtttagagatttggaggagttgttgacgttggttggaaggtttagggtttggtgggatgtgtggttttttcgttgtttaggtttttaaaggttaggtttagttggttgagagtgggagttatggtggttgttgttttgtttatgtggttgagacggtggtagtgtttagagaagataatggtattggtaagtgcgtcggtagttattggattttttttaggattagaggttggggtatatagtttgttaggcgttgattttagtgaggattggcgttttatattcgtggaatgataagtttattttcgtgttttatttcgatagg

SEQ ID NO: 248 - DNA, 6247 bp, Artificial Sequence
  chemically treated genomic DNA (Homo sapiens)
tttgtcggagtggggtacgggagtgggtttgttattttacggatgtgagacgttagtttttattggagttagcgtttggtaggttgtgtgttttagtttttggttttggagaggatttagtgattgtcggcgtatttgttaatgttattattttttttgggtattgttatcgttttaattatatgggtaggatagtagttattatgatttttatttttagttagttgggtttggtttttgaaagtttgggtaacgagggggttatatattttattaaattttgaattttttaattagcgttagtaatttttttaagtttttggatttttagatttataatcgtttaaatttatatatgttttaaattttaaatttttatttttttaaatattttaaatatgtaaatatttaaattttcggatatttttaattttatttatttaaatttatatacgttaaaatttttaaattttaaattttagagtattttaaatttagtttaaatttttaatattttagttttaataaatataattaattttaaatgttttaattatatatgaattcgaagtagttaatttttaaatttatattgaaaattgtaagtttttaagttgtaaatttttaaattttgtaaagtttaaattttcgagtttttaaatatttttaatcgtattattaatgaatattatatatattttaaattaatagatgattttaattttagaaatattttaaattttaattttattatatttggattttataaatatttaatttataaatatttaaatttttaggtagtttaaatgtatataaattttaattttacgatatttggattttataaatatttaattataaatatttaaatttataggtagtttaaatgtatataaattttaattttatgatatttggattttataaatatttaattataaatatttaaatttataggtagtttaaatatatataattatttttaatttgttaatttttgaatttataaatatttaaatgtattttgaattttatagggatttggatttttaaatgtttgtttttattttagaattagttttgtttgtgggtagagttataattatttatatgggattttttagagttagggggaggtgggttagtagtaggagtagtaggttgggatttgaggtgggttttatggtgttgggatagtgtagggttagagggatagagggatagagggagaggatggggaggagtgagtagcgtttgttggagttggttttttatttggtttttgttttttttttatttagtttttttttttttttatggtttttttttttttggggttgttttagattttttaatattattttttaagttttttagtttttggggttaatatgtttatggggtgagtaatttgagggtatgttttttagtagtatgaatgtagttgtattttggttttggatttttttagggttagggttatttggtgaatatagatttttttttgttggatttattttgtagtggaagaatattaaggtttggagaattttttatcgtagatgttttggattttatttttagtttatttttggttatgcgtttattagtcgaatattttttaggaatttttttgtaggttgggagttagagttttatttttagaggtttttatgttgagggaggggaagtagaatgggggagggatagagtttagtatagaaatttttagttttatgaaatgttttttagtttatgtgtagggtagggaaaaaaaagaagaagaagaaatgttttttttagtgaaatagaattttgttttttggagggttagggaaaattttttgtaggaggggatattttagatgggttttgaggtatgtgtaggagtttattatttaagtgagtttattttttaaggaggttttttttatttatttttgttaggatgtttgagtgattttggtggtgaaaaaagttattattgaggaaagtttttatttttagagtttttgtatttgtttaatgttaatatttttttaggatattaaattgtattgtttgtgtgtgtgtgtgtgtttgtgtgtgtgtttgtgtgtataatatatttatattgattaatatttaaaaggtataaatgtgtatagtagtaaaggtggttttttttttatttttgttgatagtatattttttttgtgtttttttttaaaaaaattttttttttattttgttatttaggttaaattgtagtggtgtaattatagtttattgtagttttaattttttggggttaagtgattattttggtttaattatttaagtagtcgggattacgggtggtcgttattatgttcggataatttttttatttttgtggagatgggggttttacgatgttgtttagtttagttttgaatttttgggtttaagtgattttttcgtagtagttttataaagtgttggtgtgaattattgtgttttgtggatagtatatagtatatattattttttttggtttttttagttaaattttgggtttcgttttgtttcgtttttttatgaataatatattttagaggttattttattttagtgagtaaagaattgttttatttttataggttataggttttttgttatattgtgagaaagtaattagttttttattttttgggggatattttgtttgtttgagtgttttttttttagagttttgttttgttatttaggttggagggtagtggcgttattttagtttattgtattttttattttttgggtttaaataatttttttgttttagttttcggaatggttgaaattataggtgagtattattacgtttggtaatttttgtatttttagtggataaggggttttattatgttggttaggttggttttgaatttttgattttaagtgatttatttattttggttttttaaagtgttggaattataggcgtgagtcgttgtgtttagttattagtttttttttgatggagagattgatatttgtggttttatattaggttttttgtagtgaataagtttgaatttgcgttattttttagttttgaaattagttgtgatttttgggtaagttattgattatcgttttgagttttagtttgtttatggaaaaggaaatttttattatttgttttatagagttgtcgttgtaatgaaaggaaatatgttgggttaatttttgaatgtattggtaattttgttagatattgttaaatttttttgtatagaagttgtattgatttatatatttatgagttttgtatgaaatgaattgttagttttttttatagttttattataagggtatgttgatgaatttgaagatttttgttagttttatgggtgaaaattggtattttggtgttattttttttgttttgttttgtttttttaaatggagttttgtgttgttatttagggtggagtgtagtggcgttattttagtttattgtaatttttgttttttgggtttaagtgatttttttgttttagttttttaaagagttgggattataggtatgcgttattatatttggttaatttttttttttttttattttttattttttgtatttttagtagagaaagggtttcgttatgttggttaggttggttttaaatttttgattttaggtgattcgtttatttcggttttttagagtgttgggattatagaagtgagttattatatttcggtagtcggtgttattttaattggtatttttttgacgttttgtagtattgttgtttaggtatacgaggtggatggtgagggtaggagaagggtttgtgggtggggtttttttatttttggagaggcggtttttgaaattttattgaaggggttaatggggagttttttttgattttttgtaaattatattttttttcgtgttaggggtagggggaggcgtggagtatgagaataaatttggcgtttgtttgtattgattgcgatatattttttggaagaggaggaggaggaggagagagaatgaaaatatttgtttgttttttagaattggggtttagtttttgaaattgtatttttttgttaggcgtagtggtttacgtttgtaattttagtattttgggaggtcgaggtaggtagattatttgaggttaggagttggagattagtttggttaatatggtgaaatttcgtttttattgaaagtataaaaattagttaggcgtggtggtgggtgtttgtaattttagttatttaggaggttgaggtaggagaatcgtttgaagtcgggaggtagaggttgtagtgagttgagattgtattattgtattttagtttgggtgatagagagagattttgttgttaaaaaaaaaaaaaaaaattaaaaaaaggaaagaaattggattttttaattgttttattttattttttattttttattttttttttaagttattttattttttggttttattttagatttaagtattcggtattgtggtttgataattttgagaaggaatttttgtttggtttttgtttagcggtaagtttgggttttttttttttttgagtttcggttaatttaattaaataatgcgattgaagatagttttggttgttgtgataattaaagaaattaggatgtttagaagttattaggtttagaggggttaggtgtggtggtttacgtttgttattttagtattttgggaggttgaggttgggggatcgttggaggtcgggggttcgagattagtttggttaatatggtgaaattttgtttttattaaaaaatataaaaattagttggttaggtatggtggtttatatttgttattttagtattttggaaggtcgagatgggtggattatttgaggttaggagtttaagattagtttggttaatatggtgaaattttatttttattaaaaatataaaaattaattaggattggtggcgggtatttgtaattttagttattggggaggtcgaggtaggagaattatttgaatttgggaggcggaggttgtagtgagttaagatcgtgttattgtattttagtttgggcgataagagcgagattttgttttaaaataaaataaaataaataataataataaagaattagttgagtatggtggtaggtgtttataattttagttattcgggaggttgaagtaggagaattatttgaatttggaaagggtttggttttattttgatttttaagaagtgattagaggggaggggtaggatgagaagtgagggggttggaggttggagtagatggtagtttattgggagggaaggagggagggagatgagatcgggaattttttagaatttcgtgatttttttttgggagatgtgtattggtgtttagaggtttgggagggggatagtgtataaggatgagttagtaggggagggagagaaggaggtttgggtgtgtgttggggtattttttattttgaggtttatttagtttagtattttcggaattaaggagggagagtgtggttaatcgggttgattattcgtgggttatttggaagttatatatattgaaaaagtagttgttatttatttgaaatttaaatgtaattgagcgttttgtattttgtttggtaattttagttggggtgtaaggggaaaatgagaaggggttagggtgcggtggttcgtgtttgtaattttagtattttcgggaggtcgaggtgagagtattgtttgagtttaggagttcgagattagtttgagaaatatagtgagatttcgtttttataattgaaaaaaaaaaaaaaattagtagggtatggtggcgtgtttgtagttttagtttttcgggaggttgaggtaggaggagttagaggttgtattgagttatgattgtattattgttttttagtttgaatgatagagtaagataggaaaaagaaagaaaataagaggaaggaagtgggaatgatttttgggtgggggatttagatgttttcggtttatatttgtttgagtttatttattgttttttatattttatttttttttttttttaataaaggggtagttaggtttgggagtagttgggaaatttttattttatcgtttaattttaggttgaggtggttgtttttttagaatttttttttagaatttatagtaaggttattttttttttttattttattattgattaatttaagttaattttgatttgattgattgaattaatttatt

SEQ ID NO: 249 - DNA, 7449 bp, Artificial Sequence
  chemically treated genomic DNA (Homo sapiens)
tatttttttttttttaatgtgatttttttttttttttggtagtaaaaatagtatttgtttaatagttttcggatttgaaatttaagaatttttttagtaatgattatatgtttgtaatttaatttgttgagttttattgttaaatttgagaaataaaagtagagaaaacgtaggttgggtatagtggtttatgtttgtaattttagtatattgtgaggttaatatgggaggattgtttgagtttaggagtttgagagtagtttgggtaatatagtaagattttatttttataaataaataaataaataaataataataataataataaaatgaggagaggagagatgattattaagtttttttttagttttagtattttatgattttattttttttttaatattttaggggggtatcgtgatagtatttaaatatttgagtagataaggttatggaaaggggaatgagaataatttttttttttttttttttttttgagatggagttttgtttttgttgtttaggttggagtgtagtggcgtaatttcggtttattataatttttgttttttaggtttaagcgatttttttgttttagttttttgagtagttgggattataggtatgtgttattatgtttatttaattttgtatttttagtagagatagagtttttttatgttggataggttggttttaaattgattttaggtgatttgtttgttttggttttttaaagtgttgggataataggtgtgagttattgtgtttagtttatgtttttttttttattattttgttgatttgttattttaatttttgttaattatatgaggttttatggtaatatttggttgatttagtagaattatttttaagttataaaaatattttgagtttttataaaagtaaaatgttattttatttagtaaaaattaggaattttataaaaagaaagttaaaagggatagtatgggaattaaggaagaggtttgggtaaggattatatggatataaattagaattttagatgtaattgtaaaagaaaaaaaaagttaatttttaaaatgggtatttatttatttaagtaatttttttttttttttttttttttttgagatagagtttttttgttatgtaggttggagtgtagtggtgtaattttagtttattgtaatttttatttttttagtttaagcgattttcgtgttttagttttttaagtagttgggattataagtgtgagttattatatttagttaatttttgtatttttggtagagatgggattttgttatgttagttaggttggttttgaatttttagttttaagcgatttttttttttcggttttttaaagtgttgcgattataggtatgagttattgcgtttagtttttttatataatttttaattttggtgttttataaggtattatgttaaattatgtgaaatgagtatttatgaataagatttttttttattattataaagtttaaatttagaataatagattagatagttattataattattgtataagataaaatgtgttattgtatatagaatatgaaaaaaaggtttaaatatgcgtatatatataaattaagaagttgaagatttggtgaagggtataattttagatagaagtaaatagtattagttatggaacggaaaatggtattaagttggaatagtgaattgtttaggaaagttataaagtagggtatatttacgagtatgtttatagttaggggaaggtaatattatagaggttaagagaagagagtgttaagaagttagtgtatttaatgatatatattgtggaaggtgattgagaaataaacgtttggatttggtttttagaagtaattttagtagaattatggaagtagaagatatattataaagaattaagaagttggtggtcggtcgggtttggtggtttatatttgtaatttcgggattttgggaggtcgaggcgggcggattattaggttaggaaattaagattattttggttaatatggtgaaatttcgtttttattaaaaatataaaaattagtcgggcgtggtggtatacgtttgtaattttagtttttcgggaggttgaggtagaagaattgtttaaattcgggatgcggaggttgtagtgagtcgagatcgtattattgtattttagtttgggagatagagcgagattttattataaaaaaaaaaaaaaaaaaaaaaaaaagggtcgggcgcggtggtttacgtttgtaattttaatattttgggaggtcgaggcgggcggatcgtttgaggtcgggagattaatattattttggttaatatggagaaatttcgttttttattaaaaatataaaaaaaaattagtcgggtatggtggcgtatgtttgtaattttagttattgggaggttgaggtaggagaattatttgaattcgggaggaggaggttgtagtgagttaagatcgcgttattgtattttagcgtgggtaataagagcgaaattttattttaagaaaaaagaaaaaaagaagaagttagtgtttagaatagtaggcgtaggttttaaaataaagtagtatttttgaaaaagagaaattatgttaaattaagagatttaagaagaaagtgcgatttgaagtagatattgtcgtggataagttagttataaaagatgttttagggatagttgaaaaataattatataaaagggggggtatggtggttcgtgtttgtaattttagtatttcgggaggtcgaggaagaattagtagagtttaggagttggagattagtttgagtaatatagtaagattttatttttataaatagaaataaaatagataaaggtcgggtattttttatggtatatattgtataatgtggagattgttaattgaaaaaagaaaaaaatgtataaaaaatatgtatttatatttatgtttattgatgtataatttataatagttaaaaggtgaaagtaatttagatgttttttgtggaatgattggataaataaaatgaagtatagatttataatggaatattatttagttttaaaaagaaagaaaattttgatttatgttataacgcggaggaagtttgaagatattatgttaagtgaaatatattagatataaaaagataaatattgtgtgattttatttagattagatatttaaagtagtcgaatttatagaaattgaaagtataatggtgattgttaggggttgagaaaaggagaaaatggggaatttttttttgagtatatttttagttttgtaagatgaaaaagttttgaaaattggttgtataacgtgaatatggtaaatattattgaattgtgtatttaaaaatggtgaagatggtaaatgttatgatatatgtgtttggtaattaaaatttttttgttagggttaggcgcggtggttcgtatttgtaattttagtattttgggagggagaggagggaggattattcgagtttagtagtttaagagtagtttggttaatatggtaaaatttgtttttgttaaaaatataaaaattagttggtacgttggtgggtaattgtagttttagttatttaggaggttgaggtacgataattgtttgaattcgggaggtagaggttgtagtgagtcgagattgtattattgtattttagtttgaatgacggagggagattttgttttaaaaataataataataataataataaataaataaatgaagtattgttttatatattagaaggtttttagttattatagtttttgttgtttaaagatacgtatgtgtatatttaaatgtatatatatatataaaaaaaggttaagaggatataaatttaggtgttaaaataataattattgattagtgagtatatttttatttttttttttgtttgtttatattttttaattttttttatgtatattttttgtttttgtaataataaagttttttttttaagttacggttataaaatataaataaataagaaagaaatgataggtagtgaggaagttaatgtagagggttaataatttttggaaaatttgaaagtaaaaggagatggagttgtatttaaaagatatcgttgagtttagagtatttttttttgtggcggcgagttttttgaaaatttggtggggagagtggatgaagtttttgtttttagagaaatgagaatatgtaaagttgaagttttgtatattattttaggtggtgatggaattttttaaaattttttcgtgattttaggttggagatttttagtttagatatttttgtgtgtttatttatttagtttatttgtttatttttaaatatattgggtgaagaaaggagttagtggaaaaattaagattgaaagtataagaaagaggagaaatttatattaatatggatttttagatgaggttgtgattttgatatatatataaattaatatagtagattttaaattgtttattataggatgggtatggtggtttatgtttataattttagtattttgggaggttaaggtaggtagattattcgaggttaggagtttaagattagtttggttaatatggtaaaatttcgtttttattaaaaatataaaaattagttaggcgtggtggtgtacgtttgtaattttagttattttggaggttgaggtaggagaatcgtttgaattcgggaggcggagtttatagtgagttgaaattaatttattgtattttagtttgcgcgatagaggaagattttgtttgaaaaataattaataaattaataaataaatataattgtttattagagaatgtttttatgtggtttcgtgtgaggtgaaggaaggtaaattaaaatagcgtgaggattttttggttttatgattttatatttttatgtgggaagattagaattttaagaatatgtatgtatttttaaaaagatattgtttgttttaatattttttttatttttttgtagaagtttagtaatggcgtttttttttgttgagattaatttaattgatttatttttatagttatggaatgagtttttagtaattttttttatggttatttttagttttatttttttattgggattgttaggtaatgggttggtgttgtgggtggttggtttgaagatgtagcggatagtgaatataatttggtttttttattttattttggcggattttttttgttgtttttttttgtttttttcgttggtttatttggttttttagggatagtggttttacggtaggtttttatgtaagtttattttttttattattgtttttaatatgtttgttagtgtttttttgtttattgttattagtttggatcgttgttttgtggtatttaagttaatttggtgttagaattatcgtaatgtagggatggtttgttttatttgtggatgtatttgggtggtggtttttgtgatgtgtatttttgtgttcgtgtatcgggaaatttttattatagataattataatagatgtggttataaatttggtttttttagtttattagattatttagatttttatggagatttattagaaaataggttttttgaaaatattgtttagtcgtttggagaaatgaatgataggttagattttttttttttttaaataaatgattatttttggatagtttttattgttttttaattttaaatattttaaagattttttgtagatttattttttaggggttttgttaggttaataagttaaaatttgtattttaatgtatttaaatttgttgatgtggttttatttaaaatttttagtgggttttttattgaagattacgaaattagtttattggataattttgatgtttttttttttatttatttaaagttgttttttagcgtttttagtaattttttttacgagtttgagttattataaggtttttaggattattataatttaggttaatttatagatgacgattaagtgttaatatttttcgtggtaataacgattattaggttagtggtgggttttttgttgttttttgttattatgatagtttgttatagttttattgtttttcgaatgtaaaggggtcgtttcgttaagttttagagtaaaatttttcgagtggtcgtggtggtggtggttgttttttttgtttgttggattttatattatatttttggagttttgttattgtttattgatttagaaatttttttggggaaaattttgatgttttgggattatgtatgtattgttttagtatttgttaatagttgttttaatttttttttttatgtttttttggggaaagattttaggaagaaagtaaggtagtttatttagggaattttggaggtagtttttagtgaggagtttatacgttttatttattgttttttaaataatgttattttagaaagaaatagtataattgtgtgaaaatgtggagtagttaataagtaggggtttttaggtaattatatagtgaaagtttataagaggatgaagtgatatggtgagtagcggattttaaaaattgttaaagaattaatttagcggtttttaaacggtatatagattattgatattagtattatttagaaatttgttagaaatgtaaatttttaagtcgtattttagatttgttgaatcggaatttttgggggttgggatttagtaagggtatttaataaattttcgtttttgattaatgttaaatgtaagaattattgtaaatattagttttatttttattttaaattaagttatgtgaaataagagaagttattttgtttttaaatgatgttgaatatttgtcgatatttttattattaaatttttttttagtattgtttaagttttttagattttatttaaaattattttttgtttttttacgtgagtgaaagatgattatatattttaatgttttgttgtcgtgtggtgttgatggttttaaacgaaaagaaagtgtaaaaagaaaatgtttgtgaagataagaagttatgagattgagtttggagtatagggttatgtaatgatgtttgtttttgggaatatttttgggtataggatatagaaatttttattattatatagagtttttattattataattaaataagtatttattgtgtgaaaattgatttatgaaatgttatgaaagttgtggtttggggagttttgttttttttaattgtttatcggttgggtatttattttttatttttttttttaagttttttaatttttttattattttttagtttttaaattttttatattagattttgtgttttaaataatttttaatttcgtaagattttagttatttttttttttttgttttaaatgaatattttttaagaaagtattttaagtggaaggagaaagagggtggaggatggagtagtaatttttttattttttgtaattgagt

SEQ ID NO: 250 - DNA, 7449 bp, Artificial Sequence
  chemically treated genomic DNA (Homo sapiens)
atttagttgtagagagtagaagaattgttgttttattttttattttttttttttttttatttgaaatatttttttagaaagtatttatttggagtaagaggaagggagtaattagaattttacgaaattagaggttgtttgaggtataaagtttgatgtggaagatttggaggttggggagtaataaggaaattaaggagtttaggaagaggagtggaaaataggtgtttaatcggtaggtagttagaagaaatagaattttttaaattatagtttttataatattttatgagttagtttttatataatagatgtttatttagttgtaatagtggaaattttatgtaatagtggaaatttttatattttgtatttaggggtgtttttagggataggtattattgtataattttatgttttagatttagttttatggttttttgtttttataggtattttttttttgtatttttttttcgtttaaaattattaatattatacgataataaagtattaggatatatgattattttttatttacgtaggagaataagaaatggttttaaatggaatttggaagatttagataatgttaaggaaaaatttaatgatggaaatatcgataaatatttaatattatttaaaaataaagtagttttttttattttatatagtttagtttgggatagaaatagaattaatgtttataatgatttttatatttagtattaattagaaacgagggtttgttaagtgtttttgttgggttttaatttttagagatttcgatttagtaagtttgggatgcggtttgagaatttgtatttttaataagtttttaggtgatgttgatgttaatagtttgtgtatcgtttgagaatcgttggattgattttttgatagtttttgaagttcgttgtttattatattattttatttttttataaatttttattatgtgattgtttaagagtttttgtttgttggttgttttatatttttatatagttgtattatttttttttgaaatgatattgtttgagggatagtgggtggaacgtgtgagttttttattgaaggttgtttttagaattttttgaatggattgttttgttttttttttaaaatttttttttaagagggtataaaggaagggattaaagtaattattggtagatgttagagtaatgtatatatgattttaggatattagagttttttttaagggagtttttgggttagtaagtaatgataggattttaaaaatgtggtatggagtttagtagataagaaagatagttattattattacggttattcgaaaggttttgttttgagatttggcgaagcggtttttttgtattcggaagataatgaagttgtaataggttattatgataatagagggtagtaggaaatttattattagtttagtgatcgttattgttacgaggggtgttggtatttgatcgttatttgtgaattggtttaaattgtaataattttggaaattttgtggtagtttagattcgtagaaggaattgttagaagcgttagggaatagttttaaatgagtagagagaaaagtattagagttatttagtgggttggtttcgtgatttttaataggaaatttattggggattttaggtgagattatattagtaggtttaaatatattagaatatagattttgatttgttaatttagtagaatttttagggagtgaatttgtagaaggtttttgaaatgtttgaggttggaagatagtggggattgtttaaggatgattatttgtttggaaagaggaaggatttaatttattatttatttttttaggcggttgaataatgtttttaagagatttgttttttagtggatttttataaaagtttggataatttaatgagttggagagattaaatttgtagttatatttattatggttgtttgtagtgaagatttttcggtatacgaatataggaatgtatattataaaagttattatttagatatatttatagatagagtaggttatttttatattgcgatgattttgatattagattggtttgaatattataagatagcgatttaggttaatggtagtaagtaggaagatattggtaaatatgttgaggataatgatggaggggatgagtttgtataggaatttgtcgtagggttattgtttttggagagttaagtgagttagcgagaagggtaaggagaggtagtagaggaggttcgttaaggtgaggtggaggaattaaattgtgtttattgttcgttgtatttttaggttagttatttatagtattagtttattgtttggtaattttagtaaaaaagtaaggttgagaatgattatggagagaattattgggggtttattttatggttgtgagagtaggttagttgaattggttttagtagagaaagacgttattgttaaatttttgtaaaaagatgaaaaaaatgttaaaataaatagtatttttttgaaaatgtatatatatttttaggattttaatttttttatataaagatgtgggattatgaaattagaaggtttttacgttgttttagtttgtttttttttattttatacgggattatataaaagtattttttgatagataattatatttatttattaatttattaattattttttagatagagtttttttttgtcgcgtaggttggagtgtagtggattgattttagtttattgtaagtttcgtttttcgagtttaagcgatttttttgttttagtttttagagtagttgggattataggcgtgtattattacgtttggttaatttttgtatttttagtagagacggggttttgttatgttggttaggttggttttgaatttttgatttcgggtgatttgtttgttttggttttttaaagtgttgggattataggtatgagttattatgtttattttatgatagataatttaaaatttattgtattgatttatgtgtgtattaaaattatagttttatttggaagtttatattagtgtaaatttttttttttttttgtatttttaattttggtttttttattggtttttttttttatttagtgtgtttaaaaataaataaataagttaaataagtaaatatataaaaatatttggattggaggtttttaatttgaggttacgaaagggttttaggaagttttattattatttaaaatgatatgtaaaattttaattttatatatttttatttttttgagggtagaagttttatttattttttttattagatttttagaggattcgtcgttatagaaagaggtattttagatttagcgatgttttttagatataattttatttttttttgtttttaaattttttaagagttgttggttttttgtattgatttttttattatttattattttttttttatttatttgtgttttatgatcgtaatttgggaaaagagttttattattataaaagtaaaaaatatgtatgaagaaaattggaaaatatagataaataaaaaagaaaataaaaatatatttattagttagtgattattattttagtatttgaatttatatttttttgatttttttttatgtgtgtgtgtgtatttaggtatatatatgcgtatttttagatagtaggggttgtgatggttagaagttttttaatatgtgggatagtgttttatttatttatttattattattattattattatttttgagatagaattttttttcgttatttaggttggagtgtagtgatataatttcggtttattgtagtttttgtttttcgggtttaagtaattatcgtgttttagttttttgagtagttgggattgtagttgtttattaacgtattaattaatttttgtatttttagtagagataggttttgttatgttggttaggttatttttgaattgttaggttcgagtgattttttttttttttttttttaaagtgttgggattataggtgcgagttatcgcgtttggttttaataaaaaaattttaattgttaaatatatgtattataatatttattatttttattatttttaagtatatagtttagtagtgtttattatatttacgttgtataattaatttttagaatttttttattttataaaattgaaaatgtgtttaggaaagaattttttatttttttttttttttagtttttggtaattattattgtatttttaatttttatgaattcgattattttagatatttgatttaagtggaattatatagtatttgtttttttgtgtttggtgtattttatttagtataatgtttttaagtttttttcgcgttgtggtatgggttagaattttttttttttttaaggttgaataatattttattgtaggtttatattttattttgtttatttagttattttatagaggatatttggattgtttttattttttgattattgtgaattatgtattaatgaatatgggtgtaaatatatattttttatatatttttttttttttttagttagtagtttttatattatataatatgtattataaggaatattcgatttttatttgttttgtttttgtttgtaaagatggggttttgttatgttgtttaggttggtttttaatttttgggttttattgattttttttcggtttttcgaagtgttgagattataggtacgaattattatgtttttttttttatatgattattttttaattgtttttaagatattttttatagttggtttgtttacgataatatttattttagatcgtattttttttttaagttttttaatttagtataattttttttttttaaggatattgttttgttttggggtttacgtttattgttttgaatattaattttttttttttttttttttttttgagatggagtttcgtttttgttgtttacgttggagtgtagtggcgcgattttggtttattgtaatttttttttttcgggtttaagtgatttttttgttttagttttttagtagttgggattataggtatgcgttattatgttcggttaatttttttttgtatttttagtagagaacggggtttttttatgttggttaggatgatgttgatttttcgattttaggcgattcgttcgtttcggttttttaaagtgttgggattataggcgtgagttatcgcgttcggtttttttttttttttttttttttttttttgtgatggagtttcgttttgttttttaggttggagtgtaatggtgcgatttcggtttattatagttttcgtatttcgggtttaagtaatttttttgttttagtttttcgaggagttgggattataggcgtgtattattacgttcggttaatttttgtatttttagtagagacggggttttattatgttagttaggatgattttgattttttgatttggtgattcgttcgtttcggttttttaaagtttcgggattatagatgtgagttattaggttcggtcggttattaattttttaattttttgtaatgtattttttgtttttataattttgttaaaattatttttaaaaattaaatttaaacgtttgttttttagttattttttataatatgtgttattagatatattgattttttaatattttttttttttggtttttgtgatattatttttttttaattgtgaatatgttcgtaaatgtattttgttttatagtttttttgaataatttattattttaatttaatgttatttttcgttttatggttaatgttgtttatttttatttggaattatgttttttattaagtttttagttttttaatttgtgtgtgtgcgtatgtttgaattttttttttatattttatatgtaatgatatattttattttgtataataattataatggttgtttaatttattattttggatttaaattttatgatggtaaaaaggagttttatttataaatgtttattttatataatttaatataatgttttatgagatattaaggttaaagattatgtggaaaggttgggcgtagtggtttatgtttgtaatcgtagtattttggggggtcgaggggagaagatcgtttggggttaggagtttaagattagtttggttaatatggtaaaattttatttttattaaaaatataaaaattagttgggtgtggtagtttatatttgtaattttagttatttgggaggttgaggtacgagaatcgtttgaattggagaggtggaggttgtagtgagttgagattgtattattgtattttagtttgtatgataaagagattttgttttaaaagaaaaaaaaagaaaaaaaaaattatttgaatagatggatgtttattttgggggttgatttttttttttttttgtaattatatttaaaattttaatttgtatttatgtaatttttatttaggttttttttttaatttttatgttgttttttttaattttttttttgtgaaatttttaatttttattggataaaataatattttatttttatagaggtttaaaatatttttgtgatttgaaagtagttttgttgagttagttaaatattgttatagggttttatatgattagtagaagttaaaatagtaagttaataaaataataaaaaagaagatatgggttgggtatagtggtttatatttgttattttagtattttgggaagttaaggtaggtagattatttgaggttagtttgagattagtttatttaatatggagaaattttgtttttattaaaaatataaaattaggtgggtatggtggtatatgtttgtaattttagttatttaggaggttgaggtaggagaatcgtttgaatttgggaggtagaggttgtggtgagtcgaggttgcgttattatattttagtttgggtaataaaagtaaaattttattttaaaaaaaaaaaaagaagaagaaattatttttatttttttttttatggttttgtttatttagatatttaaatattattacggtatttttttaaaatattgagagaagaatagagttatgggatgttagggttgaaagaaaatttggtaattattttttttttttttattttgttgttgttgttgttgtttgtttgtttgtttgtttgtagagatagggttttgttatgttgtttaagttgtttttaaatttttggatttaagtaatttttttatgttggttttatagtgtgttggggttatagatatgagttattgtgtttagtttacgttttttttgtttttattttttaagtttgatagtgaaatttagtaaattagattataagtatataattattattagggaggtttttggattttaggttcgaggattgttaggtaaatgttgtttttattattaaaaaaaaaaaaaaattatattaaaaaaaaaaagata

SEQ ID NO: 251 - DNA, 5198 bp, Artificial Sequence
  chemically treated genomic DNA (Homo sapiens)
ttttatgcgtttagttatttttgaaaatgttttgggtagatttgtttagattaataaatgttttttatgttttaattatttttttttttttgagatagtgttttattttgttattaagttggagtgtagtggtatgattttggtttattgtaatttttgttttttgagtttaagtgatttttttgttttagttttttaagtagttggtattataggtatttgatattacgtttagttaatttttttttttttttttgagacggagtttcgttttgttatttaggttggagtttagtggtatgattttggtttattgtaagttttgttttttgggtttatttattttttcgttttagtttttcgagtagttgggattataggtgttcgttattatgtttggttaattgtttttttttttgtatttttagtagagatggggttttatcgtgttagttaggatggttttgattttcggatttcgtgatttattcgttttagtttgttaaagtgttgggattataggtatgagttatcgtatttggtttatttttgtatttttaatggagatcgggttttattatgttggttaggttggttttgaatttgaatttttgattttaagtgatttatttttagcgttttaaagtgttgggattataggtatgagttatcgtgttcggttttagttatttttatttttattttttgagttagagttttattttgttatttaggttggagcgtagtggtatgatttcggtttatagtaattttttgggtttaagtagtttttttgtgttagttttttgagtagttgggattataggtatatattattacgttcggttaatttttgtagttttagtagagacggggttttattatattggttaggttgatattgaatttttgattttaggtgatttatttacgttagttttttaaagtgtcgggattataggtttgagttatttcgttcggtttatttagatgttatattagtggtaatttttgttattttgtgagttttttagtgtttaaataattttttttaagagatggggttttattgtgttgtttagttgtaattatattttattgtagttttaaatttttgggttaagtgatttttttgttttagttttttaagtagttaggattataggtgtttgtttttacgtttggttgtttttatattttttgtagagatgtggcgggtgggggggttttattgtgttgtttagattggtttcgaatttttgtttttaattgattttgttattttagttttttaaaatgttgaattataggtatgagttattgtatttggttttaaataattttaaaataatatttttatttaggattttagttaatttttaataggtggattagtttttgttgtattttcgtaaatagaagttttggtttatttttatttgttttaaatattgaattttatatttttttttattttattttatttagaatttagattgttaatgttttgaagttatagtttgtattttaattattattttattttagtgtttggttttagaaattatattgattttttgatagattatatataaggtaggtggatgagaatgtgggtagttagttggaaaaggttgtttggttatttgtttgattatttttttatatagttttttttttattaagagaaaatgtttttatattggtaaataaaatttttttgtttgagagcgtttagagtatagtagagtattttattttgatacgtttttttttatttttttttttgtggagatagaaggagttttaagagtagggggagattagaatcgtttagttgggtttcgatttggatgtttatggaattatttttattgaggattataggattagagtatgtgattgtgtgcgttaggggtgttggggggagggtataggttgggggagatagggaagttgggaaatagaaataaaaataaaagaaagaatttttttgtttttatattttatggagagggtatagggttttggtaaatagtaatatgagggagagagataggagggaaagagggaggagtgagagggtaaagagggggggagaggagggggaggaggaggaaggaaggagggggaggaggagggggggaggaagagggggaggaggatgaagaggaggaggaagaagaagggtatgagaggtggaaagatttgagtaagaggtaagataggaagagaaatgttgttttgggggtggaggttggtagagagtgagggtggggatggattatgttttttatttttgtttgtaggtttttaaggtttgtgatggtcgatcgtatgttggggtagtgtagaaatttttagttttagtatttttagtttgtggggattttagtttttagtaggattaaatgatatagatttttggttttagggatttagaaattacgtgagatttgtggaattaattaaagttaggtatttggtgtttttttgtttttttttagttttatttagtttgtttttttgtttttttggtgaatttgttagaaaagttgttaaaaagttgatttttttttttaataaaatgatttaagtttgtatttttttttataagagaggaggtttattttatttgggttttagaaagagttttgaaatagaatttagtttttggtggtttattaaaagtatataggggtttggtaggaattgtaaaagtttgatgttaattatattgggattaagaggatagagaatggtaggagttgggatatttttaaatatttatattaaaataaaaaaaatttaaagttaaaaaataattgggtaggagttaaataaaaatttaattttgagaggttgtatttggtttaggttttttattttgtaatttatggaatatgtgaaagtatttgaaaaattatagtattgattttatatgggtagatatatttttagagagatgtggtgggagttatggcgtagtttgtttaggtagtggtaggagcgtagaagattttgattttttttttcggttttaagatcgaatgtgtgttaggatatgtggttagggaagagaagttatttaattgaattagtaatagtagtaggaaaagaaaaagtggagggagggtagtttaggtagggggtttggaataagtaattgtattaatagaggtagttggtgcgagtatagaattattttaggttgggattttgttatttagttttttttgtatggttgttcgtgtttttggagatttgtgtaaatattaatggatgaggaggagagatggtttttagagtttagtttttatttttgttggttttttattgtttttaggtatttggtgaatgttggagtttttatcgttcgagatgttgggagttggtggttagttgtgtttggagttgggagatttattaagtattttgttaaaggtattttatttgtagtttaagtttgtagttttttattttttggtggttttttaggtttttaggttttatttatttttttttttttttgtgttatttttttagggcgttaggttgtttttagtatggttcggaaggtaaagtatcgggaattgtttttattagagtttttgggtcggcgggcgtttgtcgtggtgcggtttggttttatttattatgtgtacgattttattggggtttagttagtggattggtgagtttttttttggtttttggtagattatggagtaatgatttaaagtgggatttttttttagtttatgtttagttttttagtgaaggttagtggtttttatttttttttggaattcgggagtatttttttttaagttttaagttttttttatagtttgagtttaggcgtttggttttagttttgttttttttttgtatagtatttttattattttaggaattttttttcgtttgttagagatatgaagattttgtttattattgtttagttttttagagtgggtcgggaggggattagaagagttgtatgatggtggttgagatagggttattttgggaaggtttgggagttaggatgagtgtcgggttttcgtgtgtgtaaaaggttagatgtgattgttgttgtttgtttggtttttgatttagtggtggggtttgagtaatgtttttttgtttttttatggaaagtggaattagaaatggtgttaaggttgtggttgttttttttcgtgtaaaatggtgttgttattattttgttttgaaataggaaggtgggatttttggggaggttggtgaaggagggtagggtttttttttttacgtgttatgttaaaattgttaaataaagtatttttgtttgtgatattttttggatgttttttatttattgtgacgtgtgtttgggtgttttgtttaggggtagaggtgaagtttgagttttgttttatttagagaggaaaggggttaggggtttattttgacgtttaggttattttttttgtggagtggtgagggtgtatttaattttttaaattacggaatttttgttagggtttaaaaaagtaaaagtttagtatagtttaatttgtgttggaatgaaagtaagagataagtgttttagaagtttgttattgttttgtgagggtttttaaatattttgtattcgtgggttatgttgggtttttgtacgtttaggtatatatgagtttgtgtgtatttatattttgatatagatatatttggtagggggaggtgtttaggtattggaatgagaggagttaacggggaaggatagggttatttttgggttaagatttagagttttttatggatatttaggtgttcggggtgtttttataattttgggtttgaggttagttgtattttttggttgttacgtggttttttagtttagttgggttgggggaggagtaaggtttagagttaattttgtttcgaggtttagtttggttagaaggtagtagatagatagacggatttaattttttttggattttttagttatgaggttgttttgggggttgatttgggtatttagtttttttattttatttttgtagaagtttaggttttggaggcgggatgttgggtgtttggattggggtagggttggtatcgggattcgatttaggagtgagggagagtaggggtggaggtgttagagcgaagtttgattgttgattttgtttgttttttttagg

SEQ ID NO: 252 - DNA, 5198 bp, Artificial Sequence
  chemically treated genomic DNA (Homo sapiens)
tttggggagaatagataggattagtagttagatttcgttttgatatttttatttttgtttttttttatttttgaatcgggtttcgatgttagttttgttttaatttaagtatttagtatttcgtttttaggatttgggtttttgtagagataaggtgaagaagttggatgtttagattagtttttagagtagttttatggttggaggatttaagagaggttagattcgtttgtttgtttgttattttttggttaagttaggtttcggggtagagttgattttggattttgttttttttttagtttagttaagttgggaaattacgtgatagttaagaagtgtaattggttttaggtttagagttgtgggggtatttcggatatttgggtgtttatgggaaattttgaattttggtttagaaataattttgttttttttcgttaattttttttattttagtgtttgagtatttttttttattaggtatatttgtattagggtataggtgtatataagtttatgtatatttgggcgtataagggtttaatatggtttacgagtataggatatttaaaggtttttataaaataatgataggtttttaagatatttgttttttatttttattttaatataaattgaattatattaggtttttgtttttttaggttttaatagaaatttcgtggtttaggagattaggtatatttttattattttatagggagaatggtttgaacgttagagtgaatttttgattttttttttttttgaatgaggtaaagtttagattttatttttatttttaaataaggtatttaaatatacgttatagtaaataaaggatatttagaaaatattataggtagaggtattttatttggtaattttaatatgatacgtagagaaaagaattttgtttttttttattagtttttttagaaattttatttttttattttaagatagagtaataatagtattattttatacgaaagggaatagttatagttttggtattatttttggttttattttttatggaagggtagagaagtattgtttaaattttattattgggttagaaattaggtaaatagtagtagttatatttgattttttgtatatacgagagttcgatatttattttggtttttaagtttttttaaggtgattttgttttagttattattatgtagtttttttagttttttttcggtttattttgaggagttgagtaatgatgagtagaatttttatgtttttggtaggcggaggagggtttttgaagtggtagagatgttgtgtaggagaaagataaggttggagttagacgtttaggtttaagttgtgaggagaatttagaatttgggaaggggtgttttcgggttttagagaagaatgagagttattggtttttattaggaaattaagtatgagttgggaggaaattttattttgggttattgttttataatttgttagaggttagggaaagatttattagtttattagttgggttttaatgaggtcgtgtatatggtaggtgaggttaagtcgtattacgataggcgttcgtcggtttaggagttttgataggagtagttttcggtattttgtttttcggattatgttaaggatagtttggcgttttagagaagtggtataggaaaggggaaaggtgaataaggtttagaggtttgaggagttattaaaaggtgaggggttgtaggtttgagttgtagatgggatatttttaataaagtatttgatgaattttttagttttaggtatagttagttattagtttttagtatttcggacggtgaggattttagtatttattagatgtttgagggtagtgggaagttagtagagatgagggttgggttttgagaattattttttttttttatttattaatgtttatataagtttttagaaatacgggtaattatgtaagagagattggataataaaattttagtttggggtggttttgtgttcgtattaattgtttttgttggtgtagttgtttgttttaggttttttatttggattgttttttttttattttttttttttttgttattattattggtttagttaaatagttttttttttttgattatatgttttgatatatattcggttttaggatcgaggagaggaattagagttttttgcgtttttgttattgtttaggtagattgcgttatggtttttattatatttttttgagagtgtgtttgtttatgtgagattagtgttatagttttttaaatgtttttatatattttatgggttataaagtaggaggtttgagttagatatagttttttaaaattagatttttatttagtttttgtttagttgttttttagttttgggttttttttgttttaatgtgaatgtttaggggtattttagtttttattattttttatttttttagttttagtatgattaatattaagtttttatagtttttgttaggtttttgtgtgtttttgataagttattaagaattgaattttattttagggttttttttaaggtttaggtaagataggtttttttttttgtggggaggaatataaatttgggttattttattaaaaagaagagttagttttttggtagtttttttggtaggtttattaaaaaaataggaggataggttggatggaattggagggaggtagggaagtattagatgtttgattttggttggttttataagttttacgtgatttttgagtttttgaagttaaaggtttgtgttatttggttttgttggaaattaaggtttttataggttggaagtattgaagttagaaatttttgtattgttttagtatacggtcggttattataggttttgaggatttataagtagagatgagagatatggtttatttttatttttattttttattaatttttatttttaggatagtatttttttttttgttttattttttgtttagatttttttattttttatattttttttttttttttttttttttatttttttttttttttttttttttttttttttttttttttttttttttttttttttttttttttttttttttttttttttatttttttattttttttttttttttttttgttttttttttttatattattatttattagggttttgtgttttttttatgggatgtgggggtagggaaatttttttttttgtttttatttttgttttttaatttttttgttttttttaatttgtgttttttttttagtatttttgacgtatatagttatatattttggttttgtagtttttagtgaagataattttatgggtatttaagtcgaagtttagttggacgattttgatttttttttgtttttgaagttttttttgtttttatagagaagagagtgaaaagaggcgtattagggtaagatgttttgttatattttgggcgtttttaggtagggagattttgtttgttaatatgggggtatttttttttagtaaaggaaaaattgtgtgagaaaataattaagtaaatgattaagtagttttttttaattagttatttatatttttatttatttgttttatatatggtttattaaagagttaatataatttttaagattaggtattaagataaaatagtgattaagatgtaggttgtggttttaaaatattaatagtttaaattttgggtagggtaaggtggggaggagtatgggatttaatgtttaaaataaataaaaataaattaggatttttgtttacgagaatatagtaagaattaatttatttgttgaaaattaattaaaattttggataaaaatgttattttaaaattgtttaagattaggtatagtggtttatgtttgtaatttagtattttgggaggttgaggtagtaggattaattgaggataggagttcgagattagtttgggtaatatagtgagatttttttattcgttatatttttataaaaaatgtaaaaatagttaggcgtgggggtagatatttatggttttagttatttgggagattaaggtaagaggattatttgatttaggagtttgaggttgtagtaagatatgattgtaattgggtaatatagtgagattttattttttaaaaaaaattgtttagatattaaagagtttataggataataggaattattattaatataatatttaagtaggtcgggcgagatggtttaagtttgtaatttcggtattttgggaggttgacgtgggtggattatttgaggttaggagtttaatattagtttgattaatatggtaaaatttcgtttttattaaaattataaaaattagtcgggcgtggtgatgtgtgtttgtagttttagttatttaggaggttgatataggagaattgtttgaatttagaaagttgttgtgagtcgagattatgttattgcgttttagtttgggtgatagagtgagattttaatttaaaaaataaaaataaaaataattggggtcgggtacggtggtttatgtttgtaattttagtattttgggacgttaagggtggattatttgaggttagaagtttaagtttaagattagtttggttaatatgatgaaattcggtttttattaaaaatataaaaataggttagatgcggtggtttatgtttgtaattttagtattttggtaggttgagacgggtggattacgaggttcggagattaagattattttggttaatacggtgaaattttatttttattaaaaatataaaaaaaaaaataattagttaggtatagtggcgggtatttgtagttttagttattcgggaggttgaggcgggagaatgggtgaatttaggaggtagagtttgtagtaagttaagattatgttattgaattttagtttgggtgatagagcgagatttcgttttaaaaaaaaaaaaaaaaattagttgggcgtggtgttaggtgtttgtaatgttagttatttgggaggttgaggtaggagaattatttgaatttaggaggtagaggttgtagtgagttaagattatattattgtattttagtttggtgatagggtaagatattgttttaaaaaaaaaaaagtaattggaatatggagggtatttattaatttaggtaaatttgtttagaatatttttaaaagtaattgggcgtataagg

SEQ ID NO: 253 - DNA, 13511 bp, Artificial Sequence
  chemically treated genomic DNA (Homo sapiens)
  unsure 4623: n is a or g or c or t
gtgggttttatgaaatataagagaaggaagtgtagttgagttttatagggatagtatttatattttttaaggttatatgtttttatatgtatattttttttagtttttattttatttttttttttttttatagaggtattttttttttttttttgtatgcggtttaagtaagttttatattgtgtttaaatagtatttttaagttttattttttaattttggtatatgaaattcgaatgatttatatttaattttggtttattattttgtttaaggggtagaattatgagatttgaaattagtttagtgggttttataggattaaattttttgagatcgggttggatagattttttttaagaaagtatagatttaggaaaaaaagaggtagaaagaatgatttgtattttaagaagatataatagttggataaatattaaagaaatattttttaaaaattatataatttatttatttattttgtttttttttttttgtttttatggagattgtaaattttataaaggtaggatttttttttttgttttgtttattgtttaagtgtttagaatagttttttgtagtaaatttttgtaaaattcgtgaataaaaatttttggataatgataatagtggtaattatagtgaatatgatgaaaagataagagaatacgtgattgtataaataagggaagttacgatttttgtgaatagacggattttttataatttttagtattttttgacgtttttttttttttttatttaattattattattatgaggtgaagtttttgaaagaattaatcgaaagtatttatttttgtattttaagttttagtataatgtttggtatataattagtaaatatttgtgaattgagtgaaatggatgaattaagatattgttttttttatggtattttgaagagtgttttgtaaattataaaatgttattaaaatattagattgtgatttttattgtagtagtgttttagaaaaaatattttagtaatgtatttaagatgtttgggataataggaggataagaaataaattagaaagttgatttaagagtttaggtataatttatttgattttaataggttttttttttttgtttttttttataaagttttaaattggaatttaatttaagtttttttataattttagaaggggtaaaatttggtagaagtttggttttattgttttaaattagatttttattattatgttagattagttttagatttggagattaaattgtagtttattttttttttattttaaagaattattaaagagtttattttatttaatattattattatgtattgtttaataatttaataaatatataaataaaagtaatttttggagtattttgttatatgaaagattgttattttttattgttaaatatatgagaatttatatagtggaatttagttaagggtatatttgtagaggcgtatttagtaatttttttataaattttttgtgtgtagataatttaatttaattaatattgatttaatttttatgtttattaaatataaagataaatattatttaggtttagtataaaggaattttgaatttattaagtggattaagagtgggtaataataaagtatataatgattataatattcggtaatagtaagtgagttttatatgaaaggtaaaaagagatttatatgtttaaagggtggaggaattatgtagtatttgatgtaaagtgtgaaaatgattgtgaaatgtagaaaaaatttaagaaggaaatatatttggaatggtttttaaagaagaggtatataatatattatatttgtgattggggaagaaaaagttttaagggaaaaaatataatggtaagagaaattataggtttttttgaggattagtaagttatttaatttggttagatggtggattatgtaaaatgaaggagagaaaatgagtttaaagggtaatatggaataaaattgtttaaggtttttaatattagggattgggattttgtagttaatttcgtggtttttttaaaagaataatattgagattttgaatagggttgtgttattgagaggtgaattttagagtatttttgtagagtagattagaagaaattataggaggagttttaaagtttagagattagttaagttattgatgtaatttttaaggtatggttttataatggttggaagtggaattgtagttatagatatgatggtaaggtggaaaaatgaggaatgtatagaagagatattttaaagataaaagttaaataaaagataaaattgttttatgtatttagtatttaaaaggataggaggagttagggagtgaggatgtgatttttgtgatatgatgtttttattatttgtttgaatattagaatattaagataggtggattaggaagtaattaatataaaggtgattaataattttatggaagtagatgaaattttaaatgaaagaaaaggggtgaggataaaattttagatgggtgtaggaagagaattatagaggaaggtagaagaggaattttttaagtgtttagagaaatatatgtattatattttgtttaggaagttaatagtggatttagaagaggttatttagtttggtaattaggaggttaatggtggttattgagagaatagttggtgtaggttggttgtatttattatatagattttaaagagtgaagtgaatgaggagtagatggtaaaatattaaatgtagttaatttagattatttttttaataattttagtaggaaagagaagatataaagagtgtggaagtttgaggtttaaaatattttttgttttttttatatttgagagttttgatttatgattttttaattgaaatagtttaatttgttattttattttatttatttatatattgattgataaagtatattttgaagagtttttgaaatagatggggttattagttttggttttaatgagaaattatagtatttttgttataatgataagttggtatgtgaatatttagtatgtgaaaaagtttttagatagtagtttttattgtttattattttatatttgtggttatttttttggtagaaaatattatttggttatgaatttattattattaaaagaggaataatggtttttaatagaatatatattttttttttggtaaaatgataattgttttattttaattttttatgttttggtttttatttttttttgtatttttttgtttttttataattatatgttttttattggttagttaatagtaattatttattttatgaaaataggagattttgtgtgagaaggttttttgtgttattagttaaaattttagaaggtttgtagttgttgaagtaatttagttagtgttagtaaattttatagtagattttgttttttagtagtatatatttaaatattgtttagagaatatttatattttttgtatgtatagagttagatttgagtataattgtatataagtatttaatttttagttttgaaataattatttatttattagttttaagtagtttatttttattttttaaagttattggatattttgttgtatgtattagattagaaatatttttttttgggttgtaattttttttataagggttagacggtaaatattttaggttttttaggttggagagtttttgttgttagttttttaattttattattgtagtataaaagtaattataaataatggttaattgtgtgattttatttttataaaatgttagttataaaaacgggtattaggttagtttattaatttttgttttagaaaaaggatttatgagtgagatatgttatttaattttttaaaagaatttaagatggagaatttaaatatattgttgaaaagattttagatttttagttggtgttgggttaattttagtgtttggattatagatattcgtattttattttaaggatttttttttattatttttaattttttttatttgtgtttttttagtgttatagtatataattttatttttttgttttttttatagtttatattataaataaagttttttttaagtttattttattggtatttaattttgtatttttttgtattatgatttttagtatttgtttttagttttaaatattttgaatttaggataaatgaattttattttaggattttaaagattaattaaagaaagaaatatgtaaattaaatgatatatatttttgtttaattattaaatatttttttttttgtttatttttttaggtaattaagggtgaagttgttattttagttttaaattagttttaatattggtttgtagtatattattttattttttttttaggtttaaattttaatttttaaaattttaatgtagtataagagagagaaaaaagattggaaattagattatttgtattttagttttgatttattttggttttgggaaagttattattatgtatattaaattatgtgatttttgagtggtgggtttttagttgtgttttaagtaatttttagatttgttgagattattattttttattatgtgataaaaatttaagttgtttaaggaatantttgtttagttggtttttattgttttgaaaaagtttgaaaatatttgttttataatgagggattagtgttttatgaggatagtgattattgaatttattagttggagttgttagggtaagaaaatttattgaaaatttaggattttgtgtaatatttaatatttagagttttagggttattattgattggtgtaatatatttgtaaagtttaagttttagagaatatttattttgataattttttaggtgttgttaggtttttgggatatgatagtattgttttgtgttagttagtaataagaaaagaagttttgtttggattaatatatatattttgtttattttgtatatttattttttttttaataatttgtagtttaggttcgaggatattataaattttgtttaaaggtgagtaatatgatgattttatttttaattttaatattttaaaattgttaattatgtttttaataaaattataattttatgtataaaaatatgtaatttagattataattatttttttgttttttttttttataattgttttgtttaaatttgaaaagaattagaggttatgttttttaaataaatgttattttagaggatatttgagattaagtttttttatgagttaaattagttaaaagtaaagtaaatatattttttagttaaggttagttatgtatttggattatttagtttattttggcgatagtaaaggtagaaagatagaaaggtttattttttgagtttttgggtatgtatagaaaaaaataataagaaataagaaatttagtaagtttatatggagatgtaaaggaagaatttatagttggggataaattagagtatttttagaaatttgttgggtaagatatgttgaattgttttgtagataaatggtttatgtgagtaaaatatattagaaagtgataggttagaataagatgggttttattttaattgaaattttttaaatgtttataaagttattattaatggtttaatgggattattgatttttggaaaatttaagaggggatggtaattatgagaaaattgaagaatttttgtttttttacgatggtattgaagtggaagattttttttttatttttttttattgatattgatggatatttgggttggttttaagtttttgttattgtgaatagtgttataataaatatatgtatgtatgtgtttttatagtagtatgatttataattttttgggtatatatttagtaataggatggttgggttaaatggtatttttagttttagattttggaggaattattatattgttttttataatggttgaattagtttatagttttattaatagtgtaaaatgtttttatttttttatattttttttagtatttgttgtttttttattttttaatgatcgttattttaattggtgtgagatggtattttattgtggttttgatttgtatttttttgatggttagcgatgatgagtattttttttatatttttgttggttgtataaatgtttttttttgagaagatattttttaaatgttaagggtttgtttatattttttgtttattttttgatggggttgtttgatttttttttgtaaatttgtttgagttttttgtagattttggatattagttttttgtcggatgggtagattgtaaaaatttttttttattttgtaggttgtttgtttattttgatggtagtttttttgtttgagtagaagttttttagtttaattagattttatttgttaattttggtttttgttgttattgtttttggtgttttagttatgaagtttttgtttatgtttatgttttgaatggtattgtttaggtttttttttagggtttttatggttttaggtttagtatttaagtttttaatttattttgaattaatttttgtataaggtgtaaggaagggatttagttttagttttttatatatggttagttagtttttttaatattatttattaaataaagaattttttttttattgtttgtttttgttagatttgttaaagattagatggttgtagacgtgtggtattatttttgagggttttgttttgttttattggtttatatttttgttttggtattagtattatgttgttttggttattgtagttttgtaatatagtttgaagttaggtagtatgatgtttttagttttgtttttttggtttaggattgttttggtaatgtaggtttttttttggtattatatgaattttaaagtagtttttattaattttgtgaagaaagttatttgtagtttgatggggatggtattgaatttataaattattttgagtagtatggttatttttacgatattgattttttttatatatgagtatggaatgtttttttatttgtttgtgtttttttttattttattgagtagtggtttgtagttttttttgaagaggttttttatattttttgtaagttggatttttaggtattttattttttttgaagtaattgtgaatgggagtttattatgatttggttttttgtttattattggtatataggaatgtttgtgatttttgtatattgattttgtattttgagattttgttgaagttgtttattagtttaagtagattttggattgagatgatgagattttttaaatatataattatgttatttgtaaatagggataattttattttttttttttttaattgaatattttttattttttttttttgtttgattgttttggttagaatttttaatattatgttgaataggggtggtgaaagagggaatttttgttttgtgttagtttttaaagggaatgtttttagtttttatttattcggtatgatattggttgtgggtttgttataaatagtttttattattttgagatatattttattaatatttagtttattgagagtttttagtatgaagtgttgttgaattttgtcgaaggttttttttgtatttattgagataattatgtggtttttgtcgttggttttgtttttatgatggattatatttattgatttgggtaagttaaatagatttgtattttaggggtgaagttaatttgattgtggtggataagttttttgatgtgttgttggatttagtttgttagtattttattgaggatttttgtatcgatgtttattagggatattggtttaaaatttttttttttcgttgtgtttttgttaggttttggtattaggatgatgttggttttataaaatgagttagggaggattttttttttttttattgattggaatagttttagaaggaatggtattagtttttttttgtatttttggtagaattcggttgtgaatttatttggttttggattttttttggttggtaagttattaattattgttttaattttagagtttgttattggtttatttagggatttaatttttttttggttttgttttgagaggttgtatgtgtttaggaatttatttattttttttagattttttagtttatttgtgtagaggtgtttatagtattttttgatggtagtttgtatttttgtgggatcggtggtgatattttttttattattttttattgtgtttattttatttttttttttttttttttttattagttttgttggtggtttattagttttgttaatttttttaaaaaattagtttttggatttatttattttttgaagggttttttgtgtttttatgttttttagttttgttttgattttagttattttttgttttttgttagtttttgaatgtgtttgtttttgtttttttaggttttttaattgtgatgttagggtgttaattttggattttttttgtttttttttgtgggtatttagtgttataaatttttttttatatattgttttaaatgtgttttagagattttggtatgttatgtttttgtttttattggttttaaagaatatttttatttttggttttatttcgttatgtatttagtagttatttaagagtaggttgtttagtttttatgtagttgagcgttttgagttttttaattttgagttttagtttgattgtattgtgatgtgagagatagtttgttgtaatttttgttttatatttgcggaggagtgttttatttttaattttgtggttaattttggaataagtgttaagtggtgttgagaagaatatatattttgttgatttggggtggagagttttggagatgtttattaggttcgtttggtgtagagttgagtttaatttttggatatttttgttaattttttgttttgttgatttgttttatgttgatagtggggttttaaaattttttattattattgtgtgggagtttaagtttttttgtagatttttaaggattggttttatgaatttgagtgtttttatattgggtgcgtatatatttaggatagttagtttttttttttgaatttatttttttattattatgtaatggttttttttgttttttttgatttttgttggtttaaagtttgttttattagagattaggattgtaatatttgtttttttttgttttttatttgtttggtagatttttttttatttttttattttgagtttatgtgtgtttttgtatatgagatgggttttttgaatatagtacgttgatgggttttgattttttatttaatttgttagtttatgttttttaattggggtatttagtttatttatatttaaggttaatattgttatgtgtgaatttgatttcgttattatgatgttagttggttattttttttattagttaatgtagtttttttttagtattgatggtttttataatttggtatgtttttgtagtggttggtattagttttttttttttatgtttagtgttttttttaggagtttttgtaaggtaggtttggtggtgataaaaatttttgagtatttttttgtttgtaaagtattttattttttttttatttatgaagtttagtttggttggatacgaaattttgggttgaaaatttttttttttaagaatgttgtatattggtttttatttttttttggtttgtagagtttttgttgagagaattgtttttagtttgatgggtttttttttgtgggtaattcgatttttttttttggttgtttttaatatttttttttttattttaattttggtgtatttgataattatgtgttttggagttgttttttttaaggagtatttttgtggtattttttgtattttttgaatttgaatgttggtttgtttttttaggttggggaagtttttttggataatattttgtagagtgttttttaattcggttttattcgttttgttatttttaggtatattaattagacgtagatttggtttttttatatagttttatattttttggaggtttcgtttatttttttttatttttttttttttaaatttttttttttattttattttatttatttgatttttaattattgaaatttttttttttatgtgattgaattggttattgaagtttgtgtatgcgttatgtagtttttgtgttatggtttttagttttattaggttatttaaggttttttttatgttgtttattttagttagttatttgtttaatttttttttaaggtttttagtttttttgtaatgggtttaaatatttttttttagtttagagaagtttgttattattaatcgtttgaagttttttttttttagttggttaaagttatttttcgtttagttttgtttttttatatgtaaggagttgcgtttttttggaggagaagaggtgttttgatttttagaatttttagtttttttgttttggtttttttttatttttgtggttttatttatttttggtttttgatgatggtgacgtatagatggggttttggtgtggatgttttttatgtttgttagttttttttttaatagttaggatttttaggtgtaggtttgttggagtttgttggaggtttatttttgattttgtttgtttgtgtattattagcggaggttgtagaatagtttatattgtagaacggtaaatgttgttgtttgattttttttttggaagtttcgttttagaggggtatttagttgtatgaggtgttagtcggttcgtattgggaggtgttttttagttaggttattcgggggttagggatttatttgaggaggtagtttgtttatttttagattttaaatttcgtgttgggagattattattttttttaaggttgttagatagggacgttgaagtttgtagaagtttttgttgttttttgtttagttatgtttgtttttagaggtggagtttatagaggtaggtaggtttttttgagttgtggtgggttttattaggttcgagatttttagttgttttgtttatttatttaagttttagtaaaggcgggtattttttcgttagtttttttgtgttttgtagtttgattttagattgttgtgttagttgtgagagaggttttgcgggtgtgggatttttcgagttaggtgcgggatataattttttggtgtgttatttgttaagattattggaaatgtgttttattagggtgggagtgtttcgattttttaggtattgtttgtaatggttttttttggttaggaaagggaatttttcgattttttgtatattttaggtgaggcgatgtttcgtttttttttagtttatattttatggattgcgtttattgttcgataagttttagtgagatgaatttagtattttagttggaaatgtagaaattatttattttttgtgttttttatattaggagttgtagattggaattttttttatttagttattttgaataatgtttaaaagttttttatttttatgattgaaataatttaggattttagtagtatatttatgagttggagtaaaaagtttgggtaaaaagtataggtagtatttttaatttttttttatttttttagatagtgataaaggtttttatttttttgtgttttatttaatgtttagtagtatataatgaatatttaaatgtgtgtttattttattttaaattgaaagatatatttagttatacgttaatggatttggttatttttattttggtatttttttttgagtttgtagaagagtttaaaaagtttattgataattttagtattttgggaggtcgaggtgggttgattacgaggttaggagatcgagattattttggttaacgtagtgaaatttcgtttttattaaaaatttaaaaaattagttggatgtggtggtgagtatttgtagttttatttttttaggaggttgaggtaggagaatggtatgaattcgggaggtagagtttgtagtgagtcgagattatattattgtattttagtttgggtgatagagtgagattttattttaaaaaaaaaaaaaaaaagaaaaaaaaaaagtttattgatttattaataagaaatattttagtttttgaatatattgaaaaaataatttttatatttgattttaagtttttgatttaaattaagatttatgaaatgatgaattttatttatttttattgaggtatttttttatgaaaattaagaaacgtaaattaattacgtagaaatataattagaaatttattttttgggatatgagagagttatattttagtagggtaatttggaaatatttattaaaaatgtgtgattaatagttattattaaatttgtaatatttttaaaagttattattaatttgaaaagttagtatttattaagtgatgattttatgttaataattgttttaagtagtttatatgaatttttttattgaattttaataaaagttttatgaggtaggtattatttttattttatagatagtgaaattgagatagaaaaattaggcgaatggtatttaattttttaaagtaaaagttattattatattaattatagtagaattattgatatgtatgtatatattaataatgttgtatgttttattagggatataacgattaaattggtaataacggggtgggtatggttttgtaaataatttatggatttttaagattataagtgggaattattggttaaagattttttcgtttaatttgttgtggtttgagtggtggagttttaggtattttgatattgtagtaatatagtatttaggattgttagaaatttagtgaagggttttattttatttaagaattagggtttgtgagtttttatttgatttgtagttttaatattattgtattgttttgagttttattttatttttataaaatgaaggagtttgatttggaggttttaaagatttttattagtttttatttttttgattttatatggagttagtgaacgttttttttagtaggtttttagtatgttaggaaatgaaaaagagtttttagaagaatgatttaaattttttttttagttttagaaaagtaggaatagttgaaatgtatttgaggttattgtttatataaaaggagtaggtgttttgagaagggtaagattgtataaatttaaaatattttttggaatgaaatggattataaatatatgttatatattttgttttgtagtttattattaatcgtttgaagaaatttattagtattggaggttgtgtttatggtaatttttattttaaaaatttttaaaaataggatttgtatttacgagtatgtgaatttgtaggtgttgatttgttttaaggaaggtagaaaaatgtaaatattttttaaaattatatttgaatttttgatttaggatgatttgtgaaggtttattttaaaaaagtatttgatatgtgttatgtatttttttattttagg

SEQ ID NO: 254 - DNA, 13511 bp, Artificial Sequence
  chemically treated genomic DNA (Homo sapiens)
  unsure 8889: n is a or g or c or t
tttaaaatgaaagaatatataatatatattaaatgtttttttgaggtaaatttttataagttattttgagttagagatttaaatgtgattttagaaaatatttgtatttttttgttttttttaaggtaagttaatatttataaatttatatgttcgtgagtataaattttatttttaaagatttttagggtggagattattataggtataatttttagtattagtaagtttttttaaacggttagtgataggttataagataaagtatgtagtatgtatttgtaatttattttattttaaaaagtattttagatttatatagttttattttttttaaaatatttgttttttttgtgtgagtaatagttttaagtatattttagttgtttttatttttttgggattgggaaagaagtttggattatttttttggaagtttttttttattttttgatatgttggaaatttgttaaagagaacgtttattgattttatataaagttagagaaataagagttagtaaggatttttgaaatttttaggttaaatttttttattttatggagataaaatgaggtttaaggtagtgtaatagtgttgaggttgtaggttaagtaggagtttataaattttggtttttgaatgaggtgaagttttttattgagtttttaataattttaagtattgtgttattgtagtattaagatgtttggagttttattatttaggttataataggttgagcggaaaaatttttgattagtggtttttatttatggttttgaagatttatgagttatttgtaaaattatatttatttcgttattgttagtttaatcgttatatttttaatgaaatatgtaatattattaatatatgtatatatattaataattttgttgtaattaatatagtagtaatttttattttaaaaagttaaatgttattcgtttaatttttttgttttagttttattatttataaaataagagtaatatttattttataaagtttttgttaggatttagtaagaaggtttatgtaaattgtttagaataattattggtatagaattattatttaataaatattagttttttaaattagtaataatttttaagaatgttataaatttaatagtagttgttggttatatatttttaatagatatttttaaattgttttgttaaaatatggtttttttatgttttagaggatgagtttttgattatatttttacgtgattagtttacgttttttagtttttatgaaaggatattttagtaaaaataaatggggtttattattttataaattttggtttaagttaagagtttgagattagatataaaaattgtttttttagtatgtttagaaattagggtattttttgttaataaattagtaagttttttttttttttttttttttttttttttgagatggagttttattttgttatttaggttagagtgtagtggtgtgatttcggtttattgtaagttttgtttttcgggtttatgttatttttttgttttagttttttgaggaggtgggattataggtgtttattattatatttagttaattttttgaatttttagtagagacggggttttattgcgttagttagggtggtttcgattttttgatttcgtgattagtttatttcggttttttaaagtgttgggattattagtaagttttttaaatttttttataagtttaaagaaaaatgttagaataaaagtaattaaatttattgacgtatggttgaatatgttttttaatttaaaatggaatgaatatatatttgggtatttattgtatgttgttaggtattgaatgagatataaagaaatagaagtttttattattgtttgggagggtagaaagaaattgaaaatattatttatgttttttatttaagttttttattttaatttatagatatgttgttagagttttagattattttagttataaaaatgaggggtttttgggtattatttaagatggttgaataggaaaagttttagtttatagtttttagtgtgagagatatagaagatgggtgatttttgtatttttaattgaggtattgggtttattttattggggtttgtcggatagtgggcgtagtttatggagtgtgagttgaagaagggcgggatatcgttttatttgggatgtgtaaggggtcggggaatttttttttttagttaagggaagttattatagatagtatttggaaaatcgggatatttttattttaatgaggtatatttttaatggttttagtaaatggtatattaggagattatatttcgtatttggttcggagagttttatattcgtagagttttttttatagttagtatagtagtttgagattaaattgtaaggtatagggaggttggcggaggggtgttcgtttttgttgaggtttgagtaggtaaataaagtagttgggaatttcgaatttggtggagtttattatagtttaaggaggtttgtttgtttttgtagattttatttttgggggtaggtatagttgaataaaaggtagtagaaatttttatagattttaacgtttttgtttgatagttttgaagagagtagtggttttttagtacggagtttgagatttgagaatggatagattgtttttttaagtgggtttttgattttcgagtagtttaattgggaaatattttttagtacgggtcgattgatattttatatagttgggtgtttttttgagacgaagtttttagaggaaggattaggtagtaatatttgtcgttttgtagtgtgggttgttttatagttttcgttggtaatatataggtaaatagggttaggagtggatttttagtaaattttaatagatttatatttgagggttttgattgttagaaggaaaattaataaatataaaggatatttatattaaaattttatttgtacgttattattattaaagattaaaggtagataaaattataaagatggggagaaattagagtagaaaagttgaaaattttaaaaattagagtatttttttttttttaaaggaacgtagttttttgtatgtaaaggaataaagttgaacggagaatgattttgattagttgagagaagaaggttttagacgattggtaataatagatttttttgagttaaaggaggatgtttgaatttattgtaaagaggttaaaaattttgaaaaaagattagataaatggttaattagaataaatagtatagagaagattttaaatgatttgatggagttgaaaattatggtataagaattatatgacgtatgtataagttttagtagttaatttaattatatggaagaaagggttttagtgattgaagattaaatgaatgaaatgaagtgagaagagaagtttagagaaaaaagagtaaaaagaaatgaacgaagtttttaagaaatatgggattatgtgaaaagattaaatttacgtttgattggtgtatttgaaagtgatagggcgagtggaatcgagttggaaaatattttgtaggatattatttaggagaatttttttaatttagaaaggtaggttaatatttaaatttaggaaatgtagagaatgttataaagatgttttttgagaagagtaattttaagatatataattgttagatatattaaagttgaaatgaaggaaaaaatgttaagggtagttagagagaaaggtcgggttatttataaagggaagtttattagattaaaagtagtttttttagtagaaattttataagttagaagagagtaggggttaatatataatatttttaaagaaaagaatttttaatttagaatttcgtatttagttaaattaagttttataagtgaaggagaaataaaatattttatagataaggaaatgtttagagatttttgttattattaggtttgttttataagagtttttgaaggaagtattaaatatagaaaggaaaaattggtattagttattgtaaaaatatgttaaattgtaaagattattaatgttaggaagaaattgtattaattaatgggaaaaataattagttaatattataatgacgggattaaatttatatataataatattaattttaaatgtaaatgggttaaatgttttaattaaaagatatagattggtaaattggataaagagttaagatttattagcgtgttgtatttaggagatttattttatgtgtagagatatatataggtttaaaataaagggatagaggaagatttattaagtaaatggaaaataaaaaaaggtaggtgttgtaattttagtttttgataaaatagattttaaattaataaagattaaaagagataaagaaggttattatataatggtaaagggatgaatttaaaaagaagagttaattattttaaatatatacgtatttaatataggagtatttagatttataaagttagtttttagagatttataaagagatttagatttttatataataataatgggagattttaaaattttattgttaatatgagatagattaataagatagaaagttaataaggatatttaggaattgaatttagttttgtattaagcggatttaatagatatttttagaattttttattttaaattaatagaatatatattttttttagtattatttagtatttattttaaaattgattatagagttggaagtaaagtattttttcgtaaatgtagaatagaaattataataaattgttttttatattatagtgtaattaaattagaatttagggttaagaaatttaaaacgtttaattatatggaaattgaataatttgtttttgaatgattattgggtatataacgaaatgaagttagaaataaagatgttttttgaaattaatgagaataaagatataatatattagaatttttgggatatatttaaagtagtgtgtagagggaaatttatagtattaaatgtttataagagaaagtaggaaagatttaaaattgatattttaatattataattaaaagatttagagaagtaagagtaaatatatttaaaagttagtagaaggtaagaaataattaagattagagtagaattgaaggatatagaaatataaaaaattttttaaaaaataaatgaatttaggagttggttttttgaaaagattgataaaattgatagattattagtaagattaataaagaagaaaagagagaagaatgaaatagatataataaaaaatgataaaggggatattattatcgattttatagaaatataaattattattagaaaatattataaatatttttatataaataaattagaaaatttagaagaaatggataaatttttgaatatatataattttttaagataaaattaggaagaagttgaatttttgaataaattaataataggttttgaaattgaggtaataattaatagtttattaattaaaaaaagtttaggattagatggatttatagtcgaattttattagaggtataaggaggagttggtattattttttttgaaattattttaattaatagaaaaagagggaattttttttaatttattttatgaggttagtattattttgatattaaagtttggtagagatataacgaaaaaagagaattttagattaatatttttgatgaatatcgatgtaaaaatttttaataaaatattggtaaattgaatttagtagtatattaaaaagtttatttattataattaggttggttttatttttgggatgtaagtttgtttaatttatttaaattaataaatgtaatttattataaaaatagaattaacgataaaaattatatgattattttaatagatgtagaaaaggttttcgataaaatttaatagtattttatgttaaaaatttttaataaattaggtattgatgggatgtattttaaaataataagagttatttatgataaatttatagttagtattatatcgaatgagtaaaaattggaagtattttttttgaaaattggtataagataaggatttttttttttattatttttatttaatatagtgttggaagttttggttagggtaattaggtaggagaaagaaataaagggtatttaattaggaaaagagggaatgaaattgtttttgtttgtagatgatatgattgtatatttagaaaattttattattttagtttaaaatttatttaagttgataagtaattttagtaaagttttaggatataaaattaatgtgtaaaaattatagatatttttatatattaataatagatagagagttaaattatggtaaatttttatttataattgttttaaagagaatgaaatatttaggaatttaatttataagggatgtgaaggatttttttaaggagaattataaattattgtttaatgaaataaaagaggatataaataaatggaagaatattttatgtttatgtgtaggaagaattaatatcgtgaaaatggttatattgtttaaggtaatttatagatttaatgttatttttattaagttataaatgattttttttatagaattggtaaaaattattttaaggtttatatggtattaaaaaagagtttgtattgttaagataattttaagttaaaagaataaagttggaggtattatgttatttgattttaaattatattataaggttatagtaattaaaatagtatggtattggtattaaaatagagatatagattaatggaatagaatagagtttttagaaataatattatacgtttatagttatttgatttttgataaatttgataaaaataagtaatggggaaaggattttttatttaataaatggtgttgggaaaattggttagttatatgtagaaagttgaaattggattttttttttgtattttatataaaaattaatttaagatggattaaagatttaaatgttagatttaaaattataaaaattttagaagaaaatttaggtaatattatttaggatataggtatgggtaaggattttatgattaaaatattaaaagtaatggtaataaaagttaaaattgataaatgggatttaattaaattaaagagtttttgtttagataaagaaattattattagagtgaataggtaatttatagaatgggagaaaatttttgtaatttatttattcgataaagggttaatatttagaatttataaagaatttaaataaatttataagaaaaaattaaataattttattaaaaagtgggtaaaggatatgaatagatttttgatatttgagaaatgtttttttaaaagaagatatttatgtagttaatagagatatgaaaaaaatgtttattatcgttggttattagagaaatgtagattaaaattatagtgagatattattttatattagttagaatggcgattattaaaaagtgaggaaataataggtgttggagaggatgtggagaaataggaatattttatattgttggtgggattgtaaattagtttaattattgtggaaggtagtgtggtgatttttttaggatttagaattagaaatattatttgatttagttattttgttattgggtatatatttaaaggattataaattatgttgttataaagatatatatatatatatgtttattgtggtattatttataatagtaaaaatttggaattaatttaaatgtttattaatgttaatagaggaagataggaaaaaagttttttattttagtgttatcgtagaaaagtagaaattttttagtttttttatagttgttatttttttttgagttttttaaaaattagtgattttattgaattattgatgatagttttatgagtatttagagaattttaattaaaatgaagtttattttattttaatttgttattttttaatgtattttatttatatgaattatttgtttgtaaggtagtttagtatattttatttaatagatttttgaggatgttttagtttatttttagttataggttttttttttatatttttatgtaaatttattgaattttttattttttattatttttttttgtgtatgtttagaggtttaagaaatgagtttttttatttttttatttttattatcgttaaggtaagttgggtagtttaggtgtatgattgattttggttaaagagtatgtttgttttatttttaattaatttaatttatagagaaatttgattttaaatgttttttggaatgatatttgtttaaaaaatatgatttttggttttttttagatttaaataaagtaattataaaaaagaaagataaagaaatggttatagtttgagttatatatttttatgtatgaaattgtaattttgttggaaatatgattaataattttgaaatattaagattgaaaatgaaattattatattatttatttttaagtagagtttgtggtgttttcggatttaagttgtaaattattggggaaaaaataggtatgtagaatgaatagggtatatatgttaatttaaataaagtttttttttttattgttagttaatataaggtaatgttgttatattttagaagtttagtaatatttagagggttgttaaaataaatgttttttggaatttgaattttgtaaatgtattatattaattagtagtaattttgaaattttgggtgttggatgttatatagagttttgaatttttagtgagtttttttgttttagtagttttagttagtaagtttaataattattatttttatggaatattggttttttattgtaaaataagtgtttttaaatttttttaaagtagtagaaattaattaaataaantattttttagatagtttagatttttattatatggtgggaaatgatgattttagtaagtttaaagattatttgaaatatagttgggaatttattatttaaaggttatatagtttaatatatatggtagtaatttttttaaggttagagtaagttagaattggaatatagatgatttgatttttagtttttttttttttttttatattatattgagattttaaagattgaaatttgggtttaaagagaaagtagagtggtgtgttgtagattagtgttgaagttagtttggggttgggatagtagttttatttttgattatttgagaagataaataggaaaagaaatatttggtgattggataagaatatatgttatttaatttgtatatttttttttttaattggtttttgaggttttaaaataaaatttatttgttttgagtttaaggtgtttggagttaaaggtaaatattggaagttataatatagagagatgtaaagttaggtgttagtaggatgagtttaaagaggattttatttgtaatgtgggttatgaagaggatagagaagtaagattgtatgttgtggtattggaaaaatataggtggagagagttaaggatggtaaggggaaatttttgagatggaatgcgaatgtttgtgatttaaatattagaattgatttagtattaattaagaatttagaatttttttaataatgtatttgggttttttattttgggtttttttggaaggttaaatgatatattttatttatgagttttttttttagagtagggattggtaaattagtttgatgttcgtttttgtaattaatattttataggaataaagttatataattggttattgtttatggttgtttttgtgttataatggtagagttaagaagttggtaatagaggttttttagtttgaaaagtttaaaatatttatcgtttggtttttataggaaaagttgtaatttagagagaaatatttttggtttgatatatataataaagtgtttagtggttttgggaagtagaagtaggttatttgggattgatgagtaggtgattgttttagagttaggaattgaatatttgtgtgtagttgtgtttaggtttgattttgtgtatgtaaagaatataggtgttttttaaataatatttagatgtgtgttgttgaaaaataaagtttgttatgaagtttattggtattggttgagttgttttagtaattgtaggttttttgaagttttggttggtaatatagaagatttttttatataaaattttttatttttataaggtagatagttgttattgattgattagtagaaagtatataattgtaaaaaaatagaagggtgtaggagaaaatgagggttaggatatggagagttaagatggagtaattattattttattagaaggagaatatgtattttgttaaaaattattattttttttttaatgataatagatttatagttaaatggtattttttgttaagaaaataattataaatataaaataatgaataatggaagttgttatttgaaggtttttttatatgttaagtatttatatgttaatttattattatagtaaaagtattataattttttattagagttaaggttaatgattttatttattttaaaaattttttagagtgtgttttgttagttaatatgtgagtagataaagtgaaatggtagattgaattattttaattgggggattatagattaaaatttttaaatatggaggaaatagaaggtattttggattttaggtttttatattttttgtgtttttttttttttattaaaattattagaaagatagtttaaattgattgtatttgatgttttgttatttattttttatttattttattttttgaaatttatgtgataaatataattagtttatattaattatttttttaatgattattattaattttttaattgttaaattgaatgattttttttaaatttattattggttttttggataaaatataatatatgtgtttttttgaatatttaggaaattttttttttgtttttttttatgattttttttttatatttatttaggattttatttttatttttttttttttatttgagattttatttatttttatggggttattgattatttttgtattgattgttttttagtttatttgttttagtattttaatgtttagatagataatagaaatattatattatagagattatatttttattttttgattttttttatttttttagatgttaaatatatgaggtaattttattttttatttagtttttatttttgaagtattttttttatgtattttttatttttttattttgttattatgtttatggttatagttttatttttagttattatgaaattatattttgaagattgtattagtggtttagttggtttttgagttttagaattttttttgtaattttttttaatttattttgtaaggatattttagagtttattttttagtagtataattttatttaaaattttagtgttatttttttaaggaaattacgaaattagttatagagttttagtttttaatattggaaattttgagtaattttattttatattattttttagatttatttttttttttttattttgtatagtttattatttagttaaattggataatttgttgatttttaaaaaggtttatggttttttttgttattatatttttttttttgaaatttttttttttttaattataaatgtagtgtattgtgtattttttttttgggggttattttaaatgtattttttttttaaattttttttatattttataattatttttatattttatattagatgttatatgatttttttattttttaaatatatgaatttttttttattttttatatggaatttatttattattgtcggatattatgattattgtgtgttttattattgtttatttttagtttatttaatagatttaaagtttttttatattgagtttgaataatatttatttttatatttgataaatataaaagttaaattaatgttgattgaattgagttgtttatatataaagagtttgtgagaaaattgttgaatacgtttttataaatgtgtttttagttaaattttattatgtagatttttatgtgtttggtaataagaggtaataattttttatatagtaaaatgttttaagaattgtttttatttatgtgtttgttgaattgttgaataatgtataatgatgatattaaatggaataaattttttggtgattttttggaatggaaagaaaatgagttataatttagtttttaaatttaaaattggtttaatatagtaatagaaatttagtttgagataataaagttaaatttttgttaagttttgttttttttaggattatagagaaatttaggttggattttaatttagagttttgtgggaaaaggtagaaaaaaaaagtttattgaagttagatgaattgtatttagatttttgggttagttttttagtttgttttttgtttttttgttgttttaaatattttgaatatattattaaggtattttttttaaagtattattataatgaaaattataatttaatgttttggtagtattttatggtttgtaaagtattttttaaagtgttataggaggaatagtattttgatttatttattttatttaatttataaatatttattgattatatattaggtattatgttgggatttaagatataaagatgaatattttcggttagtttttttaagaattttattttatagtaatagtagttggataggaaagaaaaagaacgttaagaagtattaaaaattataagaaattcgtttatttatagaaatcgtaattttttttgtttatgtagttacgtatttttttatttttttattatatttattgtaattattattgttgttattatttaaaggtttttatttacgaattttgtaaaaatttattgtaaggaattgttttaggtatttgaatagtaaataaaatagaaaaaaaaattttgtttttgtaaaatttataatttttataaagataggagagagaaaataaaataaataaatgaattatatggtttttaagaaatatttttttaatgtttatttaattattgtgtttttttaaaatgtaggttattttttttgttttttttttttttgggtttatgtttttttgaagaaaatttgtttagttcgattttagaaaatttaattttgtaggatttattgagttggttttagattttatgattttgttttttggataaagtgataggttaggattgggtatgggttattcggattttatgtgttagggttggggagtgggatttagaaatattatttaaatatagtgtgaagtttgtttaagtcgtatgtagggagaagaagagaatgtttttgtagagagaaaaaagaatgaggtaaggattggaagaaatgtatatgtgagaatatgtggttttagagaatataaatattgtttttgtgaaatttagttgtattttttttttttgtgttttataaggtttat

SEQ ID NO: 255 - DNA, 7490 bp, Artificial Sequence
  chemically treated genomic DNA (Homo sapiens)
ggtgaaattttgtttttattaaaaatataaaatttagttaggtatggtagtaggtgtttgtaattatagttatttaggaggttgaggtaggagaattatttgaatttagggggtggaggttgtagtgagtcgagattgtgttattgtattttagtttgagcgatagagtaagattttgttttaaaaaaaaaaaaagtatgcgagagggggaaaatgttatgtattttaaaataattagattttaatgagatttattattgtaaggatgatattgaggggatggtgttaaataatttatgagaaatttattttttttaataggtttttatttttaatatggggattatattttaatatgagatttgaaagggatatttaaattatattattttatttttggttttttgaattttatggtttttttatattataaaagataatgatatttgtttaatagttatttaaagttttaatttattttagtattaattgaaaagttttaagttttaaggataaggtttaatttggagataagttttttttgtttatgagtttgtaaaatcgaaataaattatttatttttaagatagaattggggtataggtattgggtaaattttttttttttaaagaagagaaattagttattagaaggaggttataggttttatggaagtttgaaatataatatggtagttattaaattttaaagttttaaaataattttttttggttttaggttttatatttaggatatattgttgtgaggggtgagttttattttattttttgggtaattttatttttttggttttgtagggtttagttattatagttgtttttatgggttggagttgagtgtttaaagtttttttaagtttaatatgtaagttattggtggatttgttattttggggtttggaggatagtgattttttttttattaatttattaggtagtattttagtggggattgtgtgggggggttttaattttgtatttttttttttatagtttttgtagaggttttttgtgagggttttatttttatagttagtttttgtttgggtaattaggtttttttatatatttgaaatttagttggaagttgttaagttttttttatttttgtattatgtgtgtttatgagtttaatattatatggaagttgttaaggtttatagtttgtattcgttgaagtagtagtttaagttgtatttggggtttattgagttaaggttggagttggagagtggtttgtatgtagggattagtgttttaaggttgtgtagggtagtaagattttgggtttggtttatgaaattattttttttttttaaattttttgatttgtgatgggaggggttgttttaaagatttttaaagtgttttcggggttttttttttattgttttggttattaatatttggtttttttttagttatgtaaatttttgtagtaagtgtttgttttatagttttttttgaattttttttttgatgattttttttttttttttgttgcgtggttaggttgtagattttttaaatttttgtattttgttttttttttatgtataaattttaattttaagttatttttttgtttttaaatttgagtgtaggttgttagaagtagttagattatattttgaaatttgttgtttagaagtttgttttattagatattttaagttattatttttaagtttaaatttttatagatttttagggtataaatagagtgtagttaagttttttgttaagataaaattaggtgatttttgttttaatttttaataagttttttatttttatttgagattttattagtttggattttattgtgtttattattattagtattttggttataattatttaattagtttgtaagaaattttaagtttttttttatttttttattttttttggagttttttaaattttttaaatttttgtttattatttagttttaaagttgtttttatattgttaggtatttttatagtaatgttttaatttttagtattaattttttatgttagtttgttttttgtgttgttatagagaaatatttgaggttgggtaatttataaagaaaagaggtttaattgggttttggttttgtaggttgtataagtatggtattaatatttgtttagtttttggtgaaatttgtagggagattttatttatggtagaaggtaaagtgggaataggtaggttatatggtaatagtgggtgtaagagataatttaaatatttaaagtagagttaatattaattatttttaaatttttttaaaaaattgaaaaggagggaatatttttaaattttttttataaggttagtgttattttgatattaaagttaaagaagtatattataaaaaaagaaaattatatgttaatatttttgatgaatatggtgaatatagatataaaaattttaataaaatagttgtaaattgaataatttattaaaagtattatttattacgattaaatgggatttatttttgaaatgtaaggatggtttaatataaattaataaatatgttgtatgagattaatagaatgaatgataaaaattatatgattattttgttagatgtagaaaaatatttgataaagtttaataatattttaagataaagatttttattaagttaggtatagaagaaaagtaatttgatataataaatgttatatatgagaagtttatagttaatattatatttattagtgaaaaattgaaagttttttatttaagttttggattaagataaaaatgtttatttttgttatttttatttaatatagtattggaaatttttgttagagtaattaggtaagaaaaagaaatgaaaggtattaaaatagaaagggaagaagtgaaaatgtttgtgtttgttggtgatataattttatatgtagaaaattttatagattttattagaaaattgttagaattaataaatgaatattgtaaaattgtagaatataaaataaatattaaaaagtatatttttataaattaataatgaattatgtgagaaagatattaagaaaataattatatttttaataattataaaaatatttaggaataaatttaattaagaaagttaaagatttgtatattgtaaattatgaaatattgatgagaaattgaagaagatataaataaatggaaaggtattttttgtttatggattagaagaaaatattgttaaaaagtttatattattatagtgatttagagttttaatgtaatttttattaaaattttaatattattttttaaagaaatagaaaaaaattttaaagtttatatggaattataaaaaaatttaaatggttaaggtaattatgggtaaaaagaataaagttggaggtgttattttgtttgattttaaattatattataaagttatagtaattaaaatattatgattttggtaaaataatagatttattaattagtggaatagaatagagagtttagaaatgtattttatatatatggtcgattggttatttttgtaaggttgttaagaatatataatggggaaaggatagtttttttaataaatggtattgggaaaattggatatttatatgtaaaagaattaaataggatttttatttagtattgtatataaaaatttatttagaatgggatgaagttttaagtataagattagaaattgaaaaattaattgaaaaaaatttaagggaaaaattgtatttttttaggtggggattttttggatttgattttaaaagtgtaggtaataaatgtaaatatagataaatgggattataataaattgaaaagtttttgtatggtaaaggagataatgattagtttttagagatgtatagattgggagaaaatatttataagttatatatttaagaagaagttaatattaaaaatatatatggagtttaaataatttaatagtaagaagataaaaaatttaataaaaaattggtaaaatattaggaaagggagttggaagtaaagtaaaaataaaaaatgggtaagagatttgagtaaatatttttgaagagaagatatgtaaatggttaatagatacgtaaaaaaagtgtttaatattgttaattattagagaaatgtaaattaaaattatattgagttattattttatatttgttagaatggttattattaaaaagataaaaggtaataagtattggtatggatgtggaaaaaagggaatttttgtatatttgtatatttggtaggaatgtaaattagtatagtttttatagaaaattgtatggaggtttgttataaaatttaaaaaaattattatatgatttagtaattttatttttgggtatttataaaagtaaatgtttattttagtattatttataatagttaagttatagaattaatttaagtgttttttaatagatgaatggataaagaaaatgtggtgtgtgtatataatggaatagtatttagttttaaaaaggaggaaattttgttatttatgataatatagatggaattggaaaatattatgttaagttaaataaattaggtataggaagataaatagtacgtgtttttatttatatgatgtaaaataatcgaatttgtagaagtaaagtagaatggtggttatagagattggggtaatagggaaataaaggttaaagggtatataattttagttagtagaaatatattttgaattttattgtatagcgtggtgaatatagttaaattggggtattatatattttaaaattgttaaaagtaaattttaaatttttttgttataaaaaatgttaaatattttaggtgatagatatgttaattggtttgatgaaattattttatattgtattgagaaattataatattattttgtattttataaatttatataattataaattgttaatttatagttataaaaagaaatgtaagttaaaataatattttattgttttttttttttaggtgataagtttatttattttggtgggatttataggagagttttaaagttttttaaggtgaggattttttgggttgtgtgtaaaaattattaaatttaaaaaatgttttagaaattttttagtttaattttgatattgtattttgaatttgtgtatttttttaatatattttttttttttatatttttataaaagataatgataataaaagtatgtgtttttaattattatttttttatttaaagaagaataatttttttgtaaaattatttttaaaaattgaagattaaaagtataagttttttgttttagtgtcgtggttttatttgtaatgtagataattatagtggatttatatattttagagtaatatttgatttttaaatgtaatttttgtaaagaattttttggattttaaaggttgagagttttttaagaaaatagttttattaagtttttgaggtttggaaaaaagttagtattatttatttaaggttttgttatgtttttattgtgttagattgatgagatagagttaggttagtttattttatggaattattagaaaatgtgttaggggttgtgttaggtattggggatattataaggagtaagaaggtattgggagtatgttgggtgattcgtattttgagttagtttattgtaatatgaatgtgttaagggttttgatagaagtttgtttagggtgatgtgagagtatagtaggaaggttaagtaaatttttttttttaagtttttatgtttggggaagttttttttatttttttaggatagaggttagaaaaataatagtaagtttagattgtttaagagttaaaagtatttaggtattttgattattagtattatacgaaaattataggttggtaagattggttttgtaaaagtagtcgaggtatatattatagaatgagagttattattttcggagtaatttgatttttttaagatatgtaagaattattttgatttaagatattgtttagtcgaggaatgtgttgggaatttagaaattaggaatattagtttttttatttttcgtagagtattattttaggtaagttttttttagttttttaaagttgatttaggtagttttttttatatgatatgattagaatgtgagtattgtatgagagttaattttttatttttatatgtgttttattttagtggagttgtttaagtttagattgttttttttggttgtgtgtttgaaaaatggtttaaatgaataggggatgtatttaaataaatttttgtttatttagtttttgttaatttttagttttttattttttatggggattttttatagttttttgttttttagttaagtgtttttggataattttttaatttattatttagaatttttttaaaggttataaaattttgttttttttaaaggttataaaatatatttatatatgtttttatttatttttttaatttaaatttttttttatttatatttttataatatattatattgaatgtatttttgttttgaaatttattaaatgagatatattgtattatgattatttgtttatatatttgtgtttttgtttttttttttattaatagttaatgatttattttttttttttttttttttttgagatggagtcgttttttgttatttaggttggagtgtagtggtgtaattttagtttattgtaatttttgttttttaggtttaagtaatttttttgttttagttttttaagtagtcgggattataggtatgtattattacgtttggttaatttttgtatttttagtagagacggggttttattatgatggttttgttggttttaaatttttgattttaagtgatttgtatttttcggatttttaaagtgttgagattataggtataagtaattatgttcggttaatgatttattttttttattatttttataattttagtgtttttagaatttggtatataatagattttgtttttttgtgatggagattttttttgttgtttaggttggagtgtagtggtgtaatttttagtaattgtagtttttattttttgggttttagtgatttttttgttttagtttttcgggtagttgatattataggtacgcgttattttgtttggttaattttttttgtatttttagtagagatagggttttattatgtaggttagtttggtttcgaatttttgattttaggtgatttgttcgttttagttttttaaagtgttaggattataggtttgagttattgtgttagtataatagatgtttattaagtgttagtttttaagaaagtggggttttttttatttttatatattttaggatttttttagtgttttttcggaaaaaatatttgaggtaatatttaattatttttgattgtttttattattttttgtgtttttttgcgtatttttttatttgttttatgatggataatttgatattgtggtagt

SEQ ID NO: 256 - DNA, 7490 bp, Artificial Sequence
  chemically treated genomic DNA (Homo sapiens)
attgttatagtgttaaattgtttattataaagtaggtggaaagatacgtaagggaatataaagaatagtgaaaatagttaaaaatagttaaatgttgttttaaatatttttttcgaagagatattaaaaggattttaaaatatataaaaatggagggagttttatttttttagagattaatatttaataaatatttattatgttggtatagtggtttaaatttgtaattttagtattttgggaggttgaggcgggtagattatttgaggttaggagttcgagattaggttggtttatatggtgaaattttgtttttattaaaaatataaaaaaaattagttaggtagggtggcgcgtgtttgtaatattagttattcgggaggttgaggtaggagaattattggaatttaggagatggaggttgtagttattggagattgtattattgtattttagtttgggtaatagagggagtttttattataaaaaaataaaatttattatgtattaggttttaaagatattagaattgtagaaataataaaagaggtaggttattggtcgggtatggttgtttatgtttgtaattttagtattttgggagttcgaggagtgtagattatttgagattaggagtttgagattaatagggttattatggtgaaatttcgtttttattaaaaatataaaaattagttaggcgtggtggtgtatgtttataatttcggttatttgggaggttgagataggagaattgtttgaatttgggaggtagaggttgtagtgagttgagattgtattattgtattttagtttgggtgatagagggcgattttattttaaaaaaaaaaaaaaaaaagaggtaggttattgattattgatagaaggaaggatagagatatagatgtgtaaataaataattatagtataatatattttatttgatggattttagaatagaaatgtatttaatataatgtgttatgggaatatagataagggagagtttgagttaagagggtaggtgaaaatatatgtaaatatgttttatggtttttgaaaggagtaaggttttatggtttttgaagggattttgaatgatgagttgaaaagttatttagaaatatttaattgaaagataagaaattataaaaagtttttatgagaagtggaaaattaaaaattggtagaggttgaatggataggaatttatttaaatgtattttttgtttatttaggttattttttaagtatataattaaggaggataatttgagtttaaatagttttattaaaataaagtatatgtgaaaatggagagttgatttttatataatgtttatattttggttatgttatatggaaaagattatttgagttagttttaagagattaaggaaggtttgtttaaaatgatgttttacgaagaataaaagaattagtatttttgatttttggatttttagtatatttttcggttgggtaatattttgagttaagatgatttttgtatgttttaagagggttaggttatttcgaaagtaatgatttttattttatagtgtgtgtttcggttgtttttatagggttaattttgttaatttgtggttttcgtatggtattaatgattaaaatatttaaatatttttgatttttgaataatttgaatttattgttatttttttagtttttgttttggggaaatggagagggtttttttaaatatggagatttaggagaggaagtttgtttgatttttttgttgtgtttttatattattttgagtaggtttttgttagagtttttaatatatttatattgtaatgaattggtttaagatacgaattatttagtatgtttttagtgtttttttgttttttgtggtatttttagtatttagtatagtttttgatatattttttgatagttttataaaatgaattgatttggttttgttttattaatttgatatagtgagagtataataaagttttggataaatgatgttggtttttttttaggttttaagaatttggtaagattatttttttaaaaaatttttaatttttaaaatttagaggattttttgtaaggattatatttaaagattaaatattgttttaagatatataagtttattgtgattatttgtattatagataaaattacggtattgagataaaaaatttatatttttagtttttaatttttaaaaataattttataagagaattatttttttttaagtaaaagaataataattaaaaatatatgtttttgttattattgttttttataaaaatatggaaagagaaaatatgttggagggatatatagatttaaagtgtaatgttaaaattagattaaagaatttttaaaatattttttaaatttaatgatttttatatataatttaaaaagtttttattttgaaaaattttggaatttttttataaattttattaaaatgaataagtttattatttggagaagaaaaataataaagtattattttagtttgtatttttttttataattataaattgataatttataattgtataaatttatggggtataaagtgatgttatgattttttaatataatgtgaaataattttattaagttagttaatatatttattatttaaaatatttaatattttttgtggtaaagaaatttgaaatttatttttggtaattttgaaatgtatgatattttaatttaattatatttattacgttgtataatagaatttaaaatatatttttgttaattgagattgtgtattttttgatttttatttttttattattttagtttttgtaattattattttattttgtttttataagttcgattgttttatattatataagtgagaatacgtgttatttgtttttttgtgtttggtttatttaatttaatataatgttttttaattttatttatgttgttataaatgatagaatttttttttttttaaggttaaatattattttattgtgtatatatattatattttttttatttatttatttgttgagggatatttaggttgattttataatttggttattgtgaatagtgttaaaatgaatatttatttttgtaaatatttaaaagtaggattgttagattatatgataatttttttaagttttatgataaatttttatgtagttttttataagagttgtattaatttatatttttattaagtgtataagtgtatagggatttttttttttttatatttatattaatgtttgttattttttgtttttttgataatagttattttgataggtgtgagatgataatttaatgtgattttaatttgtatttttttaatgattagtaatgttgagtattttttttacgtatttattggttatttgtatgttttttttttagaaatgtttatttaggttttttgtttattttttatttttattttatttttaatttttttttttggtattttgttaattttttattgggttttttgtttttttgttattgagttgtttgagttttatatatatttttgatattagtttttttttgaatgtatgatttataaatatttttttttaatttgtatatttttgaaaattgattattgttttttttgttatgtagaaattttttagtttgttgtaattttatttgtttatgtttgtatttgttgtttgtatttttggagttagatttaaaaaatttttatttagaaaaatatagttttttttttagattttttttaattaattttttagtttttggttttatgtttaaggttttattttattttgagtagatttttatatataatgttagataagggttttatttaatttttttgtatgtggatatttagtttttttaatattatttattaaagagattattttttttttattgtgtatttttggtaattttgtaaaaataattaatcgattatatatgtggggtgtatttttgggttttttattttgttttattggttgatgggtttattgttttgttaggattatgatgttttaattattatagttttgtagtatagtttaaaattaggtagagtaatatttttagttttgttttttttgtttatgattgttttagttatttgggtttttttgtgattttatatgaattttaagatttttttttatttttttgaaaaatgatgttagaattttgataaagattgtattaaaattttagattattgtggtagtatggattttttagtaatatttttttttaatttatgaataagggatatttttttatttgtttatgttttttttaattttttattaatgttttataatttgtaatgtataggtttttaatttttttggttaaatttatttttaaatatttttgtagttattgaaaatgtgattgtttttttaatgttttttttatatagtttattgttagtttatggaaatgtattttttagtgtttattttatattttataattttatagtatttatttattagttttaatagttttttggtggagtttgtagggttttttatatataagattgtgttattagtaaatataggtatttttattttttttttttttattttaatgttttttattttttttttttgtttaattgttttggtaagaatttttaatattatgttgaataaaagtggtaaaagtgggtatttttgttttgatttagagtttaaataaaaggtttttaattttttattggtgggtgtaatgttagttgtgggttttttatatgtggtatttattgtgttaagttattttttttttgtatttaatttggtgagagtttttattttgaaatgttgttgaattttgttaaatgtttttttgtatttaataagatgattatatagtttttgttatttattttgttaattttatataatatatttattgatttgtgttgaattatttttgtattttaggaataaattttatttgatcgtggtagatgatatttttaatgggttgtttagtttgtaattattttgttgagatttttgtatttatgtttattatgtttattaagaatgttggtatgtagttttttttttttgtaatgtgtttttttggttttgatattaggataatattggttttgtaaaaagaatttgaaagtatttttttttttttaattttttggaagggtttgagaatgattagtattagttttattttaaatgtttgggttattttttgtatttattgttgttatgtgatttgtttgtttttattttgttttttgttatgagtaaaatttttttgtaggttttattagaaattgagtaaatgttgatgttatgtttgtatagtttatagaattaagatttaattaaattttttttttttataaattatttagttttagatatttttttatagtaatataaagaataggttaatatagaaaattggtattgagaattggggtattgttataaagatatttaatagtgtgaaagtagttttggaattgggtaatgagtagaggtttgaaaagtttggagggttttaaagaagatagaaaaatgaaagaaaatttgaaattttttatagattggttaaatgattgtgattaaaatgttgatagtgataggtatagtgaagtttaggttgatgaagttttagatggaaatgagaaatttattgggaattagagtaaaagttatttggttttgttttagtaaagaatttggttgtattttgtttatgttttagggatttgtagaagtttgaatttaagagtgataatttagggtatttagtagaataaatttttaagtagtaaattttaagatgtggtttggttgtttttaatagtttatatttagatttaagagtaaagaaatgatttaaagttggaatttatatatgaaagggaagtagagtataaaagtttgaaaaatttgtagtttggttacgtagtagagaaagaaaaaggattattaggagaggaatttaaggagggttgtggagtaagtatttgttatagagatttgtatgattaaaaggaagttaagtgttaatagttaagataatggagaagaggtttcgaaggtattttagagatttttgaggtagttttttttattataggttaggaggtttgggaggaaagaatggttttatgggttaggtttagggttttgttgttttgtatagttttaagatattgatttttgtatgtaggttattttttagttttagttttggtttagtgagttttagatatagtttgggttgttgttttagcgagtgtaaattgtaagttttggtagtttttatgtggtattaggtttataggtatatatagtgtaagagtgaaggaggtttggtagtttttagttagattttagatgtatgagaaagtttggttgtttaggtagaagttggttgtaggggtggagtttttatagggaatttttataagggttgtaaagggggaaatgtagggttggaatttttttatatagtttttattggagtattgtttagtgaattagtggaaaggggattattgttttttagattttagaatggtagatttattagtagtttgtatattgagtttggaaaagttttaggtatttaattttaatttatgagagtaattgtggtggttgaattttgtaaagttaaagaagtaaagttgtttaagaggtggagtggagtttattttttatagtagtatgttttggatgtggaatttggagttaagggagattattttgaagttttaggatttaatgattgttatgttgtgttttagatttttatggggtttgtagtttttttttagtagttgattttttttttttgggaaaggagagtttatttaatgtttgtattttaattttattttggaagtaagtaatttgtttcgattttataaatttataggtagaagaaatttatttttagattggattttgtttttgagatttgagattttttagttaatgttggaatgagttaagattttgggtgattattgggtaggtattattgttttttatagtgtgagaagattatgagatttagggggttaggggtggaatggtatagtttagatgttttttttaaattttatgttgaaatgtaatttttatgttggaggtgggggtttgttggaaggggtggattttttataaattgtttagtattatttttttagtgttatttttgtaatagtgagttttattaagatttgattgttttaaagtgtatgatattttttttttttcgtatattttttttttttttaagatagagttttgttttgtcgtttaggttggagtgtaatggtataatttcggtttattgtaatttttattttttgggtttaagtgatttttttgttttagttttttgagtagttatgattataggtatttgttattatgtttggttaaattttgtatttttagtagagatagggttttatt

SEQ ID NO: 257 - DNA, 5275 bp, Artificial Sequence
  chemically treated genomic DNA (Homo sapiens)
attagtttttagggaggttttaggttttagttttgatttttaaagttcgggtttttgttttcgtatttttacgtttattttcggagttgtcgtttcgaaggttttcggttagttttgggttagggtgtgacggtagaagatatcgtgcgagagtttattgtgtgtttagtatgggtggtcgtttggagtttttttgttttgttttgttttgaggcgttagtaggattaggttaagttgttttttggttcggggtaggttttagagcgttggtggtgggtgggacggagtgtgtttgtgttgaggttgttggtatttattttgttttgtttacgggtttagtttgggttaggattttttagatgtagttttatttttgttttttaagtttttttttttttgggtgtagtaggttttggttttatttttttagggtttttagtttatttgttttttttcgatagttgttgtgcggggttgcggattttttattattttggttttgtaatgaggtttttggggatggttgattttgggaggtcgttgttgattttagttggggtttttttagaggattttggttttggtttggttatagtttaatttttaggggttttagggaatatgtgtatttttgagtttaggatttggtgattcgggcgttgggttgtgggggtgcgttagttttgggttcgttggtagaggtacgatgggtaggtgggttagaggacgtgggcgtaggttggagggtttagatattttttattgggtttagtagtttttgggtttttttaaggttttggggggtttttgtttttttttaggattttagtagttttttggagtttagtttgtattggggagtattttgtgggtttttggtttttgttttatttttaggtgttttgttttgggttatttatttttttttaggtttgtttatagggtatttgggttatttttggagggttttgggttaagggtagtttagtttgtgttaggagttgtagttaggttgttagagagttcgggttttttcgtcgagggttgttagggtttagttgttttaggtaggaatttggtggtcggtaggtggtgggtgatatgatacggggattttatttttttttattgttttttttatatttagttttttttaggtttttttatgtgattaaggttttgtatagatttttaaggatttttcggttatgtgttttttgagtaagcgagcggtattagaggcgtggtaaagaggttatagatggggttcggttggtgtgtagggggtttaggggttttttttttttaggaagaagttttttttttattcgtttagttacgttggggtgagggttgtcggggcgtgggtaggggaggggcgagtttagaagggaaattgttaggatttttggtgggggttgatttttattagatcgagaattaaataaatagaaataaagatgtaataggggtcgggtgcggtggtttatgtttgtaattttagtattttgggaggttgagataggtatattacgaggttaggagattgagattattttggttaatatggtgaaatttcgtttttattaaaaatataaaaaattagttgggcgtggtggcggatatttgtagttttagttattcgggaggttgaggtaggagaatgacgtgaatttgggaggtagagtttgtagtgagcggagagcgtattattgtattttagtttaggcgatagtaagattgtgttttaaaaaaaaataatagtaataataaaaattaattttttttaattttttgatatttaaagattataatatattttaagaatatgatttattgtttttatttaaaaagtgagttttattttttttttgtttattttatatattatattgatgtaaatatttttttaaaaatttttgttgtcgttgtttaggttaaagatgcggtagggggacgtggtcgggttatcggtttttagtagtaggttagggttgtcgaagcggttgtagtcggttattattatcgtgcggacggtgttggtattgaggttttggattttgaatagtcgttttattacgttgacgttttttgattttatattttgggggcgggggtacgtgttaggtgggcgtcgggcgttaggttttaggagggtagtttcgtttttagtttcgtacgtatttggaaggtattgttgagttatagtatcgagtaggaggtgatattttcgatgcggtgtaggtttttcgagatgaggttggtttcggtgagttaatagttaaatacgttatagggtttgtttcgtacgcgggatagtagcgcgaaggagtttgtggggaggtcggggttggataggttgtcggcgtggggcgggggtagggttaattcgtcgttcgtgtttatttaggttgatgatagtaatttcgtcggatgaggagttgtgcggttttaggaatattttcgaggttagtagtagcgagtcgtttttgttgaattgggagaattgggtgtagttttagttgtagggtcgtatgttcgcgttgtgtagtagcgagatggttaggtcgttgttttagatttgttcggtaggggcggttgtagtgatcgtttggttaggtcgcggggcgggggtttgttattatatagttatgaggttttagttttgttagttttatttagaggttattagggagtagggattttttttagttattgttatttattcggggggtattggtatagagcggaggagtttgtttttgaagtaggcggttgtgtgtgggattttttttttagtatttagggttattttgtatcgtttttgattttttgtggttttttcgttggatgtagggaggttgttgttatttttggtttgatttatttttttttttattattatttggttggaacgtttgggttttgggattttcgtgttgcggtagagttgggtggggtgtgtaggatatttggtcgtttttatttttatagtgtagtttttggagtaggacgcgaattggtattcggaatgggagaagttgaggtgtaggatttggtttgtgtgttttcgtagcgtttgtatttttacgtagggtatcgtgttatatagtcgttggaatttttcgtattaggatatggtcgttgcgggtgggtagttgttagttttgggttcgggtttttttcgtagttacggttatgagtcgagtgtggttttagtagttttggtaggttttcgtggtgtttttggaatttattagttatggtataggtttcggttgggggatttaattttgtagtttatagagatttttgtattttttattttttaagtgatttaatgaattttttggtttttaagttttgaggggcgtttgcgttgtgttttgataggtttttattagggtgtgggggggtgagtatggatacgcggggtcgcggggcgggtttttagttaggttgatttttaagcgtaggggttcggggttttggttgtagaacgtgggtaggggttttatacgttattgatttgggtgtcggggtacgtcgcgggttatttggtagtagcggtagaattgttttttttataggaattcgtttcgcgatacggtttgttattggcggtatattagttcggcggttagtacgtcggtcgggtttaggtttaggaagatttggtagattaggttgtcggggagtaggggcgtgtcgttttcgtttatcgtgatattttgtttaggcggttttgaaatttattaacggttgtttttagtttaggttcgggaagggaggtcgagagcgggcgttttgtttttttagttttaatcgtttcgtcgggagttttacggggttgcgtgtttgtaggggacgttcgggtatcgtcgtttaattaaggattcggtagtttcgggcgggtcgggtcggttttttttcgtcgcgttatttttcggttttttgcggtcggtagcgggcgttttttagttcgttagggttcggatcgtcgtacgcgaggtacggggatattaggcgtcgttcggggacgggttttcgtcgagaggaagttcggggcggttaggtagtggttttcgttttgcggttttggagtagttttgttcggcgggttcggggcggacggcggggacgagcgtacgggcggtttcggggtttttgtattcgtttaaggcgggcggggacgataaggcgggattttcgagggtcgtaggcgtatttattacggtcgttttcgttcgttgcgtcgttttcgttttgcgcgattcggattcgttttcgttgtcgtagtcgttcggatcgtcgttttcgtttaacggggagttcgttaggttcgacgttacgagtttcgaggtatcgatggtcgaggaaggtagagcgcgcgggtagttcgtattcgtttttcgtgcgtttgcgttttgggtttcggcggtttggtcggtttttttttgtgcgtttgcgcgtattcgggcgtattgggaatagcgttttttgtggttagcgggcggcggtcgtgggcggggttgtaggcgaggtttaacgaacgttggttcgggattcgttttcggcgttttttgttgtcgggttttgagtaagtggttttatgaatttcgtgacgttggttatggagataagattattgggtgatggtttaaggaagataacgtgtaaagggttaaggattgtcggtggaaattaggggtgtaggagaaatggataaatagttagaggttaattcggattttgtatataggatatggtgttagggttttgttaggaagtgtagatcgaagttaggtttacgaggaggttggaggtggggggtggggaggtaacggatggatatggattttttgggttgggttttgtgatagtagagtagattttgttttgggatttggtggtgttatttttggttttttatagttttgttattttgttgtcgttattatgttgttttttgggattgcgatttttttgattttgtttttggtagttggttcgttgggttagaagttttagaggttacgtcggttcgtattttttattagtattatttagtttaaggttaattttgatgtttagtaggtagaagttggggggggtagagggaggtaggtaaaagttgtgggagggggtagagggagataggtagaagttgttgcgggggagagggaagtaggtgaagttgtggggggtgtagagggaagtaggtgaggggtttttttatagtgttttcgagtttttttatggtttgtttttagt

SEQ ID NO: 258 - DNA, 5275 bp, Artificial Sequence
  chemically treated genomic DNA (Homo sapiens)
attgggggtagattatgggagaattcgagggtattgtgggagggttttttatttgtttttttttatattttttataattttatttgtttttttttttttcgtaataatttttatttgtttttttttatttttttttataatttttatttgtttttttttattttttttaatttttatttgttgagtattaaaattggttttgggttggatggtgttgatgggggatgcgggtcggcgtggtttttgaggtttttggtttagcgagttagttgttaggagtagagttaagagggtcgtagttttagggggtagtatggtggcggtagtagggtggtaggattgtgggaggttaagggtagtattattaagttttaggatagagtttattttgttgttatagagtttagtttaggaagtttatgtttattcgttgtttttttattttttatttttagttttttcgtgagtttagtttcgatttgtattttttggtagggttttggtattatgttttatgtataaagttcgagttgatttttggttgtttatttattttttttgtatttttgatttttatcgatagtttttagttttttatacgttattttttttaaattattatttagtggttttatttttatggttaacgttacggggtttatgaagttatttgtttagggttcggtaatagggagcgtcggaggcgggtttcgaattagcgttcgttgagtttcgtttgtaatttcgtttacgatcgtcgttcgttggttataaggggcgttgtttttaatgcgttcgagtgcgcgtaggcgtataaagaaaagtcggttaggtcgtcggagtttaaggcgtaggcgtacgaggggcggatgcgggttattcgcgcgttttgtttttttcggttatcgatgtttcggggttcgtggcgtcgggtttggcgggtttttcgttgggcgggggcggcggttcgagcggttgcggtagcggaagcgggttcgggtcgcgtagggcgggggcggcgtagcgggcggaggcggtcgtggtgagtgcgtttgcggttttcgggggtttcgttttgtcgttttcgttcgttttgggcgagtgtaggagtttcgaggtcgttcgtgcgttcgttttcgtcgttcgtttcgagttcgtcgggtagagttgttttagggtcgtagggcggaggttattgtttggtcgtttcgagttttttttcggcggaagttcgttttcggacggcgtttggtgttttcgtgtttcgcgtgcggcggttcgggttttggcgggttgaggggcgttcgttgtcggtcgtaggaggtcgggggatgacgcggcggagaggggtcggttcggttcgttcggagttgtcgggtttttggttgggcggcggtattcgggcgttttttgtagatacgtagtttcgtggaattttcggcgggacggttggggttggaggaataggacgttcgttttcggttttttttttcgggtttgggttgagggtagtcgttggtgggttttagggtcgtttgggtagaatgttacgatggacgagggcggtacgtttttgtttttcgatagtttggtttattagatttttttgagtttgggttcggtcgacgtgttggtcgtcgggttggtgtgtcgttaatggtaggtcgtgtcgcgggacgagtttttgtggagggagtagttttatcgttattattaggtggttcgcgacgtgtttcgatatttaggttagtggcgtgtggggtttttatttacgttttgtagttagggtttcgggtttttgcgtttgggggttagtttggttgggggttcgtttcgcggtttcgcgtgtttatgtttatttttttatattttgatagaggtttgttaggatatagcgtaggcgttttttagagtttggaggttagagggtttattgggttatttggggggtggggggtataggggtttttgtgagttatagggttgaattttttagtcgaggtttatgttatgattagtgggttttaggggtattacgggggtttgttaggattgttggggttatattcggtttatggtcgtgattgcgaggaaggttcgggtttaggattgataattgtttattcgtagcggttatgttttggtacgaggagttttagcggttgtatgatacggtgttttgcgtggaggtgtagacgttgcgggaatatatagattaggttttgtattttagttttttttatttcgggtattagttcgcgttttgttttaaggattgtattgtgaaggtgaggacggttaggtgttttgtatattttatttagttttgtcgtagtacggaggttttaggatttaggcgttttaattaggtggtggtgggggggggggtgggttaggttagaggtgatagtagtttttttgtatttagcggagggattatagaggattaggagcggtgtagggtggttttgagtgttgaggagagggttttatatatagtcgtttgttttaggggtaggttttttcgttttatattaatgtttttcgagtggatgatagtggttggaaggggtttttgttttttggtggtttttgagtagggttggtagagttggggttttatggttgtgtagtagtaggttttcgtttcgcgatttggttaggcgattattatagtcgtttttgtcgaatagatttggagtaacgatttgattatttcgttgttgtatagcgcggatatgcggttttataattggagttatatttagtttttttagtttaataaggacgattcgttattgttggtttcgggggtgtttttggggtcgtataattttttattcggcgagattgttgttattagtttaggtgagtacgggcggcgggttgattttgttttcgttttacgtcgatagtttgtttagtttcggtttttttatagattttttcgcgttgttgtttcgcgtgcggaataagttttatgacgtgtttggttgttggtttatcgagattagttttatttcggggaatttgtatcgtatcggagatattattttttgttcggtgttgtggtttaataatgttttttaggtgcgtgcggggttaggggcggggttgtttttttggggtttggcgttcggcgtttatttggtacgtgttttcgtttttaggatgtggagttagagaacgttaacgtggtgaagcggttgtttaagatttagaattttaatgttagtatcgttcgtacggtgatggtggtcgattgtagtcgtttcgatagttttgatttgttgttggaagtcggtgattcggttacgtttttttgtcgtatttttgatttgggtagcgataatagaaatttttaaaaggatatttatattagtgtagtatgtgaagtaaataagaaaaagataaaatttattttttaagtaaaaataatgagttatgtttttgaagtatgttgtaatttttaaatattagaaaattaagggaagttaatttttattattattattatttttttttgagatatagttttgttgtcgtttaggttggagtgtagtggtacgtttttcgtttattgtaagttttgttttttaggtttacgttatttttttgttttagtttttcgagtagttgggattataggtgttcgttattacgtttagttaattttttgtatttttagtagagacggggttttattatgttagttaggatggttttaattttttgatttcgtgatgtgtttgttttagttttttaaagtgttgagattataggtatgagttatcgtattcggtttttattatatttttgtttttatttgtttaattttcggtttggtgagggttagtttttattaagggttttggtagttttttttttaggttcgttttttttttgtttacgtttcggtagtttttattttagcgtggttgggcgggtgggggaggggtttttttttgggagggaggggtttttgagttttttgtatattagtcgggttttatttgtgatttttttgttacgtttttaatatcgttcgtttgtttagagggtatatggtcggggggtttttgggagtttgtgtaaagttttagttatatggagggatttgagggaggttggatgtggaggagatagtgagagaaggtgaggttttcgtgttatgttatttattatttgtcggttattaggtttttgtttgggatagttgagttttgatagttttcggcgaggaggttcgggttttttagtaatttggttgtagtttttgatataggttgggttgtttttggtttagggttttttagagataatttaagtgttttgtgagtaggtttgagggagggtgggtagtttaggatagggtatttgggggtgaggtagagattaaagatttataagatgttttttaatgtaggttgagttttagggagttgttgggattttggaagaggatagaggttttttaaggttttagaggaatttagagattgttgggtttagtgggaggtgtttggattttttagtttgcgtttacgttttttggtttatttgtttatcgtgtttttgttaacgggtttagagttgacgtatttttatagtttagcgttcgggttattaagttttgaatttagaaatgtatatattttttgggatttttgagaattgggttgtggttaggttaaggttaaggttttttggggaagttttagttaaggttagtagcggttttttagggttagttatttttaggggttttattataggattagggtggtaagaagttcgtagtttcgtatagtagttgtcgaggggaggtagatgggttgagggttttgggggagtggggttaagatttgttgtatttaggagagaggaggtttggaggataggggtggggttgtatttgggaggttttggtttagattggattcgtgggtagagtagggtgggtgttagtagttttagtatagatatatttcgttttatttattattagcgttttggagtttgtttcgggttagggaatagtttggtttgattttgttgacgttttagggtaggatagggtagggaggttttaggcggttatttatgttgggtatatagtggattttcgtacggtgttttttgtcgttatattttgatttagggttggtcgggagttttcggggcgatagtttcgaggatggacgtaggggtacgagggtagggattcgggttttgggaattagagttgaggtttggggtttttttgggagttggt

SEQ ID NO: 259 - DNA, 6081 bp, Artificial Sequence
  chemically treated genomic DNA (Homo sapiens)
tgttgtaattatagtaacgttgatggataagggttagttatttgttattttatttgatgagtggttaagttttttatttgtttttgtttggaattgtgttttgtatttaattattaaatttttattatatattgaaattatataagtgtttgtttttagtaagattatggtgtgggttgtttagtggtaaagaagttggttttttgtagagatgaaagatgaggttgttaaaaatggaagggaaaaaaaaatttaattttgaaattttttatgattaatttttttttgtgatattggttgtggagttttttgttaattttttatttatttggttgattttaattattattttattttatttataagaaagtagaattattgttgttttaaaagttatagggtaatatgattgggttggaattgagtagaggatgtttttcgggtgtgtttgatgttgtttttttagtggaagttttaaaattttattgtggtattgtaagatttgtggatttttggatagttagtaagaaatagttatggaatggggtaggtatttttaatgagatttttggatattaagattttttaatttattgttaagggatttttaagaaattgttttttttattataaaagagttaaatggaaatgatttttaatatatttatattaaattagtaaaaattaagtgtttttgtttgttggttaaagttttaatgtatatatgtttatgtttgttttaaaaattgggaaaagtattattaagtaaaaaatttagtttattattataaagtttttaagaaaattgaaattaagaagggaataaagggtaattgaatggcgaaaatttttagtagagtggaaaattttggaattagagtttaaagatatggtttgtttaaattttatttttgttttttttgtgtagttttgtaggtatttttttgagttttatttgtgagattagaataaaagtttattttttatggagttgataggatttagtaacgaattttatagtaaagtattttataagtaatatgacgtatttaaaataataataatagtagtaatagtaaggtaggaaaagtttgagatgtggagttagatatagtaagtataaatgtgtagttattcgtttttggttgacgttggataaatgatgtaattttaatgtgtttttatttttttagttgtaaaatagattatttttaggattaaatgagattgtatatataaatatggtttgatatatattagaagtttaataaatatttattttgttatttggaagtttttaagtgttatataaatgaaaatgttattatttttattgttttagtttaatgtatgatgatgttttatttttttgatatatatatagaaatataagttttattttaaaatattttagatatatgatagatgttaaggataagaaagagttaaaagtataaaaatgtggagtatattatttatatattttatatatttatataatatttatgattttatattataattatgtattatatgtaatatataattatatatattataattatataattataatatgtaatatataatataatttggttttgtgtttttatttaaattttatttcgaattgtaatttttatatgttgagggagggacgtgttaggaggtgatgggattatggggacggttttttttgtattgtttttgtgatagtgagtgaattatgagagttaatggtttgtttgtttgtttttgaaataaaatttcgtttttgttttttaggttggagtgggatagagcgattttagtttattgtaatttttgttttttgggtttaagtaatttttttgttttagttttttaagtagttgagattataggcgtttgttattacgtttagttaatttttgtatttttagtagagatggggggttttattatgttggttaggttggtttcgaatttttgattttagatgattcgttagtttcggttttttaaagtgttgggattataggcgtgagttattacgtttagttagttaatggttttaaagtgtggtatttttttatttttgtttttttttaatgttatttacgaagtgttttgttttttttttattttttattatgattataagttttttgaggtatttttagttatgtagaattatgagttaatttaattatttttgtttgtaaattatttagttttaggtggtattttttttttttttttgagacggagttttattttatcgtttgggttagagtatagtggtgtaattacggtttattgtaattttcgattttagatttaagtaatttttttgttttagttttttaagtagttgggattagagttattcgttattatgtttggttaatttttttgtatttttatagagatggggttttattatgttggttaggttggttttgaatatttgattttaggtgatttgtttttttgggttttttaaagggttgggattataggggtgagttatcgtgttagttaggtagtatttttgtagtagtgtgaaaatggattaatataatatatattgttaatatataattaatatgttattagtatattttattgttgttattatttttttatattatatttaatttgaattatggtgataaaataaatataattgagtaatttagaaaagttttttatttaaattagttagttaaaaatatttttttatttttttattttttttttattgatttagtttttaaagagataggtgatgtataatttttagttatattaatttattaagtttaattattataatttttaattaattagtattaaatttagttagtataaagtattttattttgattgttttttagtttttatttttataagtattttgatagggtttagagaggttttataagagtttttaatattgttatagtatttttttttttgtgagatagagttttattttgttgtttaggttggagtgtagtggtgttattttggtttattgtaaattttgttttttaggattaagtaatttttatgttttagttttttaagtagttgggattataggtatatattattttatttatttaatttttgtatttttagtagagatgaagttttattatgttggttaggttggttttaaatttttggttttaagtgatttatttatttttgttttttaaagtgttgggattataggcgtgcgttattgtatttgttttgttatagtatatttgatagatttatattgtttttaaatgtagtttatttgttattagttaagatttataggaagtgttttttaggtatggatttattttatgatatagttatacgagttgtggtatttattcgaattattttattatttggtagttttgtatggtttatattttatagtaagtttaggaaaaggtgagattagttttattgaagattttaagttttttgtataaaaaggagaggggttaagaaagtgggtgagagtagatattttttattataggtaggaatattagtagaaaaggtaaggtagtattggagaaaatagttgtatattttgtttttttttagttttattttttgttttgttggtttttatatgtgttaatgtttgaaatttgtttataagtaataataatatttataaagtttttttaagaattatatttagagatatttgatgtttttttttttaaggtggttatttttagttttaattttggttatacgttagaatgattcgtaaagtttttaaaagtatggatgtagggttttattataagttaattaatttagagttgagtagatagcgggtagttattattattgtttttaagagtttttaggttattttatttttgtagttagtgttttaagagtagttgtgatgtttatattttttggtgtttttaaaaaggtattgttttttttataagtgttgggaagtatgaaatgtgagggggagattattttttatgggtaggaataagtttttttgttttagattttattttgttgatatgtgtgatgttgagataaggagattattttttttggtggacgtttttaatgttttcgggagtttatattttattttttaaaatgtattattcggtttataaggaaagttaggattgtaaatgtatttgtttacgtggaaataatttatttagtttatttgtagattaaaaaaaaaatgaagtatttacgtttgtgttattttttttattaagtgtagttttttattaattttgattttatgtttttatgagaagtatttataggtttttttttttttaaaattgtatatttttttattttttatttaatttttcgagttttgtaaattaagaattgttgggggttttttatttttgtttttatttttttgtttttgtttttgtttttgttttgttttgtcggaattttgtttttgttgtttaggttggagtttagtggttttatttcggtttatcgtaattttcgttttttagatttaagtaatttttttgttttagtttttaaagtagttgggattataggtatttattattatgtttggttaattttttgtatttttagtagagatggggttttattatgttggttaggttggtttcgaatttttgacgttaggtaatttatttattttagttttttaatatgttgtgattataggcgtgagttattgcgttcggtttttgtttttatttttatatagtattgttgtttattttagggattttagtatttataggtttattgttttatatttatttgttaatatgagaaagtaggaggttaagaattataaaatgatttttttttggttggattttagtatttaggttatttaaattgataaaaattttgaatgtagataaataatgtttgttttttgttttttggttttttgtaaataaatgttttattagatttgttttgttattttattcgtagttatttagtaagagtagtatgttagtttgtcggagttttgtagttgtaatttgtattttagaaataagtatttttatagtatagtatacgattaggtgagttagttatttttttgtttgtttttggaagttttttgtaggattagtattttaaggtttttttagtagtaaagtatatgataatgttaatttatatggtaatatatagagttttagaatttaaatttcgaaaagagataagaaaatatatagggtgtatttttatgagttttttgtggaaatgtgttgttgtttttggggatttatttttaataaggtatttaaatgttaagattgaggtattttttaaatatttggaattataaaataaagtttgtttttattagtgtatgatgaatttgggtttattagtgtttgatgtttgagaagtttaaaattaaggaaattaattttttttttattttgttttaatgtttgatatttttaatatttggatatattatttttttgtttttatattaggtaaaggttaattattttgttttttttttttgatattttgagttgtgtttagaggtatgtattttgtttagggttatttgggatttaggttatattttttttattttagaattgtagtgatgtagatttgttatttatgtttttattaaagatatttttttttttttttttttgattttaatcggaattgtaaagtttatggtaagttatttaggaaataaattatttatataataagtttttattgaatagttatattgtatttagaaatggtggaggttagggttatatgaggtatttttttttttattttggagttattagagtagatatcgatttgtataatttaatataggatgattcgttttggggagagtattgaaatattttttattttaatagtgtggttggggggaaatgtttgtttaagttttgtttttttgtttagatataattataatttgtttttaattttttattagttatttgatttttggtttatttaaatgttgttttgaattttgatgttcgtttttagtatatatttgtttgttttttggttgtagttggaggt

SEQ ID NO: 260 - DNA, 6081 bp, Artificial Sequence
  chemically treated genomic DNA (Homo sapiens)
gtttttaattgtagttaagaggtaggtaaatatgtattggagacgggtattaaagtttaaaatagtatttgggtaaattaagagttaaatgattaatgaggaattggaagtaggttatggttatgtttgagtagaggaatagggtttgggtagatatttttttttagttatattgttgaagtgaggaatattttagtattttttttagaacggattattttgtattgaattatataggtcgatgtttattttgatgattttaggatggaaggaaggatgttttatgtgattttaatttttattatttttaggtatagtgtagttgtttaataaaaatttattatatgggtgatttgttttttggatgatttgttatgggttttgtaatttcgattaggattagagaaaaaggagaaaaagtatttttggtagaagtatgagtgataggtttgtattattgtaattttggaatggaagaaatatgatttaaattttaaatggttttaaataaaatgtatgtttttgaatataatttaggatgttaagggaaagaaataaaatagttaatttttgtttaatgtggaggtaaaagggtgatgtatttaaatgttaaaggtgttaggtattgaagtagagtgagggaaagattaatttttttaattttaaattttttagatattaggtattaataaatttaggtttattatatattggtgaaaataagttttattttataattttagatatttaaagaatattttaattttaatatttgagtgttttgttgaaaataaatttttagaaatagtagtatatttttatagaaaatttataaagatgtattttatgtatttttttattttttttcgaagtttagattttagggttttgtatattgttatgtggattaatattgttatgtattttgttgttaagaagattttgagatgttaattttataggaaatttttagagataagtagaaaagtaattgatttatttggtcgtgtattgtgttgtgaggatgtttatttttaaaatgtagattgtaattgtaaagtttcggtaggttgatatgttgtttttgttgggtggttgcgagtggggtggtagggtaggtttggtaaggtatttatttgtaaagggttagaggatagggaataagtattgtttgtttgtatttagagtttttgttaatttgggtggtttgggtattgaagtttaattaaaggagaattattttgtaatttttggttttttgtttttttatattgataagtagatatggggtaatgggtttgtgaatgttaaagtttttaagatgggtagtagtgttgtgtgaaaatggaaataaaggtcgggcgtagtggtttacgtttgtaattatagtatgttgggaggttgaggtgggtggattatttgacgttaggagttcgagattagtttggttaatatggtgaaattttatttttattaaaaatataaaaaattagttaggtatggtggtgggtgtttgtaattttagttattttggaggttgaggtaggagaattgtttgaatttgggaggcggaggttgcggtgagtcgaggtggggttattgaattttagtttgggtaataagagtaaaatttcggtaaaataaaataaaaataaaaataaaaataaaaaaatagaaataaaaatgaaggatttttagtagtttttagtttgtaagattcgaggggttgggtggaagatgagggagtatgtaattttggggaaaaaaaagtttgtggatgttttttatggaggtatgaagttaaagttagtaaagaattgtatttagtggaaaggatggtatagacgtagatgttttattttttttttaatttgtaaatgggttaggtaggttatttttacgtgagtaaatgtatttataattttggttttttttataggtcgagtggtatattttgaagaatgagatgtaaattttcgaaggtattaagggcgtttattagaaagagtggtttttttattttagtattatatatgttaataagatagaatttgagatagaaaaatttgtttttatttatgaaaaatagttttttttttatattttatgttttttagtatttgtgggaagagtagtgtttttttgggaatattagagaatgtggatattataattgtttttaaagtattgattgtaaaaatagaatgatttggggatttttgagaatagtagtgatggttgttcgttgtttgtttagttttaagttaattgatttgtgatgagattttgtatttatgtttttaaaagttttgcggattattttaacgtgtagttagggttgagattgaggatgattattttgagaagaaagatattagatatttttggatatagtttttaaagggattttataagtattattattatttataggtaaattttaaatattagtatatataaagattagtaaagtaaggggtggagttgagggaagatagaatatatagttattttttttagtattgttttattttttttattgatatttttatttgtggtaaaaggtatttatttttatttatttttttggttttttttttttttatgtagagaatttgaggtttttaatgggattgattttatttttttttgagtttgttgtggagtgtaggttatgtagaattgttaagtaataagatgattcgaatggatgttataattcgtgtaattatgttatgggatgagtttatgtttgaaagatattttttgtgagttttggttaataataggtgggttatatttggaaatagtatgaatttgttaaatatgttgtagtagggtaggtgtagtggcgtacgtttataattttagtattttgggaggtagaggtgggtggattatttgaggttaggagtttgagattagtttggttaatatggtgaaattttatttttattaaaaatataaaaattaggtgggtggggtggtgtgtgtttgtaattttagttatttgggaggttgaaatatgaaaattgtttgattttgggaggtaaagtttgtagtaagttaagatggtattattgtattttagtttggataatagagtgagattttgttttataaaaagaaaaatgttgtagtaatgttgagggtttttatgaggtttttttggattttattaagatatttatggaaataaagattgaaaagtagttaggatgggatgttttatattaattagatttgatgttaattgattagaagttgtgatgattagatttgataagttgatgtgattggagattgtatattatttgtttttttggagattaaattaatggaagggggatgagggagtgaggggatatttttggttgattagtttgaataggaggtttttttgaattgtttagttgtatttattttattattatagtttaggttaaatataatgtagaaaaataatgatagtagtaaagtatattaatagtatattaattatatattggtaatatatattgtattagtttatttttatattgttataaagatattatttggttggtacggtggtttatttttgtaattttagttttttgggaggtttaggagggtagattatttgaggttaggtgtttaagattagtttggttaatatggtgaaattttatttttataaaaatataaaaaaattagttaggtatggtggcgggtgattttaattttagttgtttgggaggttgaggtaagagaattgtttgaatttagagtcggaggttgtagtgagtcgtgattgtattattgtattttagtttaggcgatagagtggaatttcgttttaaaaaaaaaaaaaagatattatttgagattgggtaatttataaataaaagtggttgaattgatttatagttttgtatggttagggatgttttaggaaatttataattatggtggaaggtgaaaggaaagtaaggtatttcgtaaatggtattaggagagagtaagagtgaggaagtgttatattttaaaattattagttggttgggcgtggtggtttacgtttgtaattttagtattttgggaggtcgaggttggcgaattatttgaggttaggagttcgagattagtttggttaatatggtgaaattttttatttttattaaaaatataaaaattagttgggcgtggtggtaggcgtttgtaattttagttatttgggaggttgagataggagaattgtttgaatttaggaggtagaggttgtagtgagttgagatcgttttgttttattttagtttgggggataagagcgagattttgttttaaaaataaataaataaattattagtttttataatttatttattattataagaatagtataggggaaatcgtttttatgattttattattttttagtacgttttttttttaatatgtggggattataattcgagatgagatttgagtgaggatatagagttaaattatattatatattatatattataattatataattataatatatgtaattatatattatatataatgtataattataatataaaattataaatattatataaatatataaaatatatgaataatatgttttatatttttatgtttttaatttttttttgtttttaatatttattatgtgtttgaggtgttttgaaatgaggtttatgtttttgtgtgtatgttagagaaataaagtattattatgtattagattagagtagtgaaaatagtaatatttttatttgtataatatttaaaggtttttaaataataaaataaatgtttattgaatttttaatatgtgttaggttatatttatatatgtaattttatttaattttgaaaataatttgttttatagttgaggaaatggagatatattgagattatattatttgtttagcgttagttagggacgagtaattgtatatttgtatttgttatgtttggttttatattttaggttttttttattttgttattattattattgttattattttaagtacgttatgttgtttatagggtattttattataaaattcgttattgagttttgttaattttatagaaggtaagtttttattttagttttatagatgaggtttagagaaatatttgtaaggttatatagaagaggtaggggtgagatttgaataaattatgtttttaaattttgattttagggttttttattttgttgagggttttcgttatttagttgttttttgttttttttttagttttaatttttttgggaattttgtgatagtgaattaagttttttgtttaataatattttttttagtttttaaggtaaatatagatatatgtatattaaaattttgattagtaggtagaaatatttaatttttattgatttgatataaatatgttgagggttatttttatttgatttttttatagtgaaggaaatagttttttgaaagttttttagtagtaagttaagggattttagtatttagggattttattaggaatgtttgttttattttatagttgttttttattgattgtttaaagatttataggttttgtaatgttatagtgaaattttagagtttttattaaggaggtagtattagatatattcgagaagtattttttatttaattttagtttagttatgttattttgtaatttttagagtagtaatgattttgtttttttgtaagtaagataaaataatggttgaaattaattaagtgaataaagaattgatagaaaattttataattaatattataaggaaaaattagttataaagaattttagagttgggttttttttttttttttatttttaataattttattttttatttttgtagaaggttagtttttttgttattgagtagtttatattatggttttgttggagataagtatttgtatgattttagtatgtggtagaggtttagtaattaaatgtaggatataattttaagtaagggtaaatgaggggtttggttatttattaggtgagatgataaatggttggtttttgtttattagcgttgttgtaattataata

SEQ ID NO: 261 - DNA, 5875 bp, Artificial Sequence
  chemically treated genomic DNA (Homo sapiens)
gtaaattattaatttaaatagtgtttttgttatttttttttgatagatttattaagataaagattagagtaaattaaaatgataattttttgtaggtaataattggtattgttagtattagaaggtatttagttattgtatttgtttttatttaattatggttttgatttgagtatttgatttaaaaattattgtagagtaagttattattttgtatttagtatattgatttaataattaaaagggtattataaaaaatgaatgaaaaaaaatttatttattggagttaggtattagtaaaagtattaaaaatttaagaaattttatgggggaaatttaatttagaaaaatagtgagtagtttttgaagtggttgttgaagtgaatattaatttagtattttttttaaaggagaaagtatgttaagaaaatagtatttaggatttttaaaaatgtttgtaaaagtttataaatatgtttttaatatattatttggaaatgtttgttaaaaatatagatttttaggttttgtatgtagagattttgatttagtagtgttataattatatattattttagtataaataatttttgtttatataatttaatgtttaataggaatgtttgatagtgttttaattaggattcgttttttttagaggtggttatttagttatttgtagtgaaattaatatttaaagttttgttatttattataaaagatgttagaaagaattttgtataattagtggtattaagagtagtaattgagaaggaaaaattttttggatttagaaaatgttttgtatgaataagatataggagtggagaagtttagtatttaaatgttattgatggagtatgtgaggtttaagttttattgaatttagttgtttgatttaaaagaggttttgatgttattgatgtttgtttggagtgaattttttatgtaaggtgttggttggtgagttttatttgcggttagtttatttgaaattataggtaaggtatatgattattttttggttgtttgtttataatatatgtatatttgggaaatttgattgttgaagatttgtttttattgaaatatattttttggtaattagattgtgagggtggagttatttaatttttagatatttttaataaagttattaatatttattaaaagagtttatttgttgattatttaaattggttaagattatttataaaaataaaggattggttgagatatatatattgtattttaatattattttaggtgatattgaagtaggtgatttataaattatatattgggaattattggattaagaaaagatatgttattataaatgtattttagaaatttaatttttgataaaaggatttaagagttaaaaaagttgattttaggagtaagaagatatgtttttttaattttaaaatgattttaggtagttagaatttttaaatagatgaatgaaggatgttattataaggtaattaatagaattgatttttattttttttaatatttatatttgagaatttatttttttttatatttatatataggatttagtttaatttatagtaaatatgtatttatgaagtaagtgtttgaattttaggttatatgtaatatttttattgttttgttttatattattatttatttgtttgagagttaaaattaaatttttttttttttgaggtttatgttgattatttatatttgtgtagaattttattatttatttatttattttgagacggagttttatttttgttgtttaggttggcgtgtagtagtgtagttttagtttattgtaatttttggttttcgggtttaagcgatttttttgttttagtttttcgagtagttaggattataggtgtttattattacgtttggttaattttttttattttagtagagacggggttttatgatgttggttaggttggttttaaatttttgaatttaggtgatttatcggttttagttttttaaggtgttgggattataggtatgagttattatgtttagtagaattttatgttttataaattattaatgtatgttattttttttttaggtgaaaaatgttatttaatagtgttattatttgttttataagatttattaattttttaaatagttatagaagataagatataaatagtatgtttttaattttaaaaataaatacggggatagtattattaatttgtttaagttatttatttatgtagtagaagagatttttaattattagtataaaagtttattagatattttttgaatattagtgtgtttttttagttagtaattttaattagtatgatagttaatgagatatatttaaaatttaatatttttaaaagtttgaaattgtaagatattgcgaatgtttttatgttgtgtattaaaatgattatatataaagagttgatttggttgttaataaaaaatatttattagtagatttaataattgtgttaaaaataaaatgttttaagataggaaataaaaggttgaaatttttttttagttatagtaataaaagttataaaagtgatggatttttgaaatttatatgttaaaagtttaaattatatttgaagagttagattttgatatttataaagtgttaaaaatttgatatttataaagattagtgtttttatttttttagtaatgattgatagatatagacgggttattttattttttttattaatagaattgagaggggaaaggttttttttttaatttaaaaataaatatgagtatagtaaagtttatttatatgtttaaatattaatgtattatataatttgagtttagattagtgtatttgggtaagtatagtttttgataatattttgtttttttatatttttaaaaatatataatagtttaaatttaaaatgattatttaattattttttttataagtgtttattgagtattattgttttttaggtatattatagatgaagagaatatggtggtgaaaaaaatgattaaggttttattatattatagagatgttattttagagatggttatagatattaagtaagtaaattaattttataatataagtaagatgtgataaatgttatgaaagaaataagatagaatgatataatggagtgattgggaaaaggaggatatgtgaatttggagtttaggaaagttatttttaagtaggagatatttgaggttatataaaggtttgggtatagagtaatttggatagtaggatagtaagtataaaggttttaaaatgggaataagttcggtatggatggagataaatataaatattggaaggaataaagttattaatatagttttgttataggtgatgagaaagtttaattgagagaaaatgatagttgtgaaatttagataatttattttgttattttagttgattaattagaatttttagttgttttaatgtagaaatgtttaggttaatattattattttttatgatttatttttttattggaaataagatttattttgttattttaaatgatattatttttagaggggtagggaatttaggaggtaatgtgagagttaggttaaatttaatagttaataatgatattatttttataatatatatttttttattttagggaaaatatgaattttaggaaagttatttattgttgtggaattttaagtattgtagagtagttttggttttttggaatttggttttgttaaggtgtggatttttttttttagtggtatttagtagatttcgtttataattaggtacggatggtatttttttttattttttgttttttttatagtagagagttattttttaagtataaatttaaatttgaaatttattataatttatttgtttttagaagagtttatgtttttgattttaaaatattaaaataaaaattagatgaaaagtattaaaggaattagaagaataaaagttaaaataagaaatattaaggtttttaaatataatttaaaattgatttaaatagatatttaaaaatattgaagaaatgtttttttgaaaaatattttagggtattaaaaaatatttagtattttaaatttagtattatttaatttagaaattaattggtgttaataaataaatttatatattaattagttaaagaggtgtttgtaatattattagagttttttgttgtaggtgggttaatattattaattaagaggttattttaatagaaagtttggattagaaaattattattttaaaaaaatatgttttatatatttaatatattttgaaatttaggtaaaatatgattaaaggtttttgttatgattgatgtatttttttggttaacgttaaataaatgggagtttggttacgagttagtttttagggatttgttatatttttatttggttttttttttgttattggtataataaaatgttttttatgttgtttagtgtaatttaggttttattttgtagaagttttttttattatttaggttatttaaatattttaaataattgagtttaaaatcgatattaagatataaaggaattagtgattaaatatattttatatatggtatttttattgattattgtgttgttttgatttagtatggaggttttggttagaggttggttagtttttttttttgagtagttgattaaatttatattttaattattttttttattaggtttttatattttggggttattatgtatttattttaattattatagggttagatattagataattaaggatagcgtttatgttttaaagttcgttaaaattatgtaaattatttaaaattatttaatttagttaattttattttttttgttgtatataagttgtttattttttttttagtttgtggtatttagtttttaggtgtaattttttgcgtggttttttgtggtagtttttttttatttagagttgtaagtaataaagatttttgttttttatttagttgagtattgaagtgttttattcgattgttaaaagaatttttaaattttgtaaaatatagttttatttatattttaattattatttaatgaatgaaagttgtaaagtttaaaaaatttttatagtttttttaaattttttatatttattaagtagatttttgtaaatttgtaaatttgaaaaggataatataaattattttttttttttttgagatagagttttatttggtagtttaggttggagtgtagtggtattatttttgttaattgtaatttttgttttttaggtttaagtgatttttttgttttagtttttcgagtagttgggattataggtatatgttattatatttggttaattattgtatttttagtagaggggattttattatgtttgtaaggttggtttcgaattattgattttaggtgatttgttttttttagttttttaaagtgttgggattagaggcgtgagttattgtgtttagttaatataaattattatttaaaattattttatgattaatgtttaatttgacgttaatttttttaaataaataatgtaattgatagatttggttaattaagtttttttaaatattatatattatattaattataaatttagtttatttgaattttttaagtattttaaatgtttgatatattagtattttttatatattttgtaagtttataaaaggagggagggggttttaataattaaagtaattttagtaaaagtaataaattaaatttatgtagtagtaagttatgtttttttaaatatttaaatattgtgtatagattgaagaaaatgtttttgtattttaaaattgaaattatatggtttatatatttgattttttaatat

SEQ ID NO: 262 - DNA, 5875 bp, Artificial Sequence
  chemically treated genomic DNA (Homo sapiens)
atattagaaaattagatatatgaattatataattttaattttaaagtataagagtattttttttagtttatatatagtgtttgaatgtttaagagaatataatttattattgtataaatttggtttattatttttattggaattgttttaattattagagttttttttttttttttataaatttgtaagatgtataaaagatattaatgtgttaggtatttgaaatgtttgagagatttaggtagattaaatttgtaattgatataatatataatatttaaaggaatttaattaattaagtttattaattgtattatttgtttaggggaattaacgttaaattgaatattagttatggaataattttaaatggtaatttatattggttgggtatagtggtttacgtttttagttttagtattttgggaggttgaggagggtagattatttgaggttagtagttcgagattagttttgtaaatatggtgaaattttttttattaaaaatatagtaattagttaggtgtggtggtatgtgtttgtaattttagttattcgggaggttgaggtaggagaattatttgaatttgggaggtagaggttgtagttagtagagatggtgttattgtattttagtttaggttgttaagtgagattttgttttaaaaaaaaaaaaggtaatttatattattttttttagatttatagatttatagagatttgtttgataaatataaaaggtttagaaaaattataaaggttttttaagttttgtagtttttatttattgaatagtaattaagatgtaggtaggattgtattttataagatttaaagatttttttggtagtcggataaaatattttaatgtttagttagatgaaaggtagaagtttttgttatttatagttttgaatgagagaaggttgttatagaggattacgtagggggttgtatttgaggattgggtattataggttggagggggaatgggtagtttatgtatagtaaaaagggtggggttagttaggttgaataattttgaataatttgtataattttggcgggttttggggtatgggcgttgtttttaattgtttgatgtttggttttgtggtgattagagtgggtatatagtggttttagagtgtgagaatttgataagggaagtggttggggtgtggatttaattagttgtttaagagaggaaattgattagtttttagttaaggtttttatattaggttaagatagtataataattaataaaaatattatatatgaaatatatttagttattgatttttttatattttgatgtcgattttgaatttaattatttggggtgtttgagtggtttgaatagtagaggagatttttatagaatagggtttaagttgtattaaatagtatagaaaatattttattatgttaataataaggaagaaattaagtagaaatgtgataagtttttgaaggttgattcgtaattaggtttttatttgtttggcgttggttaggagaatatattagttatggtaagggtttttagttatattttgtttggattttagagtgtgttaaatatgtaaggtatgtttttttagggtgatggttttttgatttaggttttttgttagaatgattttttgattggtggtgttaatttatttataataagaagttttaataatgttataaatatttttttgattagttaatatataaatttatttattaatattaattaatttttaaattaaatggtattaaatttagggtattaaatattttttagtattttaaaatgttttttaaaaaagtatttttttagtgtttttaagtatttatttaaattagttttaaattatatttaagagttttagtattttttattttaatttttgtttttttagtttttttgatattttttatttaatttttattttaatattttaaaattaaaaatatgaatttttttggaagtaaataaattatggtgagttttaaatttaaatttgtatttagaaaataattttttgttataaaaggaataaaaagtgaaaaagagtgttattcgtgtttagttatggacgagatttgttaaatgttattgaaaggaaaaatttatattttggtaggattaaattttaaaaagttagagttgttttataatgtttagagttttataataataagtggtttttttgggatttatattttttttaaaatgaggaaatatatattgtgaaaataatgttattgttgattattaaatttggtttgatttttatattgttttttaaattttttgtttttttagagatggtattatttggggtggtaagataaattttatttttagtggagaagtgggttatggaaaatggtgatattagtttggatatttttgtattgagataattagaaattttgattaattaattgaagtggtaggatgggttatttggattttatagttattatttttttttagttgggtttttttattatttgtaataaagttgtgttggtaattttattttttttaatgtttgtatttgtttttatttatatcgagtttgtttttattttaggatttttgtgtttgttgttttgttgtttagattgttttgtatttagatttttgtatagttttaaatattttttgtttagaaatgatttttttgaattttaaatttatatgtttttttttttttagttattttattatattattttgttttattttttttatagtatttgttatattttgtttgtattgtgaaattaatttatttgtttaatgtttataattatttttaaaatggtatttttatgatatgataaaattttgattattttttttattattatgttttttttatttataatatgtttggaaaatagtggtgtttaatagatatttatagagagaataattaaatggttattttaaatttaaattattgtatatttttaaagatgtagaagagtagaatgttattagggattatgtttatttaagtgtattgatttgaatttaggttgtgtggtatattgatatttgggtatgtgaatgagttttgttatatttatgtttgtttttggattaaggaaaaagtttttttttttttagttttattaatgggaggaatgaagtgattcgtttgtgtttgttagttattattgggagaatgagaatattgatttttgtaagtgttaaatttttgatattttgtaagtgttaaaatttaattttttaaatatagtttgaatttttgatatataaattttaaaaatttattatttttatggtttttattgttgtaattaaagaaaagttttaattttttattttttgttttggaatattttatttttaatatagttgttaaatttgttaatgggtgttttttattaataattaagttaattttttatatgtaattattttaatatatagtataaagatattcgtagtgttttataattttaggtttttgaaaatattaaattttaagtatattttattgattgttatgttaattgaaattattggttagaaagatatattgatatttagagaatatttagtgaatttttatgttaataattaggaattttttttattgtatgaatggataatttgggtaagttaatagtattattttcgtatttatttttaaaattgagaatatattatttgtattttattttttataattgtttgggaaattaatgagttttatagaatagataatgatattattaagtaatattttttatttaaaaagaaaataatatgtattaatgatttataaagtataaaattttgttaggtatggtggtttatgtttgtaattttagtattttgggaagttgagatcggtggattatttgagtttaggaatttgagattagtttggttaatattatgaaatttcgtttttattaaaatagaaaaaattagttaggcgtgatggtaggtatttgtaattttagttattcgggaggttgaggtaggagaatcgtttgaattcgggagttagaggttgtagtgagttgagattgtattgttgtacgttagtttgggtaataagagtgaaatttcgttttaaaataaataaataaataataaaattttgtataaatataaatgattaatataagttttaaaaaaaaaagagtttgattttaatttttaggtaaatagatgatgatataaaataaaatagtgaaaatattgtatgtggtttgaaatttaaatatttgttttatagatatatgtttgttgtagattaaattaaattttatatgtaaatatgaaaagagataagtttttaagtgtaaatattaagggaggtgaaggttagttttattaattattttgtagtaatattttttatttatttgtttgggggttttagttatttaaaattattttaaggttaaaaaaatatgtttttttatttttgaaattagtttttttagtttttaaatttttttattaaagattagatttttaaaatatatttgtaatgatatgtttttttttaatttagtggtttttaatgtatggtttgtaaattatttgttttagtgttatttgaagtgatattaaaatataatgtgtgtgttttaattaattttttatttttgtgaatggttttggttagtttagatgattaataaataagtttttttagtaagtattggtagttttgttagaggtatttgggagttagatgattttatttttataatttaattattaagaggtgtattttagtgaaagtaagtttttaataattaaattttttaagtgtatatgtgttataaataaatagttagaaaatagttatatgttttgtttgtaattttaggtgggttggtcgtaagtgaggtttattaattagtattttgtatgaaaagtttattttaaatagatattaatgatattaagattttttttgggttaggtagttgagtttagtggggtttagattttatatattttattaatgatatttgagtgttgggtttttttatttttatgttttgtttatataagatattttttgggtttagaaaattttttttttttagttattatttttgatattattaattgtataaaattttttttgatattttttatagtaaataataaaattttaggtgttgattttattataaatagttaagtagttatttttgaagagggcgggttttgattaggatattattaagtatttttattaggtattggattatatgaataaaagttatttatattgaagtgatgtataattataatattattgaattaaaatttttgtatgtaagatttgggaatttatgtttttaataaatatttttaggtaatatattaaaaatatatttgtagatttttataaatatttttaaaaattttaaatgttatttttttgatatgtttttttttttaggaagaatattgaattaatatttattttaatagttattttaaaaattatttattgtttttttaaattagattttttttataagattttttgaatttttaatgtttttattagtatttaattttagtgaataaatttttttttatttattttttgtgatatttttttaattattaagttagtatgttaaatatagggtggtgatttgttttgtagtagtttttaaattaaatgtttaagttagagttatgattaagtaaagataggtataataattaaatgttttttagtattggtaatattagttgttgtttgtaggagattgttattttaatttattttgatttttgttttagtagatttattaaagaaaagtggtaagagtattatttgaattaatgatttgt

SEQ ID NO: 263 - DNA, 6259 bp, Artificial Sequence
  chemically treated genomic DNA (Homo sapiens)
  unsure 5511, 5538: n is a or g or c or t
ttttattaaagaaggatattgagagatttagagtttaagagggaagttagagataggattaaatggttttatagttagaagaagaagtttggatttttttgtaaaggaagttgttagatgaataaaagtaaggagttaggtaatagcgtgttgtatttggggatttttataagtttttttatttataaaataaatagttggattaggtaatttttaaattttttttaattttataatgatatattgttgtggtttgtattatatttttttagtatataatatatttgtgtataagttattttttagtggtttttttgcgtaattagtataaaatttttttttgttattattgtttgtaaggttttgtaggttgtagtttttgattgtttttgattttattatttgtttttttttttttagttattatgttttagttataagtttttttgttttagaaatttttttttttagggtttttatatttgttgttttttttgtttgaaatgtttttttttagatttttttttagtggttttttaaatgtattttttttaataggttttttataattatcgtatttaaagtaggatttttttatttattattttttattttatttttgttttattttttttatattaatttttagtattggaaatttatttttgttgtttattttgagttatttattgtatagtatttttatttatttttatgtaaattttgtgagggtaggagttatgttgatttggtttatggttatagtttttgtgttgatgtttgatatataatagtatttagaatgatttattgagtgaatggatgatgagataagttattttgtgtagtttatttagtatatagaaaatattaagtataaaataggagttgagaaatatgtaacggtagtaatgataattgatattgattaagttttaattattggtattaggttaaattttttatatattgtattattttagtttttattataattttgtgaggtaagtattattattattttagttttatagatgaggaaattgaattttagtataattaagaaatttgtttaaagttataaagttagtaaattaatttagatttaaaattaatttaattttagtataatgttatttgttaattataatttgtaataaaattatttattaatttttgtaaagtgaaattgttattatttttatttggattttttaaagtttataattttaaggagtattatgtgagtaattattatatgtattttgggatttaggttaggtaaagggtattaggtgtttaagatatagagataaataatgtgatatagtatttaattttagggggtatagtttaggaagaaaaatataagcgtggtagaatggatatttttatgatttaaatatttttttgtttttttataaaaaaaaataaaataaaataaataaaaaaatattttttgttgtggagatttattttttttaaatgttttttatgaatttggtttaggtgtttaattttgtattttttaaattatattttaattgtttagtattgtttaggagggattgaatagttattatttattgagtgtttatacgtgataggtgatttatttatgtttattgattgaatttttataataatgaggtgagtgttattatttttgttttataaatgagtagttaatagtttattggggtattggattataatttaatgattataatagagtgtttgattataatgtagaattgttaatattaggatagaaggatgtgtatgtaaagatttatgggagttttaagaaataaatggtttttggtttttatagatatttatttatttttattttgtttgagatagtgtttttttgttttttagtttggagtgtagtcgtatgattatggtttattgtagttttaattttttgggtttcgatttgtcgattttagttttttaagtagttgggattataggggtatattattatgtttggttaattttttattttttgtaaagatggggttttgttatgttgtttaggttggttttgagtttttgattttaagcgattcgtttgttttggttttttaaagtgttgggattataggcgggagttattgagtttagttttagatatttatttaaatattataatggtaataaatatgagaatatttggttttttattagttttttaattaaatatttaataaataatgtgtattttattttgtaaaatattttaataatatttttatattttttgagaaaaagtaaatatttttatatttttattaagaataatatgttagaagtttttttattataataattggaatatagattttaagtttttttatattatatttttttgatatattgtttgaatttttttttttttggggtaaagaaaagtattttttttaagttattgttagtttttttatttaagattattttgaaatgaatttatttttttttttaatggaaagataggtatataataagataagtattttttttatttgaataaatttagtattagagtagttttttgtagttagtgaattatgatagtttgttaagaagaatgtttttagtaaaataaagttaggttgggattgattaatatgaatgtataaagttaattttattaaaaaaaattgattaggaaaataaaataatgttaagttaattattgtaatattaaaaacgttgttaaaaaatttagattgtttttgagtaattaaaggtgaattattttttattttgtggtgaatatgtgatattttttttaatagtagttttgtggggagggtttgtttttattgagaattaatttattttttagaagtgagagataaggaaaaatttttatgataataatttatttggtgaattgtagtttggtggtgtttgaagttttacgtatatttaagaattaaatatgtttttattttatttttgttaggaaagttataatttagttttacggaaaatgaaagataaggatttttgttgattaaatcgtttggttttttttatagaatttcgggaagttattttatatttataaattttgtatttaatttttggtatttattaacgttatatttttagggttaagtgaagagttttatagtaattaagttaatatttgaaaattatgtaaagaaataaaattatattaatgggttttaatagatataatgtatttatagaggtataaataaaagttttttttttgttataaattttattttgtaatggttttaaaaatttaaaaattttattgttgtttttttgtttaagaattttttgtgatattaatttaaaatttatataagtagaagtatataattttttagaattttagaataagtaagtttaaatatgaattatatttgtttggatgaaattgattgaaataaatagtaaagagtgattttgagatatatattgtaaaaatgtttattaataatttatttttgtatttatttgtatatttttaaaggtaagtaatgtgatgttaaggtcgatataattatattaaattgtgttttgtttttttaattgtaattttaatattattgtttttagagattgtagagattatagaatcgaatttttttttataaattttcggatttttttgtggtaaaattttttgtaggaaatgaattttttttatattttaaaatagttttatttatttagtaggttttgtaagtatagtgttttaggtttataatatttttagatgtttaggaaaatgtttttttttaaaataagaataaaaaagaaaaaaattaggtgttggttaaagaaaatgtttaaatatataatattaagatatttatttttatgttagtgttggtataaatgcgtgtttatgaaaaagggatttattaaggtgaaatgtcgtaggatttataaatgttataatgttggttggttttaaaatgttttttttattaaattattttgaatgatttttaggtatgttagatgttaattttttttggttagttagggaacgttttatgtttttggaagaaattattttttttttattggatttttttgagaaaagtgatttgttaaaagttttggttattttaaattaatatgtatttaattaggacgtttttttatttacgttaattttttaaagaggaggaaagtaggagaagatgagcgttttatgtaaggttttgttagtttacgaggaaatgtaattttttaggttcgttcgagcgtgggttgcgggtaggggattgtggggtcgttgtttcgttttattttacggtcgtgtagtagagggcgcgtgttttttagtatttatgttgcgcgtttttttgcgtttttaggatcgtatttttatttgttttaaggttatagtttttaatttagtttgttagttttaggtcggggatattagagattgagtttttcgcgttggagatttcggcgcgggtggggcgggagggtttcggggttaagagataggttataatggggataggggacgaaaggcgtcgggggttcgggtttcgagtagttttcgtcgtcgttagatttcgtagtcgggagggggatggggtgcgcgtagaggtttcgcggttcgggttggacggaggagtttaggagttatcgtagtcgtcgtacgtttagagtttcgagtttcgttgttagtttaggatatcggggttttgtcgtgggtcgaggggagtcgggcggcgggagaggagtttcggagtttcggagtttcggagtttcgtcgggcgttagtcgagagggcgtttttttcgttttcggagattcgttcgttcggttcgtttcgtttcgagcgcggggagtttattttcgttcgttattatttttttttgtcgtttaggtttattcgagttttttttttcgggtcgttttcgagtacgaagttggcgggagtttataaaagttggtgtcggcgcgattcgcggatatatagtgtaggcgtttaagtcgtcgtcgttagatcggtgtcgatttttgttttgtttcgatcgttagcgcgattatgttttattattgggggtacggtaaatataacggtgagtgtcggcgacggttagcgcgggggcgtttcgattttcgattttcgattttcgattttcgagttcggatgtcggttcggggttcgtagcgttcgtatatgttgtttatcgcggtcgcggggagtgttggaggtttaggtgcgtttcgggcgttcgtttcgttcgcggtttcgcggcgtcggggatgttttttttgttttagttgcgaggttattgtggaggaattttcgcgttcgtcggaggcgcgtagggttcgagggaggggaggcgtagttttggtcgcgggattcgaggatagtttttttcgggtttcgatttggggattattttaatcggatttaggaggaggcgggaaagggttgtaacggaaaattttagttgttgatcgtagagaaataagaagattttntttttttttttttttaattttttattntttattttatttttttagttttagtattatttgtggttaaggcgtttagtacgaattgtttcggggtattttttagtgttggtttgaatttatggttttgattttcgagttttttttttatttttcgatttttaatgttagggggtcggatattaggaatcgggttttattttggttttagatttggtttttcggagttagcggagtagaggagtatgcgtttggcgtatttagcgtatttttggagggtgtggggttttttaggtagtggggaattttgacggttaaaggtggggtgggttcgggtttgggtagtgaggaaaggatttagatttttttgaatgttttaagtgagtttgtatattttaaaatcgtaattataagttttgatattagtgtttgttcgattttagttgttgaattttagtaaaacgattttaaaatagttaatatttatatagtatttagtgatttaagagttttatatatatcgattttaatttttatagcgatatttatgaggtagatttttaattattttatattataaatgtggaaattgaggtatagattacgtgtttttttaaaatttagtttattgttaagtgatgtttttaaaattggaattgagtagattggtttcggaatgattgtttttttttaggggtttgggtgtatttttttttataatgggggatttatatgtttttttttttttagg

SEQ ID NO: 264 - DNA, 6259 bp, Artificial Sequence
  chemically treated genomic DNA (Homo sapiens)
  unsure 722, 749: n is a or g or c or t
tttgggggaaagaagatatgtgaattttttattgtggggaaaggtatatttagatttttagagaagagtaattatttcggagttaatttgtttagttttaattttagaagtattatttaataatgggttaaattttgggaaaatacgtaatttgtgttttagtttttatatttgtaatatgggataattagaaatttattttatagatgtcgttgtaagaattagaatcgatatatgtaaagtttttagattattgagtgttatataaatattagttattttaaggtcgttttattgaaatttagtaattgaaatcgggtagatattaatgttagggtttgtggttgcgattttgggatatgtaagtttatttaagatatttaaggaggtttggattttttttttattgtttaggttcgggtttattttatttttaatcgttagggttttttattatttgggaagttttatattttttaaagatgcgttaggtgcgttagacgtatgtttttttgtttcgttggtttcgaagaattagatttgaggttaagataaaattcgatttttgatgttcgattttttaatattagaagtcgagagatgaagggaaaattcggaaattagagttatggatttaaattagtattggaaaatgtttcgggatagttcgtgttgagcgttttagttataggtggtgttgaagttggaggggtggggtgggnggtggaaggttggggaggggggagggnggagtttttttatttttttgcgattaataattagaatttttcgttataattttttttcgtttttttttaggttcggttaaaatgatttttaggtcgggattcgggagggattgttttcgggtttcgcggttagggttgcgttttttttttttcgggttttacgcgttttcggcggacgcggggatttttttatagtggtttcgtagttggggtaagggggatattttcggcgtcgcggagtcgcgagcggagcgagcgttcggggcgtatttgagtttttagtatttttcgcggtcgcggtaaatagtatgtgcgggcgttgcgggtttcgggtcggtattcgggttcggggatcggggatcggggatcggggatcggggcgttttcgcgttggtcgtcgtcggtatttatcgttgtgtttgtcgtatttttagtgatgggatatggtcgcgttggcggtcggggtagggtaggaatcggtatcgatttggcggcggcggtttgggcgtttgtattgtgtgttcgcgggtcgcgtcggtattagtttttataggttttcgttaatttcgtgttcgggggcggttcgggggagggggttcgggtggatttaggcgataaggggaggtggtgacgggcggaggtgaatttttcgcgttcggggcggggcgggtcgggcgggcgagttttcgggggcggggaaaacgttttttcggttggcgttcggcggggtttcggggtttcggggtttcggggtttttttttcgtcgttcggtttttttcggtttacggtagggtttcggtgttttgggttggtagcgaagttcggagttttgggcgtgcggcggttgcggtggtttttgggttttttcgtttaattcgggtcgcggagtttttacgcgtattttatttttttttcggttgcggagtttggcggcggcggggattgttcgggattcggattttcggcgtttttcgttttttgtttttattgtgatttgttttttggtttcggagttttttcgttttattcgcgtcggggtttttagcgcgaagggtttagtttttggtgttttcggtttggggttggtaagttgggttaggagttatgattttggggtaaatagggatacgattttagaggcgtaggggagcgcgtagtatgagtgttgagaggtacgcgttttttgttgtacggtcgtggaataaaacgagataacggttttatagttttttgttcgtagtttacgttcgggcgagtttggaggattgtattttttcgtaggttggtagagttttatatgaagcgtttatttttttttattttttttttttttaaaaaattaacgtgggtgaggagacgttttagttgagtatatattgatttgaaataattaaaatttttaataaattattttttttagaagaatttagtaagagaaagataattttttttaaagatatgagacgttttttggttggttaagaaaaattggtatttggtatatttaggaattatttaaaatagtttaataggaaggatattttgaggttagttagtattatgatatttgtgggttttacggtattttattttggtgggttttttttttataaatacgtatttatattaatattgatataaagataaatattttaatattatatatttaaatattttttttaattaatatttaattttttttttttttgtttttattttaaaaggaaatatttttttgggtatttaaaagtattgtggatttgagatattgtgtttatagggtttattgggtaagtgaggttgttttgagatatagagagaatttattttttataagggattttgttatagaaaaattcgggggtttgtgggaaggagttcggttttgtggtttttgtaatttttgagggtaatagtattagagttatagttggggaagtaggatatagtttaatgtgattgtgtcggttttgatattatattatttatttttgaaaatatatagataaatataaggataagttattagtggatatttttgtaatatgtattttaaaattattttttattatttattttagttaattttatttaaataaatatgatttatgtttagatttatttgttttaagattttagaaaattgtgtatttttgtttatgtgggttttgggttgatgttatagggaatttttaggtaagaaagtagtaataaagtttttaaatttttaggattattataaaatggagtttgtagtaaagaagaagtttttatttgtgtttttgtaggtgtattgtatttgttggggtttattgatgtaattttgtttttttatataatttttaaatattaatttagttgttatgagattttttatttggttttggagatatggcgttgataggtgttaagaattgagtgtaaagtttgtgaatgtagagtggtttttcgggattttgtggagggagttaggcgatttgattagtaggaatttttgttttttatttttcgtgaaattggattgtggtttttttaatagggatgaagtaagagtatgtttgatttttaaatatgcgtaaaattttaaatattattaaattgtagtttattaaatggattattgttatgggaatttttttttattttttatttttggaaagtgaattaatttttagtgggagtaagttttttttatagagttgttgttagggagagtgttatatgtttattatagggtggagagtggtttatttttggttatttagaagtaatttaaattttttagtagcgtttttggtattatagtggttggtttagtattgttttatttttttggttaattttttttaatggagttaattttatgtatttatgttggttagttttaatttaattttattttattgaaggtattttttttagtaggttgttatgatttattagttgtaaaagattattttaatattggatttgtttaaataaaaaaagtgtttattttattatgtatttatttttttattagagggaaggatgggtttattttagaataattttaagtaaaggaattgatagtagtttaagaaaagtatttttttttgttttagaaaaaaaaaaatttaggtagtatattaggaaaatgtaatgtaaaaaaatttaaagtttgtgttttaattattataataaaaaagtttttaatatattatttttagtaaaaatgtgaaagtatttgtttttttttaaaaaatgtaaagatattgttaaaatattttataaggtgagatatatattatttattaaatatttaattaaaaagttaataaaaagttagatatttttatatttgttattattatagtgtttaagtagatatttggggttggatttagtggttttcgtttgtaattttagtattttgggaggttaaggtaggcggatcgtttgaggttaggagtttaagattagtttgggtaatatggtaaaattttatttttataaaaaataagaagttagttaggtatggtggtgtgtttttgtagttttagttgtttaggaggttaaggtcggtagatcggaatttaggaggttgaggttgtagtgagttatgattatgcgattgtattttagattgggaaataggaagatattgttttaaataaaataaaaataaataaatatttatgaaggttaagagttatttgttttttggggtttttataggtttttgtatatatatttttttattttaatattggtaattttgtattgtaattagatattttattgtaattattgggttataatttaatgttttaataagttgttgattgtttatttgtaaagtaggaataatgatatttattttattgttgtaagaatttagttagtgagtatagataaattatttgttacgtgtaggtatttagtaaatgatggttatttagttttttttagatagtgttaaatagttagaatataatttaaggaatgtaaaattaaatatttgggttaggtttatgggaaatatttaagaggaatgagtttttatagtaggaggtgtttttttgtttgttttgttttgtttttttttgtgagaggatagaggagtgtttgggttatggagatgtttattttattacgtttatgtttttttttttaaattgtgttttttgaagttgagtattgtgttatattatttatttttgtattttaggtatttagtattttttatttagtttgagttttaagatatatatagtagttatttatatagtattttttgaaattataaattttgaaaaatttaaatggagataatggtagttttattttgtagaagttagtaaataattttgttatagattatagttagtaaataatattgtgttgaaattaggttggttttgaatttgggttaatttattagttttgtgattttgggtaaattttttgattgtgttaagatttagtttttttatttataaaattaggataataataatatttattttatagagttgtggtgaggattaagatgatatagtgtgtgaaggatttaatttagtgttaataattagagtttgattaatgttagttattattattatcgttatatgttttttagtttttattttgtgtttaatattttttatgtgttaggtgagttatataagataatttgttttattatttatttatttaatgaattattttgaatgttattatgtgttaggtattagtatagaggttatagttataaattagattaatatgatttttgtttttatagagtttatatggggatggatgggggtattgtataataaatgatttaaaataaataataaaagtaaatttttaatattgaaaattagtatgaggaaagtaaaataggaatgaggtaaagaataatgagtgaggaaattttattttagatgcggtggttatagaaaatttattgaaggaagtatatttgaggaattattaaaaaaagatttgggggagggtattttaggtagaggaaatagtaagtataaaggttttgagaaaggaagtttttagaatagaaaagtttgtgattgaagtatggtgattgaggaagaaaagataagtagtggagttagagatagttaggggttatagtttgtagagttttgtagataatgatagtaagaaaggattttatattagttgcgtagggaagttattagggagtggtttatgtataggtatattatgtgttgggaggatataatataaattataataatatattattgtagaattaaaagaagtttggaggttatttggtttaattatttattttatagatgaggagatttgtagaagtttttagatataatacgttgttgtttagttttttgtttttatttatttgataattttttttatagaaagatttaaatttttttttttgattataaaattatttaattttgtttttggttttttttttggattttgagttttttaatatttttttttggtaaga

SEQ ID NO: 265 - DNA, 7119 bp, Artificial Sequence
  chemically treated genomic DNA (Homo sapiens)
aggtttgtttgggagatattttttagaatttttttttgaaagtaacggggaggttttgaaggttattgagaaggggagggatatgtgaatttgttttgaatttttagatatttggttttatttttttttttttaatggagttttgttttgttatttaggttggaatgtagtggtatgattttggtttattgtattttttattttttaggtttaggcgatttttttgttttagttttttaattagttgggattataggtatttattattttatttagttagtttttgtatttttagtagagatagggttttattatgttggttaggttggtttcgaatttttgtttttaagtgatttgtttattttagttttttaaagtgttgggattataggcgtgagttattatgttcggtttggttttatttttgagagtatatttaagtttttatgacgtttagaattattgttgattttttttggtttttatttagtgtggaggataaagttagttggaaatagatttagggtttgtaaaaaggatagaggtgagagggtgtagaaggagatattttcgggaatttgagtttgttattatttttttttgttagggagagagttagtttttttttgttttttggagaggtcgtgtttagtggttaaggtgttatgttgtttattatttatttattcgttaagttttgattattttttatgaagagggaaaaaataatagagtagtgtgataagtgttaagatggtatttatggaatattgtagatatatataagaggggggagtgcgattagagaggttttttagataaaatggtatttaatttggatttgataattatatgtaatgaagtttggtggtatttaaatttaatatatattaattatttttgaaataataattttttaaagtttatgaaaggttacgtgtaattagttttattttgataaatttagttttttgtttaattttttttttgttattttatatgtatttgtggagtatttaatatttaataggggttgggttaggtttagggtatataggtgaaagaatagatagttttattaggtgttatggagaaatttagggtggggtgagagggtgtattttagattatagggattggggtagggaaggttttgatgattgtttttgttaggtagagggttttgaatggattagtaatatttattttgttattaaagaggtatttttttttataaagagttggttttttttattggttgatggttgttgttgttaatttaataagtagttttagattcgtttttagatgtaagatttcggaagggattagtgatgagatttaattttttagttttaagggatatgataaaattgggtatttttataagttatgatttttaggaggtgttttttgtatatatttttttatatttgatttttatattttattaattttttgttaaggatgttttttttgttttttcgttatggaaattacgatttagagtggttattcgattattaaggagtggatataagattttaatttagatttgtgtttttttagtagttaatcgtttttttttatgaggtttataatttcgtttgcgggtggggatgatataaagaagtttataatataggttttttttaattgatatgtttatttttttttttttttttttagaaatgttttcggggattttttttattgagttggcgtatttttaatagtagttattagtttggggatttcggatagttcggggatttcgaaggtcgcgaggattaaggattaggcgttggggtgggtgtggaggatatggagttcgtggtttaggtttgaggtgtttatgttgggtggtagtaagaggtagggtgggcgggtttgtggttatgtttatgggtgttgcggaacggggtgcgggtttttagagtttcgcggcgttatgggttggttttgagaaggcgtgtatcgattttttgagaggggttatatttgtttagggcgatggtttttgttagggagttattggaagttattttaaagggcgaaaagaggttttagtaagttttggtatttaagagttgttgttagcgatgtgatttgttttattggtggagacggtgtagattttaagtcggggttattcggtggaggtttcgttttgggtttagttttacgcggtattatgaataataatttttgtcgggttttggtggatcggaggtttttggggttttttagttgtatgtagttgggcgttatgtttttttttcggtaggcgtttttgtttttcgtcgagtttttgggtaacgtgttttttttgttgtattcgggtttagtagagtcgttttattacgacgtttatgcgggggtgtttttttacgtgttttttttcggcgttttcggggtttacgaatattttttcgagttagtttttatttagaagcgtaacgagcgcgagaggtagcgagttaagtgcgttaacgagggttacgttcgttttcgcggttattttttcggcgttttggttgagaagcgatttagtaaggtggagacgttgcgcgtcgttattcgttatataaagtatttgtaagagttgttgagttcggttttcgacggttcgacgtttttcgtttttcgcggtttttcgggtatcgggttttgtttcgcgtcgttcgttatttttcgtttcgatcgttttggcgacggcgaggttcgggcgtttttttttttggtgtcggagttattcgagtttttttgttttttttcgtcgttttttttggagtcggaggaattttggtattgatcgggtttgtggtcgttttcggtttggaggatgattcgtcggtttcgttttattttcgggagtagcgggaggttgttgggttattcgcgatgcgtcgtaggacggtgattgtaggaggttcgcggcgttttcgtgtttgcgatatttttttttttttattagtttggggcggaagtgtagggtagcgggtacgatgggtacgatagagatttaggagtttcgtgggtgaagcgaggggtagggtttgggattgtttcgggcgttttgcgtttttttcggggtgtagaggggttttttaggacggttatttttgggtttggttttcgttcggttttaggtggttttgtttcgtttttttttgtcgtaggcgtagtttagtttttgcgagttttcgggatgcgagttcgattttgagttttcggttattatgttattgttttttattagatggttttagatattagcgatttttttgggagtacgtttatttttcgagaaaggaatttagaggaagggatgggaggttagattgttgttggcgtttagtttagatcgaatttatagatttagtagaggcgatttgtgtgtttcggtggcgttttttggttttttgggttgggagggggggttatttttttttcgtattttttttatgaggtcgtttagttttgttttaggttgggtggggattgtggttttttttttttagattgtaagttttgggggaggggggcgtgtatataggtatataggtattgcgtcggtattaaagagttaaataaaaggattgttgaatttttttatttttagattattgtttatttttattttttttggtgttttttttttatttttatttttagtttagagtatttgttgggaggatatgtggggttcgttgttagtttagtatatttaagatttagtgttgttagtttaggcgtttaatgaatttttttttttttttttttttttttgagataggttttgttttgttgtttagattggagtgtagtgatttaatttttgtttattgtaattttttttttttgggtttgagtaatttttttgttttagtttttagagtagttgggattataggtgtatattattacgttcgttaatttttggtatttttagtagaatgcgggttttattatgttggttatgttggtttcgaattttttattttaagttatttatttattttggttttttaaagtgttgggattatcgtggttatttttaatgaatttttttttttgagataaggttttattttgttttattttgttatttaggttggagtgtagtggttagattttggtttattgtagttttaattttttaggtttaattgatttttttattttggtttttttagtagttgggattataaatatatattattatattttgttaatttttgtattttttgtagagatagagttttattacgttgtttcgattggttttgaagttttgagtttaagttatttttttattttagttttttaaagtgttgggattataggcgtgagttattatgtttggttttagtgaatatttatagggagtatagtatatagggggattgtgtagagaaggggttagagttttagagataatgtatataatttttatatttgtagggatgggaggagatggggaagaaagatatatagtagatgttttatagtgaggtaggtgttatgttagaggtgtgtatatttagggttgttttgggagttttttagtttattggagaggggtttattgtttttttgatatgggattgtttgtgggggtgggttgagggtatgtttggggagttttggttgatggtgtagatattgagatgggtaggggttgttgtggagttgttttgatttaggttgtttagtgttttttttagataatgttatggggttgaggaggggtaagtttaattttggtatgagggggttattttgtagtttgaggttttatatttaaggttatttatttttgatttttgttgttttaggtttgaaattttttattttgttttttttttttattgtttttgttttattttaggtttgtgtgtaagtttttttttcgatttattttattttttttaggggatagattgggaagttattggttgggttgggtggaatgatagttgtttggttttagaagtttaggttcggtagcggggagtcgagtggaggttaattttatttgttgggagcgaggagagtaatttttttgtttttatttttgttttcgttttttggttggtttagtagggtaggtttagtcgatagttttagttagtttagtttttaaggcgggggtattggggatatagggaagggaaagtattggggtgggggagtaggagaaagttagatttttagggaagttatggagttatttttattttaggatgaaggtttgaggaagaaatagtttaagaagttagtttttgagattttgttaaggttatttcgggttttgttttgtttgattttggagaattttttgaggaaggtttgtattagtattgtagaatggaagtattttttagggttcgggtcgtgggggggggtgtgcgttatgagggagggattcggggtgattatagagtataaattttttataggagggttagggaggtttggtatttagatatggggtgaatttatagaattgagtgaggagttgggggaaggagttttcggttaagtaggagaggaggaggaggaagaggaggaagataggaggtggggagaaggtttattttttacgaattcgagttcggtattttattagtttttgaagtattagttttattttagaataggatagggattaaaaaagatgcgatggtttttttgagaaaatttttttttgtttgggttgggtggggggtgatagtggatagaggtgagttgaaggaaggttttttttgggggtaggttttagttgaggatagagttaaggggagaaatggatttgaaagatatttggttttagtggttttaagatataggttaaataagtttggttgttttagtttagacgtgttattttggggatagggattttgaaatttatgttatgtttgtatttgttttggtggggagaatgatgaaaatatttgggttatttggggaagggaggaaggagtgatagagagaaggggagggttgtgttaagtgggttttgagagcgagggtggggtatatttgaaatatttttgaagagttttggaaggttgggtttttattagttgttttttagaaggaaggagaatgagggataattggaaggataagagaaacgtggggtaagtagagatagtttggggttagggttagttttgtttttttgattcgttttcggttaggcggtatatcgtttatattaaatttttttaggttttttttttttgttttttttttgtaattaggtttattttgtgggtttttttttttttttattttttgtttttttgcgttttgtttttgtggtttttttttttttttaaatattggaggttattgggaagagaatgggatttttttgttaagtttaattacgtaatatgtttttttatttatttttaaataattttttcgtttttttttttgttttttttagttttttttagatttgttgtttaatgggttagaaagtcgagaaagttatgggtttggggtattttttggaaatggttgtggcggggtgggtgtgtttgggaggggtgaggtgtgatgggtgtgagtacgtgtatattagtatgtgtatatggttttggaaatttagtatttatttttttattttttttttttagttttatttagtgagtttttaattttattttgtattaatttttatttttttatgttatttatttgggtaagtttttgtggattggttagaatttgttaaagttatggttttttgggagtaggtaagggtatggataggcgttgagagtggagcggtgtgaagattttttaggttttaaagttgaggagtttttagttagggattagatttttgttattttaaggagtttatatgaaagtgatttgtttttgaggagagggagttagaggttaaggtaggaatttggtttttattgtattttgtaggggtttagggaaggagtagcgtgggcgagcgtttatgagtttgtttagtagtttggtattagagttatagtttagattgatttttagcgtttttatttttttaattttgtaagttttttgttttattcgagggttttttttaattttggttttagg

SEQ ID NO: 266 - DNA, 7119 bp, Artificial Sequence
  chemically treated genomic DNA (Homo sapiens)
tttggagttagggttaaggagagttttcgagtgaggtaagggatttatagggttaaggggatgagggcgttgagggttagtttggattgtgattttgatgttaggttgttggataggtttatggacgttcgtttacgttgttttttttttgagtttttgtagggtatagtgaggattaggtttttgttttgatttttggttttttttttttaggaataagttatttttatgtagattttttggaatggtaaaggtttggtttttggttgagggttttttagttttaaggtttagggggtttttatatcgttttatttttagcgtttgtttatgtttttgtttgtttttaaggagttatgattttggtagattttggttaatttatagaggtttatttagataaatggtatgggagggtaagggttgatgtagggtaaggttgagaatttattgagtaggattgggaaggagagatggagagatgaatgttgaatttttagagttatgtgtatatgttggtgtgtacgtgtttatatttattatattttattttttttagatatatttatttcgttatagttatttttagagggtattttaggtttatggttttttcgattttttggtttattaggtagtaagtttggaaagagttagagaaagtaagggaggaagcgagggagttgtttgggggtggatggggaggtatattacgtagttgggtttgatagaaaaattttattttttttttagtaatttttagtgtttgagaaaagaggagggttataggggtagggcgtagaggagtagaggatggaggagagggagaatttatagagtaaatttgattgtagaagagaggtaaggagggagggtttaggagggtttgatgtgggcgatatatcgtttggtcgagagcgggttaggggaatagggttgattttgattttaaattatttttatttgttttacgttttttttgtttttttagttattttttattttttttttttttagggaatagttggtaggagtttagttttttagaattttttagaaatattttaaatatgttttattttcgtttttagaatttatttgatatagttttttttttttttttgttattttttttttttttttttaaataatttagatatttttattattttttttattagagtaaatgtaaatatagtatgagttttaaagtttttgtttttagggtggtacgtttgagttagaataattaggtttgtttggtttgtgttttggagttattgagattaggtgttttttagatttatttttttttttggttttgtttttagttgggatttgtttttagaggaagtttttttttagtttatttttgtttattgttattttttatttaatttaaataagggagagtttttttaaagaggttatcgtattttttttggtttttattttattttaaaatgaggttggtgttttaaaaattagtggggtatcgagttcgaattcgtaaaaagtgaattttttttttattttttgttttttttttttttttttttttttttttttgtttagtcgagggtttttttttttagttttttatttaattttgtgagtttattttatgtttaagtgttaggtttttttggtttttttgtaggaagtttgtgttttgtgattatttcgaattttttttttatgacgtatatttttttttacggttcgggttttgaaggatatttttattttataatgttgatgtaggttttttttagggggttttttagggttaggtagaataaggttcggggtggttttggtagaattttaggaattggttttttgggttgttttttttttaggtttttattttggggtgaggatggttttatggtttttttgggaatttggtttttttttgtttttttattttagtgtttttttttttttgtgtttttaatgttttcgttttggggattaggttggttgaggttgtcggttgagtttgttttgttgagttagttagggggcgggggtaggagtgggggtaggaggattatttttttcgtttttagtaagtaaaattagtttttattcggtttttcgttgtcgggtttgagtttttgaggttaggtagttgttattttatttagtttagttagtgattttttaatttgttttttgaggagggtggggtgggtcgggggaagaatttatatataggtttgggatggggtaggggtagtgggagagggagataggatggaaggttttaagtttggggtaatagaggttaggaataggtagttttggatatggaattttaaattgtagagtggtttttttatgttaaaattaggtttatttttttttagttttatgatattgtttggagaaggtattgggtagtttaagttaggatagttttatagtagtttttatttattttagtatttgtattattagttaaaattttttaagtatatttttaatttatttttataagtaattttatgttagagaaatagtaaatttttttttagtgggttagaaggtttttagaataattttgagtgtgtatatttttggtatagtatttgttttattgtggagtatttgttgtgtattttttttttttatttttttttatttttataggtgtaaaggttgtgtgtattatttttgggattttggttttttttttgtatagtttttttatgtattatgttttttgtaaatgtttattgaggttaggtatggtggtttacgtttgtaattttaatattttgggaggttgaggtgggagaatggtttgagtttaggattttaagattagtcggggtaacgtagtgaaattttgtttttataaaaaatataaaaattagtagggtatggtggtgtgtgtttgtagttttagttattaggggggttaaggtgggaggattagttgagtttgggaggttgaggttgtaatgagttaagatttggttattgtattttagtttggatgatagagtgagatagagtgagattttgttttaaaaagaaaagtttattgaggatagttacggtaattttagtattttgggaaattaaggtaggtagataatttgaggtgaggaattcgagattagtatggttaatatggtgaaattcgtattttattaaaaatattaaagattagcgggcgtggtggtgtgtatttataattttagttattttggaggttgaggtaggagaattgtttaaatttaggaaaaggaggttgtagtgagtagggattgaattattgtattttagtttgggtaatagagtaaaatttgttttaaaaaaaaaaaaaaaaaaaaaaaaatttattgaacgtttgagttaataatattgaattttaaatgtgttgagttaatagcgaattttatatatttttttagtaagtattttgggttgggagtgagaataagaaaggggtattaggaagggtgagggtagataatgatttaggaatgagaaaatttaataatttttttatttagttttttggtgtcgacgtagtgtttatgtatttatatgtacgttttttttttttaaggtttatagtttgagggaaaaaaattatagtttttatttaatttgggataaaattagacgattttatgggggggatgcggggagggagtaatttttttttttaatttaggaagttagagaacgttatcggggtatataggtcgtttttgttgagtttgtaggttcggtttgggttgagcgttagtagtaatttggttttttatttttttttttgggtttttttttcgaggagtaagcgtgtttttaaagaagtcgttagtatttgaggttatttggtggagagtagtggtatggtaatcgagggtttaaagtcgggttcgtatttcggggattcgtagagattggattgcgtttgcggtaaggaaggacggagtagagttatttgaggtcgagcgggagttagatttagggatgatcgttttggggagtttttttgtatttcggaggggacgtaggacgttcggagtagttttaggttttgtttttcgttttatttacggagtttttaggtttttatcgtgtttatcgtattcgttgttttgtattttcgttttaagttggtggaggagggagggtgtcgtagatacgggagcgtcgcggattttttatagttatcgttttgcggcgtatcgcgggtgatttaatagtttttcgttgttttcgaaagtgggacggggtcggcggattattttttaagtcgggggcggttataggttcgattaatgttaggattttttcgattttaagaaaggcgacggggagaagtaggaggattcggatgatttcggtattagggaggagggcgttcgggtttcgtcgtcgttagggcggtcgggacggggggtggcgggcggcgcggggtagggttcggtgttcgggaggtcgcgggaagcggggggcgtcgagtcgtcgggggtcgagtttagtagtttttgtaggtattttatgtagcggatggcggcgcgtagcgtttttattttgttgagtcgttttttagttagggcgtcggggaggtggtcgcggaggcgagcgtagttttcgttgacgtatttgattcgttgtttttcgcgttcgttgcgtttttggatgaaggttggttcgaaggggtattcgtagatttcgaaggcgtcggggaagggtacgtaggggaatattttcgtataggcgtcgtagtagggcggttttgttgggttcgggtatagtaggaagggtacgttgtttaggggttcggcggggggtaggggcgtttgtcggggagggggtatgacgtttagttgtatgtagttggggggttttagaggttttcggtttattagagttcggtagaagttattgtttatggtgtcgcgtggagttggatttagagcgaggtttttatcgaatggtttcggtttggggtttgtatcgtttttattagtggggtaagttatatcgttagtagtagtttttgggtattaggatttgttagggttttttttcgttttttagggtggtttttaatgattttttaataagagttatcgttttagataagtgtggttttttttaggaggtcggtgtacgtttttttagagttagtttatggcgtcgcggaattttgagggttcgtatttcgtttcgtagtatttatgggtatggttatagattcgtttattttgttttttgttgttatttaatatgggtattttaggtttaaattacgggttttatgttttttatatttattttagcgtttggtttttggttttcgcggttttcgggattttcgggttgttcggggtttttaaattgatggttgttgttaggagtgcgttagtttagtggagggagttttcgggaatatttttaaagaagaggagaggagagtgaatatattagttaggaaagatttgtattatgggtttttttgtattatttttattcgtaaacgggattgtaagttttatgaggagaggcggttggttattgaaggggtatagatttgggttaaaattttgtgtttattttttaatagtcgggtgattattttgagtcgtggtttttataacggaagggtaagggaaatatttttgataggaaattaataagatatgagaattaaatgtgaaaaaatatatgtaaaaaatattttttaaaggttatagtttataaaaatgtttagttttgttatgttttttgagattgggggattaagttttattattgatttttttcggggttttatatttagaagcgggtttgagattgtttattggattagtagtagtagttattagttaatgagggaagttaattttttatggaaaggaatgtttttttgataataaggtaggtgttgttggtttatttaaagttttttgtttggtagagatagttattaaagttttttttgttttagtttttgtggtttgggatatatttttttattttattttgggtttttttatggtatttaatggagttgtttatttttttatttgtatgttttgagtttagtttagtttttgttgagtattagatgttttataaatatatgtggaataatagagagaggattaggtagaaagttgggtttgttagggtgggattgattatacgtagttttttataggttttaggaagttgttattttagaaataattggtgtgtgttgagtttaggtgttattaagttttattgtatgtggttattagatttaagttaggtgttattttgtttaggaagtttttttgatcgtattttttttttttgtgtgtgtttatagtgttttataagtgttattttagtatttattatattattttattattttttttttttttataaaagatgattaggatttagcgagtgagtgagtgatgggtagtatgatattttggttattgggtacggtttttttaagagatagaaaggagttagttttttttttgataggaggaggtggtggtaaatttagattttcgagaatgtttttttttgtatttttttatttttgttttttttgtaggttttgagtttgtttttagttagttttgttttttatattaaatgaggattaagaaaaattaataatgattttaagcgttatggagatttaggtatgtttttaaaagtgaaattaggtcgggtatggtggtttacgtttgtagttttagtattttgggaggttgaggtgggtagattatttgaggataggagttcgagattagtttggttaatatgatgaaattttgtttttattaaaaatataaaaattagttgggtggaatggtgggtgtttgtaattttagttaattgggaggttgagatagaagaatcgtttgaatttgggaggtggagggtgtagtgaattaagattatgttattgtattttagtttggatgatagagtaagattttattaaaaaaaaaagagtgaaattaaatgtttgagaatttaggataaatttatatattttttttttttttagtggtttttaaagttttttcgttgtttttaagagaaggttttagaaaatgttttttaaatagattt

SEQ ID NO: 267 - DNA, 9415 bp, Artificial Sequence
  chemically treated genomic DNA (Homo sapiens)
tttaggttaaatttagtttcgggaggagggagtggagagagaatttatttttttttaatttattttttttagaaatgggggtaagtggagggttagttgagtagagagggaggaatagtttttcgagatttcggggatgggaggattgaggggaggggtttcggaaatttttaggggaagtgggttaaaagaagggtcgggaagaagggtgggacgttttttattggaaaggggagagcgttttagttaatgttgaggggaagttggggatttgggttaatcggagttagcgtgtgtttgtttttatgaaggggggttcgttttttttcgttttaggcgtcgtttttggtttggagaagggtttagtttggggtcgttgggggtgtgaagggattaatgagcggtttgttcgtttagaagggtttagagagagagttaattggaattatattttcgtttttttttttttcgttagaatttgggtttgttttgtttgacgtattcgtagaaaggggcgggaggggtattgattcgaggagcggtttcgcgattttgtattttttgttgtttagtttcggttaggacgttgttcggtttagttggggcgtttttcgagattaggatggaggtagggacgggttagggtttcggaagggcgcgggtgtttcgaaggagttttacggggtgggaataagtagagcgtagtttggggttttttattgggggtttcgagttgggattgtagtttttggagaaaggagggggagaggggttcgttttgggtttgggcggtgtttggattcggggtgcgttttttttgttttggtttgggtagcgtcgtttgttggtagggtcggattttgcggtttcgggatcggatattaggcggtgtcgttatttggagggcgcgtgtagtcgtcgggttagcgagttaaggggtttgtagcgggtcgagaaggagtcgcgtcgtttcgtttcgtttttttttttcgcggagttgagattcgttgtattagaatttaggagaggggggagacggtagagatttcgcgggcgcggggcgattttagttgggttttttttatagggatgtcgatttttttggagatatagagtcgagtcggggacgggtggatgggcgttttgacgtttgggcgggcgagtagagtattagtatttttgtttttcggttttttttttcgtcgaggtcggggtcgtagtcgtcgtcggaggatgggcggtcggcgtacggagtagggtcgggagggagtagaagttttcgttaagagtttaggagttggggtagttttggagttttttttgtttttttgttcgcggcggcggaaattttagagtttttattttttttcgggaggattttagggaagaagtagagcggtaggggaagtcgaggagcgagggtgcgacgtggggatggaaggatagtgggaggtatacggaaaaatagaacgaggattttagataggagagacggaagtggagagaggttgggttgaaaggtagggagagttagagattgatagaggcggcgagaaaggaagggagagggagggagggaggagggaggagaaagagggagggaattaggggagagggaagggagtaggcggcggagtcggcgggcgtggggcgaggttaggcgtgtaggcgggagtagcgtgtagagtagcggtcgggttttgttttcgtttcggagttttggttcgggggagggggagaggtcgttagtttggtttatgtttttttttgattttagtgtaatttttttgttgaacgaggtaatcgtggggggggtgtggggtcgtgggaagggggttttttattgggtgggaggagagtttcgttttaagttaggaagggggtacgcgtttgggggagattgtatcgatggggaggtagggaaatcggaggaagtgaggttaggggtggaagaggtatcgggttagagaggagggagcggttagagttggtagttttttagtattgggattggatgagaggagaggattgattgaggagttagaaaaaaaggggttagattataagaagggttttgttaagtttttttagcgtttgtttttgagttttttggtagtttagtagttagaatggtaggggtttttatttggtttagattttaaaaattgttggggaggagtttttaagtttttttagaaggtttagtttttgttttagtttttttatttagtgtttagggattgggatttgtttagttttttggtatatttagaggagaagttagaatatattttgaaattttttaagaaggttttaatatattttagtttttaaatttgattatttaggtttttttttttatgttttgtttttatgatttgggtatttgttagttgttagtttaataatttttttttagaaagaattagtaggaggagttttttttttgattttttattgtttttagttttttttttttatgtttagttatgaaaaagaaaagaggttagggttatatggatattgataggtatatgttttgttataggataagaagttattaagttggtattagaattagagtaggtaggtgtgggtgagaaatgaaaggaatattgggtagtaatttagagatatgagaagaaggagggaagttttgaagttattgtaggatttaggggatgggtttaggtatgaggagtttgaatttattttttggggatggttggtatggtaatatatgttttaggagtagatttagataattttgtcgtaggagattataaggagtgtgaggaaggagtgttgtcgatggtagattcgttgttatttatagttttaggattttttgtgggtggagagagttttaaaaggagaggttaggagagtggatgtagggatgggaagagaaatagttgtttttattattgttttttttattagagttattttttaggagaagagtattttgagggttttattttttgatatttttttaggtttttgaaagaaggaattgaagagaaaggatgaaagagggggatataaggaatattgcgtaattgggtgagggtataaaagtgggtagtgtttgggaatttttaatatagaagaatttagtatatgattaaattttagttggtgttggatttaggagaggagatagtttttttagttataggggttgtaataaagttgtttgttaaatttagtatgaggaaggtgttgggtagggttgttttgggttatttatagtagatagattaaagatgttagtttgaagatgtagtttttttttgttttgttaagataatatcgataagtgatttaggtgggaagttatttggtttgggtgggtttttttttttttatgtatagtgttttttattatagattttattaagttatgttagagttttggatttttgattttttttaagttaaggagggatgagtagattgttgaattttcgggtgtgagaaattgggaaggaaaaggattgagtttagggttaagagtatgggtattaggaggtttttaagtgtaatttttgtttacgtatatttttttcgtggggtataaaggtaggtagttaaaaattaaagaaggaattttgtttaggagatgaaaaaaggaaagagtttaaatgggtggatttttggggaaagtttttttaagataagggttgcggtttttttattttaaattttaatgtttttgtaaaggagattgagtggtgtagagtggtataagtttttttgttaaggggagaatttggttttattttagtgatttcgaggagattggttttttttttttttaattcgagtgtagttaggattttatttataattatttttttatttttattttttggtttttttttttttttttttaggtttatttaaaatagtttttttttgttttagtttttacggatgttttggtattgtttggtataatttttggtagggaagtggggaagggaatttttattttggtaggattaagataaaatttattcgtgtaataggtgtggggaggtttatttagtttacggaaagtttttttttttttaagggttgggtaatatcgtttttgtcgtagcgttttcgtattgagggggtcgggtatttgttggggtaggagttgtcgttttgttattagtttgggggtattaagtttattttttttcgggattattgcggggtttgttttcggagttttcgggacgtacgggtttagattcgttttgttgtcgtttgggatttttttttcgtttgtcgttcgttttcgcgttttttttgttttttacggtttttttatttttttgtttttttcgttttttttttgttttttttttttcggttttttcgatatttgcgttttttttagttttcgttcgggtcgcgtttttttcgcggttttagcgttttttttttttttcgtcgtagttttttgtttttcggcggagtagtttttgggttgtcgagcgtttttgttttcgtattttttttcgtttcgttttttttttgtttggattcgttttgttcgtagttttttttttttttttttttcgtcgttacggtttcgtaggtgttcggggatttattttttatttagtacgggttcgtttttttttttcggtttggttcgggtttttcggtggtcgtcgttttttcgtcgttttcgttttttttcggggagggggttaggtgggcgggtattattgttgtaggagtcggcgttagattttttagtcgcgttcggggtgggatcggttgggtttgggggggtggggtggggggagcggtgatttgagtttcgagtagttggttttcgcggttcgttttttttttcgcgttttttcgttttttgtcgtcgttcgtagggttgcggggttcggtggtatttttcgggcgcggttcgtagtttttgtttttgttttcgggtcgttttcgttttcggcgtcgttcgttttttcgattcggatttttttatgtatgacgatttttacgtgttcgggtttgaggattcggaggcggtgagtgtttacgatgagggtgggggcggggaagttggggtgatattttttttttttttaatttttttttcggtttaggattttgaaaaacgttttagtggtagggtagggtttgtaggggggcgttttaagaacgtggggagatggatttttatgttaagcgttttttagcgatttagatttagattttggggtatcgggtgtgtgtagagagggggtagtataggggaagggtttaagtaggtggttttacggtttaggaaagaggggtgggagaaggtagggttggaggtcgagggtatagaggttttggagagggaatacgttatgtttggagttttaaattttggatttttggggtttgaatataatagttaggagagtcgtcgaggtggttggggaggtagatattttagattttttgtgttttaagtaaacgatatattagggagttgagaggatattagggagttaggggttaatttttttagatagacggattttaaaatttgaggagttttattatttttttttattttttttatttttgcgtattgttttatttttttattttttttttagtttagttttttttttaggttgaaatttgggcgtttagtatatgggtaggttaggtgattgagttttatttattttatagttttttgttgaggttttttttgtagcgggtattttgagtttttgtttagtatggagggtttggaggtgaggttagaggagttgagggtttggggatggagaggaagcgttttgtttagagaaataggtaatcgataaatatttaatttttttttttgtttttattttttgatttattgagataaattagtttattaagtagtgattttcggagtttagatagtagggagagtgtttggaaagatggggtaagaatgcggagtagttttttagttttttggagttgataatttttttttaaatgttttgtaagaaggtttttttaggagtggattattagatggtttggaaggggttttaataggttggagtatttttgggtcggaaagaggagtttatgtttaagtttttttttattatttattgttaggtttaggatagatgaatgttgatgtttagaataggtaattgtttttttttgggattggtttttttttgggtttaattttttatggggtttttggggttaattatattgtcgttagattagattatttttaaggttttggtggatatttttttttgatagttgaagggatagttggtatagtttagggtgttaaggtgagtttgaaaataaatttttttgtggggttggatggttttaggaggttttttttatttttggtgagaaggtaagggttattgtaaggagtagattgatatgtggatggtgttggagggtagtttgttgatttattgtttttttttatttttttttggttttgattatttttttttattttttttttttttgtttggttttttgttttttttgaggttttttttgaagtagtaggagggagattaggttttaaataaatttaacggtttattttttttttttttttttttcgtgttaggtaagagaggagttgtagtttgtttatatatttattaggtaaggggggtattattagggtattgtgttaatttttggtagttttaaagtattgaaattttggttattttggcgtagtagggtataggaaaggtaagattttagattatgtttggtagggtagttttggtttttttaagtaatattggagtattagagatgagtgagtttggaggatttgggagtaatggagagggggttttattttgagtataatttattaaatatttaggaagagattttgtgatttttattttagggtgagaggttaggtaagttagatgttttaggcgttatgattattaaattaggtcgttagcggtgttttatatttgtaattttagtattttgggtggtcgaggtagattatttgaggttaggagttggagattagtttggttaatatggtgaaattttgtgtttattaaaaatataaaaattagtttagtatggtggtatatgtttgtagttttaattatttaggaggttggggtagtagaattgtttgaattcgggaggtagaggttgtagtgagtcgatatcgtattattatattttagtttgggtattatagtgaaattttattttaaaaaaaaaaaaaaaattattaaattaaattaggtatagagatttatgtttataattttaatgttttgggaggttaaggtaggaagatggtttaagtttaggagtttgagattagtttaggtaatatagtaagattttgtttttataaaaaattagtaggtatggtagcgtatgtttgtagtcgtagttatttaggagataggaggatcgtttgagtttaggagtttaagtttgtagtgagttacgattgtgttattatattttagtttgggtgatagagtaagatttgtttttaagtaaataaataaaataataaaaataaagattattaaattgggttgagagtttggagtataggtagaaaaggttagattttttttttagtatagttttgggtttttgggaggtatttaatgtatttgtattaaagcgagtggttatttgttttgttttttgttttttagtttgttggtttttgtttggttgttttagatattaatattttatagaggttttttttgtgttttaagatttttgggaaggaggttttttattttgtgtaaagattatttttggggtttattttttatttattttgttgttatttagttttattttgtttttaggagagatgaggaatagtcggcggattatttttttgtaaaatgaaagattttttttttttgtgttatttttaggtttttggtttattatagatattgtttttagtttaaggttcgagagtttgggttgatttttagttgaatagtttttttgtttacggtagggtaggggtagagggtatggttgatagtaggtatgtgattttgtttttttttttgagagtttggtttttgttgtttttcgtaggtggttatgtttagtgagtttgagagaatgtttttttatttgaggatattttaaagtttttttttttatatatatatatatttttgtatgaattttttatttaggtttattttttttttttgttattggtattttagaattgtgggaagtattatttgaggtttttttttatagagagggaaaattgaggtaggaaacgaaagattttttttttttgatagaggaggaaatttagatattgtaatttttgggtttttgttttaaagtttagcgttttttatttatttgtgttttttttttatggttttgaggttgaattttgtgatcgttaaatgtatttttattgtttaagattttttttatgggtaggatttagagattttttttgtttatgttattttttttttatattttcggggttttgtttcgtagttaggttgtttggtattagtatagtttttttttagggttgatgttttttgggtttgggaaaggattagggagatgtaggttaagtggtaggtgtggtttagttttatttgtatttagggagatagttttgtgtttttggtttgtgttttgtttgttgtttatatttggttagttgttttagtaggtgtggaaggaagaaaagtagggggtggggagagtaaaggggaggtaatttttaggagttggtagttttgtgtttttttttttattttggaagggtaagggtttattatttgggagtttttagagttttgttggagtagggaaagtggaattttagggggtagatggttggatttttatatttaggattggtgttgtgttaattagtattttttgattgttgcggttggttggatttttgataggtattttaaagggatgatgtttaggttgttttgtaggttgttatgaataagagggttgggttttttggatttagaattatttttaatatattatttttagtatattttttttttttcggtttagaggatatgttagaggggagaaaagggaggaaagagagaagtgaaggttttatttaaagttgtagtattaataggtttgggggaggaggggtttagatttttgtatttatggattgggttagtttttttgtagttttagaggtattggggttttttttaggggataggaggggttatagggatttagttatttttttggagatggagaaattgggggtaatagaggtaatattgtaaggtgaggagggtgtttttatggtattttttatgtcggagtttgggagttatagttttttttttaatttagg

SEQ ID NO: 268 - DNA, 9415 bp, Artificial Sequence
  chemically treated genomic DNA (Homo sapiens)
tttgggttgggaaagaggttgtgatttttaggtttcggtatgaaggatgttatggaggtattttttttattttatagtgttgtttttattgtttttagtttttttatttttaaggggatagttgggtttttatggttttttttattttttgagaagggttttagtgtttttgaggttataggaaagttggtttaatttataggtgtaaagatttgggtttttttttttttaagtttattaatattgtagttttgaatagagtttttattttttttttttttttttttttttttttttaatatgttttttgagtcgagggaagggaggtgtgttgaagatgatgtattagagatgattttggatttaggagatttagtttttttgtttatagtagtttgtaaagtagtttggatattatttttttaagatgtttgttaggagtttagttagtcgtaatagttaagagatgttggttggtatagtattagttttgaatgtggggatttagttatttgttttttaagattttattttttttattttaataaggttttgaaggtttttaaatggtgagtttttatttttttagggtgaagaggaggatataaagttgttagtttttagaagttattttttttttgttttttttattttttattttttttttttttatatttgttggggtaattagttaggtgtgggtagtaaataagatatagattaagaatataaagttgtttttttgggtgtaggtgaggttgggttatatttattatttggtttatatttttttagtttttttttaggtttaggggatattagttttagaagaaggttatgttagtgttaggtaatttagttacggagtaggatttcggggatgtggggagggggtaatatgagtaaggagagtttttgagttttgtttataggaaaggttttgggtaatgagggtgtatttgacggttatagagtttagttttaagattatgagggagaggtataaatgagtaagggacgttggattttgagataagagtttagaggttataatgtttgggtttttttttttgttagggaaagggagtttttcgttttttgttttagttttttttttttgtggggagaagttttaagtgatattttttataattttgagatgttagtggtagagagaagggataagtttagataaggggtttatgtaggagtgtgtgtgtgtataggggaaggggttttagaatgtttttaggtagaggaatatttttttaagtttattgggtatgattatttacggaaggtagtagaggttagatttttagagaagaaggtaaaattatatatttgttgttaattatgttttttatttttattttgtcgtgggtaagagggttgtttagttaggggttagtttaggttttcgagttttaggttaaagatagtgtttatagtagattaaaggtttgaagatagtataagggggaaagattttttattttatagaagagtagttcgtcgattgttttttattttttttgagaataaaatgaggttggatggtagtaggataagtgggggatgaattttagaaataatttttgtatagggtgagggattttttttttaggggttttaggatataagagaaatttttgtgggatgttggtgtttgaagtaattagataggggttaatagattgggaggtaggaggtaaggtagatgattattcgttttggtatagatatattgggtattttttagaggtttagaattgtgttaaaagaggagtttgattttttttgtttgtgttttaggtttttagtttaatttagtaatttttatttttattattttatttatttatttagagataggttttgttttgttatttaggttggagtgtagtggtataatcgtagtttattgtaggtttgaatttttgggtttaagcgatttttttgttttttgagtagttacgattataggtatgcgttattatgtttattagttttttgtagagataggattttgttatgttgtttaggttggttttaaatttttgggtttaagttatttttttattttagttttttaaagtattgggattataggtatgagtttttatgtttggtttaatttagtaattttttttttttttttgagatggagttttattgtgatgtttaggttggaatgtaatggtgcgatgtcggtttattgtaatttttgtttttcgggtttaagtaattttattgttttagttttttgagtagttgggattataggtatgtgttattatgttgggttaatttttatatttttagtagatatagggttttattatattggttaggttggtttttaatttttgattttaagtgatttatttcggttatttaaagtgttgggattataggtgtgaggtatcgttggcggtttaatttagtaattataacgtttgaggtatttggtttatttgattttttattttgggatgggaattataggatttttttttaaatatttaatgagttgtgtttagaatggaattttttttttattatttttaagttttttaggtttatttatttttagtgttttagtattatttggggaggttagggttgttttgttaagtatgatttagggttttattttttttgtattttgttacgttaaaatagttagagttttagtattttggagttgttaggagttggtatagtgttttggtggtgttttttttgtttagtgagtgtgtgggtaggttgtagttttttttttgtttggtacgggggaaggagaggagggagatgagtcgttggatttatttagagtttgattttttttttattgttttagagggggttttagggagagtaaggagttaggtaagagaaagggaagtgggggagggtgattagagttagagagagatgggagggagtaatgggttagtaggttgttttttaatattatttatatgttagtttgttttttgtaatagtttttgtttttttattagggatgggaagaattttttagggttatttagttttatagagaggtttgtttttaagtttattttggtattttgggttatattagttgtttttttaattgttagaaagaggtgtttattagagttttgaaaatgatttgatttagcggtaatgtaattagttttagaggttttatggagaattgggtttagaaggagattagttttagaaaaggatagttgtttattttgaatattagtatttatttattttgggtttggtagtaagtgatgggagaagatttgaatatgaattttttttttcgatttaggggtgttttaatttattggggttttttttaagttatttagtggtttatttttaaggaggtttttttataggatatttgagggaaagttgttagttttaaggggttgagaagttgtttcgtatttttgttttatttttttaggtattttttttgttgtttgagtttcgggaattattgtttaatgagttgatttgttttagtgggttaggagataaaagtaaagaggagaattaaatatttatcggttgtttgtttttttgagtaaagcgttttttttttatttttaggtttttagtttttttggttttatttttaggttttttatgttgggtaagagtttaggatgttcgttgtagaggaagttttagtagggggttgtggaatagatggggtttagttatttggtttatttatgtgttgggcgtttaggttttagtttgggagagaaattgggttagagaaagggtgaggagatgaggtaatgcgtagagatggagggggtggaagggaataatggagttttttaagttttaggattcgtttgtttgaagaggttggtttttggttttttgatgtttttttagttttttgatgtgtcgtttgtttgaggtataagaggtttagaatgtttgtttttttaattatttcggcggtttttttagttgttgtgtttagattttagaaatttagaatttggaattttagatatggcgtgttttttttttagagtttttgtgttttcggtttttagttttgtttttttttattttttttttttgggtcgtggagttatttgtttgagttttttttttatattgttttttttttgtatatattcgatgttttagggtttgagtttgggtcgttggggaacgtttggtatgaaaatttatttttttacgtttttagagcgtttttttataaattttgttttgttattgaggcgttttttaaagttttgaatcggggaaagggttgaagggagaggaggtgttattttaattttttcgtttttatttttatcgtgggtatttatcgttttcgagtttttaaattcgggtacgtaggagtcgttatatatgggggagttcgggtcgggggagcgagcggcgtcgggggcgggagcggttcggaggtaggggtaaggattgcgggtcgcgttcgggagatgttatcgagtttcgtagttttgcgggcggcggtagggagcgagagagcgcgaaggagggagcgagtcgcgaagattagttgttcggagtttagattatcgttttttttattttatttttttaaatttagtcggttttatttcgagcgcggttgaggaatttggcgtcggtttttataataatagtgttcgtttatttgatttttttttcgggagaaggcgggggcggcgagggggcggcggttatcggggagttcgggttaggtcgggagaggggaacgaattcgtgttaggtggaaggtgggttttcgagtatttacggggtcgtggcggcggggaggaaggggaggagaggttgcgggtagggcggatttaggtagggaggaggcggggcgaggagagatgcggagatagagacgttcggtaatttaggaattatttcgtcgggaaataaagggttgcggcgggggagggagggggcgttgagatcgcgagggagacgcgattcgggcggagattggagagggcgtaggtgtcgaggaaatcggagagagagaggtagagggaggacggagaggataggaaaatggggagatcgtgggagatagaagaggcgcgggaacgagcggtagacgggggaggggttttaggcgatagtagggcgggtttgggttcgtgcgtttcggaggtttcgaaagtaaatttcgtagtggtttcggggaggaatgggtttggtgtttttaggttaatgataggacggtagtttttgttttaataggtgttcggtttttttagtacggggacgttgcggtaaaggcggtgttgtttaatttttgagaaggggggaatttttcgtgagttgggtaggtttttttatatttgttgtacggatagattttgttttagttttgttaggatgggggtttttttttttatttttttgttaaggattgtgttagatagtgttaaggtattcgtgggaattggggtagaaaggggttgttttaggtgagtttaaagggaaggggaaagaagttagagggtggaggtagggggatagttgtgggtgggattttggttatattcgggttgggagaggaaagggttagttttttcggagttattagggtaaggttagattttttttttagtagaagggtttgtattattttgtattatttagttttttttataggagtattgagatttggggtaagagagtcgtagtttttattttgaggaaattttttttaaagatttatttatttgagtttttttttttttttattttttgagtaaaattttttttttgatttttgattgtttatttttgtgttttacgaggaggatgtgcgtagataggggttatatttggaggttttttggtgtttatgtttttggttttgagtttagttttttttttttttaattttttatattcgggagtttagtaatttgtttatttttttttggtttgaggagaattagaaatttaaaattttgatatggtttagtaagatttatggtagaaagtattgtgtatgggagagagaaagtttatttaaattaagtggttttttatttgggttatttatcggtgttattttggtaagataaagaagagttgtatttttagattgatatttttagtttgtttattgtgggtggtttagagtagttttgtttagtattttttttatgttgggtttgataaataattttgttgtagtttttgtggttgaagggattgtttttttttttgagtttagtattaattggggtttggttatatattggatttttttgtattggaagtttttagatattgtttatttttgtgtttttatttagttacgtagtattttttgtattttttttttttattttttttttttaatttttttttttaggggtttggagaggtgttaaagagtaagatttttaaggtgttttttttttgggagatggttttagtgaagaaagtagtggtggaggtagttgtttttttttttatttttgtatttatttttttggtttttttttttgggattttttttatttatagaaggttttggggttgtaggtaatagcggatttgttatcggtagtattttttttttatattttttgtaattttttgcgataaggttgtttaagtttgtttttgaggtatgtgttgttatgttaattatttttaggagatgggtttaagttttttatatttgggtttattttttgggttttgtagtagttttagagtttttttttttttttttatatttttgggttgttatttaatgttttttttattttttatttatatttgtttattttagttttaatattaatttggtgattttttgttttgtgataggatatgtgtttgttagtgtttatgtagttttaatttttttttttttttatggttgggtataaagggagagagttgagggtaataaaggattaggggagaggttttttttgttgattttttttaggagagagttgttagattggtagttggtaggtatttaagttatagaagtaagatataagaggaaaagtttgaataattaggtttgggagttggaatatattgaaatttttttgggaggttttagaatatattttagttttttttttaagtgtattaggaagttgggtagattttagtttttgggtattgaatggggaaattgagatagaagttaggttttttgggaagatttaaagatttttttttagtagtttttaagatttggattaggtggaggtttttattattttggttgttaggttgttagggaatttagggataggcgttaggggagtttggtagagttttttttgtaatttagtttttttttttttggttttttagttagttttttttttttatttaattttagtattaggaagttgttagttttggtcgtttttttttttttaattcggtgttttttttatttttggttttatttttttcggtttttttgtttttttatcggtgtagttttttttaaacgcgtgttttttttttagtttggagcggagttttttttttatttagtgggaaattttttttttacgattttatattttttttacggttatttcgtttagtaggaaggttgtattggagttagaaaaagatatagattaggttagcggtttttttttttttttcgggttagggtttcgaggcgggagtaaaattcggtcgttgttttgtacgttgttttcgtttgtacgtttggtttcgttttacgttcgtcggtttcgtcgtttgttttttttttttttttttggttttttttttttttttttttttttttttttttttttttttttttttttttttcgtcgtttttgttagtttttggttttttttgttttttagtttagtttttttttattttcgttttttttgtttaaggttttcgttttgttttttcgtgtgttttttattgtttttttatttttacgtcgtattttcgtttttcggttttttttgtcgttttgttttttttttaaagttttttcgagaaagagtagggattttggagttttcgtcgtcgcgggtagaagggtaggaagagttttagggttgttttagtttttgagtttttggcggaagtttttgttttttttcggttttgtttcgtgcgtcggtcgtttatttttcggcggcggttgcgatttcgatttcggcgggggaaaggatcgaaaagtaagagtgttggtgttttgttcgttcgtttaagcgttaaggcgtttatttattcgttttcggttcggttttgtgtttttagagggatcggtatttttgtggagagagtttagttgggatcgtttcgcgttcgcggagtttttgtcgtttttttttttttttgggttttggtgtagcgggttttagtttcgcgaaggggaagggcgaggcgaagcgacgcggttttttttcgattcgttgtaggttttttggttcgttggttcggcggttatacgcgttttttaggtggcggtatcgtttggtgttcggtttcggggtcgtagggttcggttttgttagtaggcggcgttgtttaggttagagtaggggggacgtatttcggatttagatatcgtttaagtttaggacgaattttttttttttttttttttttaggaattgtagttttagttcgagatttttagtaggagattttaggttgcgttttatttatttttatttcgtggggttttttcgagatattcgcgttttttcgggattttagttcgtttttatttttattttggtttcgaggggcgttttagttaagtcgggtagcgttttggtcgggattgggtagtagggagtatagagtcgcgggatcgtttttcgggttagtatttttttcgtttttttttgcgggtgcgttaaataggataagtttaagttttggcgggggaagggggagcgggggtgtagttttagttggttttttttttggatttttttgagcggatagatcgtttattggtttttttatatttttaacgattttaggttggatttttttttagattaaagacggcgtttggggcggggagagacggatttttttttatggagatagatatacgttgatttcgattgatttaggtttttaatttttttttagtattaattagaacgtttttttttttttagtggagggcgttttattttttttttcggttttttttttaatttattttttttgggagttttcgggatttttttttttaatttttttattttcgggatttcgggagattgtttttttttttttgtttagttgattttttatttgtttttatttttgagggaggtaagttgggggagagtaaattttttttttatttttttttttcgaggttggatttaatttgga

SEQ ID NO: 269 - DNA, 6104 bp, Artificial Sequence
  chemically treated genomic DNA (Homo sapiens)
tagttttgaagtaggtagatatgtttatatttttttttgagttagtgtttggatttaggggattagattttttatttgatatggtagagagataagttatgttttaggtttttaaaaggagtttggaaaatataattaatttaagttaaatatttttattatttttttgtatatataataaagataaaaatatttattttattaaattgttgagagtaagaaagataatatatatatagtgtttggtatacggatggaatttagttgatggtagttataatatttataatattttttttttgttttaatttaatatgatttatatgattttttatatttattgtatatgtaatattttttagataattttatatttaggttattagtaaaatattgatattttttttagtatttatatagatgttttttttttaaagtttttagtaaaatttttattggggaattttagttgttttttatttttttttttttttatttttatttttatattaaaggtttttatttttaaggtatataatatgatattttgatatatgtatattttgtgaaatgattgtaataattaagttaattaatatattattattttatatagttttttgtgtgtgtgtgtgtgtgtgtgcgtttagagtttttgagatttattttttttgtaaattttaagtatatgttaattatagttattaggttgtatattaggtttttagaatttatttattttataattgaaaggttgtattttttaattagtattttttttttatttttaatcgtagttttaaataattattattttaatttttgttattgagttcgatttgttttttgagattttatatataagtgagattatgtattacgtgtttttttgtgttttatttattttgtgtgttataatattttttaggtttagttatgttggtataaatgataatattttttttttttgaataatattgttgattaatattttattgtgtgtgtgtgataaatatatattatattttttttaataatttatttattaatggatatttaggttgtttttgtattttggttattgtgaatttcgttgtttttttggtagttatttttgtatttttttttttagaagtagttttattgtagtttaaaagtgttttaggaaaatgatttagaagtaattattttttttggtatgttttttagtaaatacgatgatggaaagttttgatttttgtttttttttaaatagtgtaatcgatttttagttgggattttttttagttaatttgatagttttacgtttttattaggttgaagaaaatgtatgtgttgtgggttgttgtattattgttgttggtggtgttgttgttattgttgagattttgtggttgagtttatattataaaggaattgtagagtagtaataaatttaatttgagttttgaatttaagtttttaggtgtgatttttttaattacgtggaaatttacgtaagaatttttaattagattttatgtttatttttattttttaagtaaagggtataggaatttggtttaaacgaatgggaataaatattatagttagattttattggagtgttgtaaaaatgtttttttttaaaattagattgttttaaaattgattttggtttttagatttttaagttaggaagtaagatagtaaaaattaagggttaaatagttaagcgattatttttttaaaattagtattttttttggcgattttcgttagattatgttttgtttagtattgaaatttagagaagttttaggaatagcgggatgaaatttaagtgattcgtttacgggaagttttatttttttttcgttcgtttagtaaattcgggatgggtttagagaatgatttcgtattttgtattagaagattttagtttttagagagaattttagacgaaatttttatttttttgttttatttttgaaaatttttatttgggaatcgatttgttgtgataaataaaatgggaggagtttggttgaatagtttgtggatttcggaaagtaaagcgaaatgtcgttttaattaggttcgaattttttgtaagttattttgtgaaattggtgaatttgttagaatgaatttttatttatttaattttggcggatcgtttattagggtgtttggtatggtgttaattgttggagaaaatgatttttaaataaaaacgaaaaaaattttcggtttttagtaaggagttaggtaatttttataaatttaaggagtgtttgagaggtgagttaatgatcgttttttttgttttaaagagatagatttttatagttagttttgaaattgttcggggttatattagcgttttttggacgtagattttggttagcgttttacggtattagtttttgatttgtagttgttaaagatttgatagtggggagtacgtgtttattttgaaggttgaagatatatattatagttaggagtagaatttcgattttttaaagtgatatggttataaaatttgcgtttattggtttttattttgcggttatcgtggtacgggcgaaagttatgaattttttttttaggaaaatatatattatagatatatatatttataaacggttttaggaggtttttatgttagaaatttttggttttggaaaaaaattattttcgttgaagtatgtggtagttgagcgtaaatatttttttgttatagttttagtggtagaggtttaagtattacgttttatttagtgttcgtattgcggttttcgtaattttttaagtagttttgtatcgaaaatttaggtcggagattcgagtttaaattgttgaaaagttttaaggtttcggatagggttttagtaggggttatttttttttaggattcggggtttattgtgtttaagattcgttatttaagttttgttttgcgcgtacgttgtttgttttacgttttgcgttgatacgcgtcggtgttttttcgggttagttttagtttcgggttttgtggtcgttttgtcggcgattttgcggagagcgagttttagatatttagtttttagtttcgagttgttattttttcgttgtagttaagaaggaggagattaattaagggtattttagaagttaggcgttttcgttgttttttttgagtacggaggttattaattttttagggggaagagatgtagcgcgaggtaggggtgtcgtgttaagaaatttcgacgtttttggggattgaggataaaggtgcggatacgatttcggggtatttggagtttcgtgattcgcgttacggacggtatatttaggggttaatttttgttttgttttaaagaattttaagttagagtttttgttttcgtttatagtttcgggatgtcgttgttgcgtttatcgtataggtagcgttcggatcggttgtagtagatcgcgcgttgcgcgttttatcgggagatggtggagacgttgaaaagttttttttttgttattttggacgttgtgggcggtaagcgttttagtttttatttttgttgagttgaacgtttaggtatagtggaattgaaattcggttttgcgggatgtgagagttgttgaggttacgcgtaattgggtgtgatggagggcgtttgttcgtgatgtgtgtaggtttgatgtaagtaggttatcgtcgtgcgagtgtgtggatgcgatcgttcgagagattcggaggtaggtttgggatacgtttgagtgaatattttaggatatttttttggttagtatttgttttttagtgtttgtgatttagagtgggtatatgttgggagatagtaatgggtttgggtgtgtgtaaatgagtgtgatcggaagcgagtgtgagtttgatttaggtagggattatatagtattgttatatttgtttgttttttagtagaggattgaagtgcgggggtgggggtacggggtcggaatagaatgtttttgggatattttggtaaatagtagtcggaagtaaaggggtagttgtgtaaacggtttaggtaggtgatggatggtagggtaggaagggggaggtttagaggtttggatggaggttttcgtatttgtattttgtaatttattttttaggtttagtaggttatcggttttttttttatatatgtaatggatttgaagagtatttcgggatagttcggggagatggagattcggaaagtatttatggagattttatagaattttttgtgcggattaggaaatttttgtagatttttgtttatttgaggtttaggcgttgggttgttttttataatatttttttaagatgagattgtggtttttattttaaagatgagtatattgagtttttgtgaagttatttgtttatgattatataattaggaattgggttaattgtaattgaatttttgtttaataaagtttttgtttttagtttcgttttttgttttttacgagttttggttttttgtgggtaatattagttattggagttagattttttgggtttagaatttatttttaggggtattaatttttaaaattttatttgggtaggggtttgggattagagttggaagagtttttataattttggatttttttcgttaaatcgtgaaattaggggtggagtggggcgagggtttaaaattaggtcggattgagaggtgaaatttattatgacgttaaattgtttttaaattttcgtttattttaagggcgttatttgttggtgtttttattattttttattatttttattaatgattttaatgtaaatataagtgggacggttttgttggattttttaggttttggaagtatgagggtgacgtaatttaggggtaaaggattttttcgtttattggttgttgtgtattggcggaattttttcgatttatagcggcgggaataagagtagtcgttggcgttgggaggtattagagatattgtttagtttaagtgtcgtcgtcgtttttatagggttttgttggacgtcgtcgtcgtcgttgttatcgtttttgatttaagttatttttcgttaggtgagtttcgagattttggtttaggtatatgtttttttttttttttttttttattcgttatttttttatttttttttttttttttttttttttttcgttagtttttttattagatagtttttgttagttcgcgatttatattaggttcgtgttttaggttggatcggatagttttaatttttcggttcgttttttttgttcggttgcggattttagttttattttttcgtattgtatataggtttaggttagtttcgggatatttaggttttttagggatcgcgtatagagtttgaggtaagagaaatttttcgtagacggtgcgattagggacggcgtttggagtttagtagttttagggaaattggtttagaatttggaatagagcggatgggtggtaaataggtacgacgattgagggataagtagttttaaattgtaagttttagttataggttttgggagtaaagagagaaagttttgggttttaatttaagagtaaaatttggtttttgtaggggattgaggtgttagtaggcggagtttaggttgagtattaaaattgatttttttattttttagattttaattgtagagataatttttgtggatagattttattttttttattaaggtgtatgtaaaagttttagaagaggaggatagttttgggtttttttatgggattagtttttgtgataggggtttgggagtatgttttttatagagatttggttaataggtttatatgtatttgtgtggttttggggagaagggtaggattgagattttttttatttagttttttttttaggatcgtttttttagttttattagattgtgtatgttataggtttattgaattttttagaagtttattgtgttgatgaggaaataaaaaagaagagaaatataatgattagtttgaagttataaagttagagcgttagaagtaagatagaaaattaggataggagttaaggtttgtgggtttttagaatttcgaattggcgtaggtggtttattttattttttttttgtaga

SEQ ID NO: 270 - DNA, 6104 bp, Artificial Sequence
  chemically treated genomic DNA (Homo sapiens)
tttgtaagggaagaatgagataaattatttgcgttagttcgaagttttaggagtttatagattttggtttttattttggttttttgttttgtttttaacgttttggttttgtggttttagattggttattatatttttttttttttttgtttttttattagtatagtggatttttgggaggtttagtgggtttgtagtatgtatagtttgatagagttggaggagcgattttagagggagagttgagtgggggaggttttagttttatttttttttttaaagttatatagatatatataaatttgttagttaggtttttgtggaggatatgtttttaggtttttgttatagaagttgattttataaggaaatttagagttgttttttttttttggggtttttgtatatattttggtgggaggggtgggatttatttatagagattatttttgtaattggaatttgagaaataaaagaattaattttagtgtttagtttaagtttcgtttgttggtattttagttttttgtaggaattaagttttatttttaaattgggatttaagattttttttttttgtttttagagtttgtgattggggtttgtagtttagggttgtttgttttttagtcgtcgtgtttatttgttatttattcgttttgttttaggttttgaattaatttttttgggattgttgggttttagacgtcgtttttgatcgtatcgtttgcggaaagttttttttgttttaggttttgtgcgcggtttttggggagtttgagtgtttcgagattggtttaagtttgtgtgtagtgcgagagagtaagattggagttcgtagtcgagtaggaagagcgagtcgggggattgagattgttcgatttaatttagggtacgagtttggtataaatcgcggattaatagagattatttgatgaagagattaacggagagagagggagaggaggaaagggagtgagaaaatgacgaatggagggagagggagggagagatatatatttgagttaggatttcggggtttatttggcgggaggtggtttggattagaggcggtggtagcggcggcggcggcgtttagtagagttttgtggaagcggcggcgatatttgggttgggtagtgtttttgatgttttttagcgttagcgattgtttttattttcgtcgttgtgggtcgggaaagtttcgttagtgtatagtaattaatgggcggaggggttttttgtttttgggttgcgttatttttatgtttttagaatttggaggatttagtaggatcgttttatttgtatttgtattgaggttattgatggaaatggtgggggatggtgggggtattaataagtaacgtttttaaagtgagcgggaatttgagggtagtttgacgttatggtgaattttattttttagttcggtttggttttgaattttcgttttattttatttttggttttacgatttggcggaaagggtttaggattgtagggatttttttaattttgattttagatttttgtttaagtgagattttaaaggttaatgtttttaagggtgggttttgggtttaagaaatttgattttagtagttggtattatttatagagggttagggttcgtgggaaataagagacggagttgggagtaagaattttgttagataggagtttaattatagttggtttaatttttggttgtgtgattatgggtaagtaattttatagaggtttagtgtatttatttttgaaatggggattataattttattttgaaggaatattgtgagaaatagtttagcgtttgggttttagataggtagggatttataagagttttttggttcgtataggggattttgtaagatttttatggatatttttcgaatttttattttttcggattgtttcggggtattttttagatttattatatgtgtgaggagggggtcgatgatttgttgggtttgaggggtgagttgtaaggtatagatgcggaagtttttatttagatttttggatttttttttttttattttgttatttattatttgtttgagtcgtttgtatagttgtttttttgttttcggttgttgtttgttaagatgttttagagatattttatttcggtttcgtatttttattttcgtattttagttttttattaaagagtaggtaggtgtgatagtgttgtgtggtttttgtttagattaagtttatattcgttttcggttatatttatttatatatatttaaatttattattgttttttaatatgtgtttattttgaattatagatattaaaaaatagatattggttagaagagtattttgaggtgtttatttaaacgtgttttaagtttgttttcgagtttttcgggcggtcgtatttatatattcgtacgacgatgatttgtttgtattaaatttgtatatattacgaataggcgttttttattatatttaattacgcgtgattttaatagtttttatatttcgtagaatcgggttttagttttattgtgtttgagcgtttagtttagtagaggtagggattaaggcgtttgtcgtttatagcgtttagagtggtaagaaagaagttttttagcgtttttattatttttcggtggaacgcgtagcgcgcgatttgttgtagtcggttcgggcgttgtttgtgcggtgagcgtagtagcggtatttcggggttgtgggcggaggtaaggattttagtttgaggttttttgaggtagagtagaaattagtttttaggtgtgtcgttcgtggcgcgagttacggaattttaggtatttcggggtcgtgttcgtatttttgtttttagtttttagaagcgtcgaaattttttagtacgatatttttgtttcgcgttatattttttttttttagggggttggtggttttcgtgtttaaaggaggtagcgggaacgtttaatttttaagatgtttttaattgatttttttttttttaattatagcgagggaataataattcggggttggggattgggtatttaagattcgtttttcgtagggtcgtcggtagggcggttataggattcgggattggaattggttcgggaggatatcggcgcgtgttagcgtagagcgtgaaataggtaacgtgcgcgtagagtagggtttggatggcggattttgggtataatgagtttcggattttgaaggaagataatttttgttgagattttgttcggagttttggagttttttagtagtttaggttcggattttcggtttgggttttcggtgtagagttgtttgaagagttgcgaaggtcgtagtgcgggtattgagtggggcgtagtgtttgggtttttgttattggggttgtagtagaagggtatttgcgtttagttattatatattttagcggaaatgatttttttttaagattagaggtttttaatataagaattttttgaaatcgtttgtaagtgtgtgtgtttgtgatgtgtgtttttttaaagagagagtttatagttttcgttcgtgttacggtgatcgtaaaatgaaagttagtagacgtagattttgtggttatgttattttgaggggtcggaattttatttttgattgtggtgtgtgtttttagtttttagaatagatacgtattttttattattaaatttttggtagttataaattaaaggttggtgtcgtggggcgttaattagagtttgcgtttagagggcgttagtgtagtttcgagtagttttaagattgattgtaaaagtttgtttttttaggataggagggacggttattaatttattttttaagtattttttgagtttgtaggaattgtttggttttttgttgggggtcgaaagtttttttcgtttttgtttgaaaattattttttttagtaattagtattatgttaggtattttagtagacgattcgttaaagttaaatgaatgaaaatttattttggtaaatttattagttttataaggtagtttgtagaaaattcggatttagttagagcggtatttcgttttgtttttcgaaatttataaattatttagttagattttttttattttatttgttatagtaagtcggtttttaggtagaagtttttaggaatgaggtagggaagtaaggatttcgtttagggttttttttaaagattgagattttttggtgtaaaatgcgaagttattttttgagtttatttcggatttattgagcgagcgaaggaagggtagagtttttcgtgagcggattatttagattttatttcgttatttttggaatttttttgagttttagtattaaatagagtatggtttaacggaagtcgttaaggaaaatgttgattttaaaaaaatagtcgtttgattatttgatttttgatttttattgttttattttttaatttaaaaatttggaaattagggttagttttgaaataatttgattttggaaaaaaatatttttataatattttaataaagtttaattgtaatgtttgtttttattcgtttagattagatttttgtattttttgtttaagaaataaaaataaatatgaagtttggttgaaaatttttacgtgaatttttacgtgattaaaaaagttatatttgaaggtttgagtttagagtttaagttaaatttattattgttttataatttttttataatatggatttaattataaaattttagtagtagtaatagtattattagtaatagtaatataatagtttataatatatatattttttttagtttggtagaaacgtggagttattaaattaattggaaaaaattttaattgaaaatcgattgtattgtttaaagaagggtagaaattaaagttttttattatcgtgtttattgaagaatatgttaagagaagtagttgtttttgaattatttttttaagatatttttagattgtagtaaagttgtttttggggaagggagtatagaaatggttgttaaagagatagcgagatttataataattaagatatagaaatagtttaagtgtttattgatgaatgaattattaaagaaaatgtggtgtgtgtttattatatatatataatggaatattagttagtagtattatttagaagaaggaaatattgttatttgtgttaatatggttgaatttggggaatattatgatatataaaataagtgaggtatagaaagatacgtaatatatgattttatttatatgtagaattttaaaaaataagtcgaatttagtaataaaggttagaatggtgattatttggggttgcggttgggggtaaaagagaaatattagttaaaggatataattttttagttataagatgagtaagttttggagatttaatatatagtttggtgattatagttaatatatgtttgaaatttgtaaagagagtagattttaagagttttaagcgtatatatatatatatatatataggaaattatgtgaggtaatgatatgttaattaatttgattgttgtaattattttataaagtatatatgtattaaaatattatattgtatattttaaaaataaaaatttttaatatggaaataaaagtgaaaaaaaaaaagagtgagagatagttgaaattttttagtgggaattttgttgaagattttagaagaggggtatttgtataaatattgaagaggatattaatgttttattaataatttagatatagaattatttaaaagatgttgtatgtgtagtaagtatgaaaagttatataaattatattaaattgaaataaagaaaagatattataaatattataattattattaattaagttttattcgtgtgttaggtattgtgtgtatattattttttttatttttaatagtttaataagatagatatttttatttttgttgtatatgtaagggaatagtaagagtatttggtttgaattaattatattttttaggttttttttgaggatttgaaatatagtttatttttttgttatgttaggtaagaggtttggttttttggatttaggtattgatttagaggaagatatgggtatgtttgtttgttttagggtta

SEQ ID NO: 271 - DNA, 12507 bp, Artificial Sequence
  chemically treated genomic DNA (Homo sapiens)
tgatgggtatttgggttggttttatgatattgttattgtaaatagtgttgtaataaatatacgtgtgtatgtgtttttatagttgaatgatttgtatttttttgggtatatatttagtaatgggattgttgggttaaatggtatttttggttttagatttttgaggaattgttatattattttttataatgattgaattaatttatatttttattaatagtataaaagtattttttattttttatagttttattagtatttatggttttttgattttttaataattattattttgatcggtgtgatatggtattttattgtggttttgatttatatttttgtaatgattagtgatgttgagttttattttatgtttgttggttgtgtaaatgtttttttttgagaagtgtttatattttttttttattttttgatggggttgtttgttttttttttgtaaatttgtttaaattttttgtaaattttggatattagatttttgttagttaggtagattgtaaaaatttttttttattttgtagattgttggtttattttgatgatagttttttttgttgcgtagaagttttttagtttagttagattttatttgttaattttggtttttgttgtaattgtttttggtatttttgttatgaagtttttgtttatgtttatgttttgaatggtattgtttaggtttttttttagagtttttatggtttgtggtttttatttaagaatttaatttattttgagttaatttttgtataaggtgtaaggaagaggtttatttttagttttttgtatatggttagttagtttttttagtattatttattgaataggaaattttttttttattgtttgtatttgttaggtttgttgaagattagatagttgtagatgtgtggtgttatttttgaggtttttgttttgttttattggtttatatgtttgttttggtattagtgttatgttgttttggttattgtagttttatagtatagtttgaagttaggtagtgtgatgtttttagttttgttttttttgtttaggattgttttggttatataggtttttttttgattttatacgaaatttaaagtagttttttttaattttttgaaaaatgttaatggtagtttgatgggaatagtattgaatttataaattattttgagtagtatggttatttttacgatatcgattttttttatttatgaggatggaatgtttttttatttgtttgtgtaattttttatttttttgagtagtgatttgtagttttttttgaagaggttttttatatttttttttagttgtatttttgggtattttattttttttgtaatgattgtgaattggagtttatttgtgatttggttttttgtttgtttattgttggattaaaggaatgtttgtaatttttgtatattgattttttattttgcgattttgttgaagttattttttagtttaaggagttttggggttgagatgatggggtattttaaatataaaattatgttgtttgtaaatatagataatttgattttttttatttttatttgaatattttttatttattttttttgtttgattattgttttggttagaatttttaatattatgttgaataggagtagtgagagagggtatttttgtttatgttggtttttaaagggaatgtttttaattatttttatttaatgtgatattggttgtggatttgttataaatagtttttattttgagatatgttttattaatatttagtttattgaagtttttaatataaagggatgttgttttttattaaaggttttttttgtatttattgagataattatgtggtttttgttttgggttttgtttatgtgacggattatatttattgatttgcgtatgttgaattagatttgtattttaggatgaagtcgatttgattatggtggatacgttttttgatgtttttttggatttagtttgttagtattttattgaggatttttgtattaatgtttattagggatattggtttgaagtgttttttttttgttgtgtttttgttcggatttggtattaggatgatgttggttttataaaatgaattagggaggagttttttttttttaattttttagaatagttttagaagaaatggtattagtttttttttgtaattttggtagaatttagttgtggatttatttggttttggatattttttggttggtaggttattaattattgttttaattttagaatttgttattggtttatttagggttttaatttttttttggtttagttttgggaggttattaggaatttattaattttttttagattttttagtttatttgtgtagaggtgtttatagtattttttgatggtaatttgtatttttgtggggttagtgatgatatttttttttttatattttattgtgtttatttggtgtttttttttttttttttttattagtttagttagtggtttatttattttttaaatttttttaaaaaattagtttttggttttattgatttttttggagggttttttgggtttttatgttttttagttttgttttgtttttagttattttttgttttatgttagtttttggattagtttgtttttgtttttttagtttttttaattgtgatattagggtgtcgatttgagatttttgtagttttgtgatgtgtgtatttagtgttataaattttttttttaatattgttttaattgtgttttagagattttggtatattgtttttttgtttttattggtttttaagaattttttgatttttgtttgaattttattatttatttaggagttatttgggagtaggttgtttagtttttatgtaattgtgtggttttgaatgtgttttttagttttgagttttaatttgattgtattgtggtttgagagattgtttgttatgattttagtttttttgtttttgttgaggaatgttttatttttaattatgtggtcgattttagaataagttttatgtggtattgagaagaatgtatattttgttgatttgggttggagagttttgtagatgtttattaggtttatttgatatagagttgagtttaagttttgaatatttttgttaattttttgttttattgatttttttaatattggtagtagaatgttaaagttttttattattattgtgtgggagtttgagtatttttgtaagtttttaagaatttattttatgaatttgggtgtttttgtatagggtgtatatatatttagagtagttagtttttgttgaattgttttttttattattatgtaaggttttttttgtttttttttttattttgttggtttaaagtttgttttgttagagattaggattgtaatttatgttttttttttttttttttttttttttatttgtttggtaaatttttttttatttttttgttttgaatttatgtgtgtttttgtatatgaaatggattttttgaatatagtatattaatgggttttgattttttatttaatttgttagtttgtgttttttaattggggtatttagtttatttatatttaaggttagtatttttatgtgtgaatttgatttattattatgatgttatttggttattttgtataatagttgatgtagtttttatatagtgttattggttttatattttggtgtgtttttgtagtggttggtattggttttttttttttatatttagtgttttttttaggagtttttgtaaggtagattaaatggtaataaaattttttagtatttgtttgtttagaaatgattttatttttttttcgtttatgaagtttagtttggttgaatattaaattttgggttgaaaatttttttttttaagaatgttgaatattggtttttaattttttttagtttgtagagtttttgttgagaggttttttgttagtttgaagggttttgttttgtaggttattttgtttttttttttggttgtttttaatatttttttatttattttaattttggagaatttgatgattatgtgttttggggttgatttttttatgaaatattttagtggtgttttttgtattttttgaatttgtatgttggttagttttgttatgttggggaagtttttttggataaaggataggtaaattttatgggtaatatagtagatatagtgtaataggaatttattagttaagatatagttataattatttatttttagttggaatgtaggttttatataatttttattgatgaaaagaaatatatgtattttttaattgtttaattttttgttaagtttttttgtgtaaaattatttgtagagttatgaaaaattatttgatatttgtgattaagtagtttgtttggatgattatgttttttagtatgaatggtgagttgttaaatgatatgtttaattattgttatggaagaaatttgtttttattagtaatttgaagtttaaagaaatatttataggaaagaaaattatttaaagttttaaataaggttatttttagagttggttttagattatttagagggtatgatgattaattttttataaattatagattttatttgtttatgtttagtgaggtgattttttggtggatatttttattgtaatttttagtagttttattaatgatatatgttaattgaagttgatatgggttgtttttgtttttttggaatgtttttatttttgttttaatatgtaaaggtagtgttagaattttttaataggagggttttaggtataataatttagttgataggaaaagtaatggaatttttattgtatttgtattataagtatattgtttttttttacgtgtgttttttagggtgttttgggatgttgattttttttaagttaaatagaaaaaatgaaaatgaaatgttatagttaatattagagatatattaattttagtttttgttgtttttatatttttttaggataaagagatttttaaaaattaaaaatgaggtttatatttataagtcggtgtttggtattgtttttttttttaaatgtaagtaaaataaaagtatttaaagttatgttaatgaagaatgttgaataaggaggaatgttttgagtgtgatttaattagtatttgtaagggtaggtattggtttttagaagtcgaaattaagttttttaaagttattattttgtttaatattttgttaataaattttttttttgaattgtttttaatttaaattagtgtttgtggtttatttagaaatttgagttttgtttataaaattttagtattaattttagatatttttatattattttagaaattaatatagttggtaaataatatttttaggtaaaatgtttttatgttgaaaaaattatgttttgaattttagtttaaaattatgatttgaatgatagtttttgggttgtttaatttttttaaaatatttgggttgtttaatttttttaaaatttttgaatttttttagtttggttattgattttaaatgtattttttattaaaaattgattatggaaattttaagtttttatatattattattattttataattttttttttaattttttaaattatgtttagtttgtgtaattttatattgttttatttttaaaagatttagtaagtaatcggaaatataattattttagagaatattattaatgtttattatttgtgttaatattgttaatttattattatattagttttaatagtatatgaatgggagatgagtaaattttacgtaaattaatgtggagttgttttgttttttattttttttgttatattagagtaatatttgttaataaattatagttggtagtaaagattatttaatattttatattgttatattgatttatataaagtttgtatagggttcgaggatttttattgtttattaatgtgtagttataggtttataagtttgtttaaattgtttgtttttatattatttaagaaaaaaatattgttagtattttataaatgttaatttaatttgtaaggtaatttttattttgtaatattgtatattaaataaatggtgtatgggaatgattattaatgtaatttttttgtatttatttggataatgagtataatttattttattgttagtttgttttattattttattttattaaatatttttttagataaattatagtaaaattttttaaaagtaattagtatttggaaatgtaggtttttttatgttattggaaatataataaaaatattaaataagattattatggaaattaatagaatattttaatttgttagtaaatatttaggttttatgtggttttttatggatgtaaaaatattgttatatattattgatattgttattttttatagtttaaatgaaattttaagtgatttggtatatgtgaatatttttgaataattatgttttataaataattatattgaatatgatagaagaaaaattaaagaaagaattaaatattaataaaattgtttgaagattatttaattattttttttattataaaggttttagaaaatttgtagtgtgtttaaaaagtaacgtaggttatttttatttaaaatttttattaatgtagtttataatttaaatattgaaaaaaatgtatatttttgtatgagttatggatagaaatattttatggtttgtgggtattttttgattagtaagtataattgaatagggtatttaaatgggtttgtgttttttttgttgtgatagagagaaatttgtttttttttttgtatttggattatatatttgatttggaggatttgtttataaaataaaatttgatatgtttattttttttaaaacgtttattatgtttatattgatattttttagagaaaaaaaattttaatgataatgtttttaattaattcgaaatattattttttagataatagattgttgtgaaaatatattaattattgaattttattaattcgatttttatataggttttaaagttttagtttgggttattatttttaattagtttttttttattaattataattatttatttaattttttttttttttgcgaggtatatagtaagtttagagtagtagttggtatatagtgagtttttagaaaaagatgttagtgacgatgttgatgataataaagttaatggtaataataaagatataaaaattaggttttttagagtaggtgttattgttatttgtttatttatttatgtttatttatttgttttgaatttatgatatatgtagtttcgttgtttatataatgtaagtagaattatatagtatattagttaggtatttgattttatttgggaaaattagggttaatattttttataatagtgtgttttgtttttttttattttgaaatgtgtaagtaattgaaaagtaaaaataattatatatattattaatattaaggatggtgatatgaaaattttattggttgtattagtttgtggattttaggtttatatattttttagagtagttttgtatgtggtaattaataggaagttttttttttagtatagtagtttgggtttatatatttagtgggtttgaattattgtagagatggattattttttaaagttttatgaagaatagttttgtaattgtttttgtatttttagaaattgtttgtaatttaaaagtaaattgattgttttatattatagtaggaattgtataagtatatgattattttaaattagattttttttttgtggattttatgattagtgtggataaaattaagaatgtaagttttatgagagtaggtggtttgttagtttggtttattgttgaatttttagaatttagaagagtgtttgatatgtgagaggtatttaaagtatttgtcgattgaaaaaaattgatgatgtttgggttgttgattattgttgttggtggtagtttggtggtcgtatgtgtgacgttatttatttgaatttttaggagtgatattatatatacggtagttaaattgttatatgggataataattaagagttttgtttgtttgtatgttgaaaaattatgtaagatggtttatatgtaaagttttgaaaattgatgtttatttagaaaaataatatgtttttaatattttatttttatttgaatgtgaatatataattatatttttatttaattttttgaaataagtagtatagatataatatttataataagtaggatatttgaagttttttatattgtttggtagttttatttaattattattggttttattttgtttttgtattgttgaaaatgatattatttttttagtaatttttatttgtataaaattattagtaaaagtttaatatttaataaattttatgaaatttgtatatgtgttatttttaagtagtagtaattttatgattgtaattatatatatataatatatataaaattatatatatatatatatttatatgtttatatttatttatttgtttgtttatttatttatttatttatttatttatttatttatttatttatttatatagttagttttttgtatttatgggttgtatatttatagattgaattaattttggatagaaaatatttaggaaaaaattgtattgtaaatatatagattatttttttttttattattttttaaataatatagtataataattatttatattatatttatattgtattaggtataaataatttggggatgatttaaataatataggaggatgtatataggttatatgtaaatattatattattttatatgaaggatttaagtatttttagattttggtatttatatatgtaaatattatattattttatatgaagtatttaagtatttttagattttggtatttataggaggttttgtaattaattttttgagtatattaagggatgattgtatgtataaacgtaatgttttaatgggtatgttattttaggaagaaggttattgagatatttatttattgttgggaaaattttatttttagtgtttaaatatgaattagattaggaattgatgtagattattattgtttatttgataatagaggttttaattttttatttttttagtgttgaaataatttttattgaattagttttaaataagtttattggagtttgttttaatattgtaagaatgataagatggaagttatttttattagtatgaattataattattcgtatatagattgtcgtatttttattgttattgatgttaaaattgtattaaagtaaataaaaatataattgaaaatataagtatagggttttttatttgttattttcggatatattatttgtttatggtttttatgaatttttaattagagtaagaaaattttttggttggttgttagttatataaaaagagaatttagaatgttatttttgggaagaaagttagatttaaataaaatattttttagtgtttagtatatttaatataagtgatagataagatttatatatgatattatgttttattttttaattcgatttgaagatggtgagaaaatggtttagaaattaataatatattaaatgattatttttatattaattgaagattttagagttataaaagaagaatttaaaataaatgtataagttgaattaataattaatatttttattgtgaaggtattatgatttatttttgttttgatggttgtttaatatgtaattgaatttttaaaatatatatatttatataaaagttgagtaataaattaaaaaaagaaattttaatatggaatttttttaaattatttttttttaaaaattttgtaaatcgtgttttaattttattaggaatatttaagaattttatgattgatgattttttattgtttataattttaagtattagaaatatattttatagtgttggtttattttgttagattgtaagttttatgagagtatagtttatatttattttatttagtattgtatttttagtatttggtataatgttgggtttattaagtttgattaatatttgttgattgatttgaagattagtggggaaagtgttatatattaaaagaattgtgtttagttatattggtaaaggatttgtatagttataattatttttatgggtttattatttttttttttgatataaatttaagagatattaaaattagaaattaataaaatgtttaaagagtagtgttaattttatttataattggtgtttatttgaagttattatagtaatgttataataatgataagtatttatttttttttttttgtaagatatttttattaggatggtttgttattatttttaaatttaatttaaaataggatttatttattaagggggagaagttttttttaataaggttttttttttttagtatttttttttttttgggaattatttttttttttaaatatttaggttaattatttgggttatttgattattattgttttttattttttgtatttaaatatgtttttatgtttttattattgagaaggtgttaagagtggtatttttttgttttaatatggattgatttagtttagttaggtttttaattttttggttgtttttattttatttcgtaattttaatttgtggatatttgatgtttgttgtatgaattttattaaaaattttttttttataatttttattgattaaaaatttataaaatatttttattatatatattatgttatatattatgttttaataatattagttaaaatgttttgaattttttatgtttttgatatttggtgtttattgttttgtttatttttataatatgatagatgataaatattatttttatcgttttttttattttacgttttttaggttgaggaaatagatttagtgagaggttgttaatttgtttaaagtgataaaataagttttaattttttttttgttatttgaagatttagataatgtagttttgaaagtaaagttttgatttttttatttttaaatatgtttttttttaggtaagatggtttttttatagtggtttatgtatgttatttttaatttttagatttttgtgggaaaggtttttttattttaaaaggtttttcgatttttttttgtgtttatgtagaaattttttatatttaagatataatttaaattttattttgtatttgtagttattttgaatatttttgttttttattttttttaaattttgaattttgattggattttgtgttggatagtttagtagttagtgatgtgttgtcgtgtaggatatatataatgatatatatggaaaatagtgaggatttattatgaagagttaggaatatatatgttaatttaatagggatgagttttgtttagaaattagtatatatagaagagtatataatattatttttgttattaatataattggagaaattttaattttagaattgaaattttaacgggtatgatagaaattaagtagtatttttaaatttagaaaaaggaaagttagtgtaggttgatgtttttaggtttttttaaaaaaagaaaaaaaaatttttatgtagaatatggatattaaaaattcgtagattttaatattattaaaaatattggttatagttataaaagaaattgaaatttttataaatataagttaggaagaatagtgtgatagagtgatttttttaaatatttatattatttttgaaaaagagaggtttgtgatggtgatgattaattgaaattgaaaaaaattattgttaatttgtattaaaatgtaaatgtgttgagataaatatttaagaaatatattgattttttattagtgaatatgaattgttttgtataggttatttgttgttgaaattaatttaaggagattatggttaattatgaggagtagaaaatatattttgtttgttttatggaatagatgggataaatttttggtagtgtatatagtattaataaaatttagttgaaagaattaaataaaaaagtatatttattgaattatgtttattttttaataatatgatttatgatttttaagagtaaggtaaagttgattttatatttgtattttttggaaattagattatttgttttgtttatttttaaattttagaattataatatagttaaaataattttagttgataaagaggtatatgagtgtgtaggtgttatttatttttaatagtaaatggaaattaatgtaaatgtaaaatgtgttagtagaatttgtagatgaaatgtgaaaatattttttgtaatatatatgaaaaaaattgtatatagagattatgaataagtattgtttagagagtaaaaataaatgtttttaaatttttttattgttttatttatttgtgtttatttattttttttgtttataagtaattgatttttttttttaatatagt

SEQ ID NO: 272 - DNA, 12507 bp, Artificial Sequence
  chemically treated genomic DNA (Homo sapiens)
gttgtattaaaaagaaaaattagttatttatagataggaggaatgggtgagtataaataaatgagataatgaaaaagtttgaaaatatttatttttgttttttaagtaatatttatttatggtttttatgtatagttttttttatatatattataaaaaatgtttttatattttatttataaattttattggtatattttatatttgtattagtttttatttattattgaaaatggataatatttatatatttatatatttttttattagttaggattgttttaattgtattatgattttaaagtttagaagtaaataaaataaataatttaatttttaaaaaatataaatatgaaattaattttgttttatttttaagaattatgaattatgttattaaaaaatagatatagtttaataaatatgtttttttatttgatttttttagttaaattttattggtgttgtgtatattgttagaaatttattttatttattttatggaataaataaaatatgttttttgttttttataattgattataatttttttaaattggttttaatagtagatgatttgtatagggtaatttatgtttattaatgaaaaattaatgtattttttagatatttattttagtatatttgtattttggtatagattgataatagttttttttagttttagttaattattattattataagttttttttttttaaaggtaatgtgggtgtttgaaaagattattttgttatattgttttttttaatttgtgtttataaagattttaattttttttgtggttatgattaatgtttttagtggtgttggaatttgcgaatttttaatatttatgttttgtatagagatttttttttttttttttgaggagatttaaaaatattagtttgtattgatttttttttttttaaatttaggaatgttgtttaatttttattatattcgttgaaattttaattttaagattgaagtttttttaattgtattgatggtagaagtggtgttatgtatttttttatatgtgttagtttttaaataaaatttatttttattaagttgatatgtatatttttggttttttatggtgaatttttattgttttttatgtgtgttattgtatatgttttatacgatagtatattattaattgttaagttgtttagtatagaatttaattaaaatttagagtttggagagagtagggagtaaaaatatttaggatggttatagatataaggtagaatttgaattgtattttgagtgtgggaagtttttgtataggtataagggggggtcgagaagttttttgggatggagggattttttttataaaagtttggaggttggaaatgatatgtatgagttattgtgagaaaattattttgtttgaaggggagtatatttgagggtaagaaggttaggattttgtttttaagattgtattatttgaatttttagataataaaaaaagagttaaaatttgttttgttattttgagtaggttagtaattttttattagatttgtttttttaatttaggaaacgtaaaataagaagagcggtaagaataatatttattatttgttatgttgtgaggatgaataagataataaatattaagtgttagggatatgaaaggtttaaaatattttagttaatattgttaaaatatggtatataatataatatatatgataaagatgttttgtagatttttgattagtgaaggttgtgaaaggagaatttttagtaaaatttatgtagtaggtattagatgtttataggttaaagttgcggggtggggtgggggtagttaggaagttgaaggtttggttggattagattagtttatgttggaataagaaagtattatttttagtatttttttaataataaaaatatgaaggtatatttgaatataaggaatgggaaatagtaatagttaaatagtttagataattagtttagatatttggggaaaaaaatagtttttaagaaagggaagatgttgggaaaggaaaattttattagggggaattttttttttttggtaagtaagttttattttgggttagatttggagatggtagtaagttattttagtggaaatattttgtaaagagaagagggtgaatatttattattattataatattattgtgataattttaaatggatattaattgtgaataaggttgatattattttttaaatattttgttgatttttaattttaatgttttttgaatttatgttagaagagaaagtaatgaatttataaaaatgattataattgtgtaaattttttattagtgtagttgaatataatttttttgatatatgatattttttttattggtttttagattagttagtaaatattgattaaatttgatgagtttaatattgtgttagatgttgaggatatagtgttgaataaaataagtgtagattgtgtttttatagagtttatagtttggtaagatggattaatattataaaatatatttttgatatttgaaattatgaataataaagaattattagttataaaatttttagatatttttaatggaattggaatacgatttgtaaaatttttaaaaaagagtaatttgaagggattttatgttgaggtttttttttttagtttattatttaatttttgtatgaatatgtgtgttttaaaaatttaattatatattaggtaattattaaaataagaatggattatgatgtttttataatagagatattaattattggtttaatttatatatttattttagattttttttttgtggttttaaaatttttagttaatatgagaatgattatttgatgtattattaatttttggattatttttttattatttttaaatcgaattagaagatggaatatgatgttatatataaattttatttgttatttgtattagatatgttaaatattgggaagtattttgtttaaatttggttttttttttaaaagtaatattttgaattttttttttatatggttgataattaattaagagatttttttgttttagttggaaatttatggaaattataggtaaatagtatgttcgaggataataagtagaaaattttatgtttgtatttttaattatatttttatttgttttaatgtagttttaatattagtaatagtggaaatacgataatttgtatacgagtagttataatttatgttgatgaaagtagtttttattttattatttttgtaatattgaaataaattttagtgaatttgtttgaagttggtttagtagagattgttttaatattgaaggaatgaaaaattagaatttttgttgttagatgagtagtaataatttgtattagtttttggtttggtttatatttgagtattgaagatggaatttttttaatagtagatgaatgttttagtggttttttttttaaaataatatatttattggggtattacgtttatatatatagttattttttggtatatttaggggattggttgtaggattttttgtggatattaaaatttgaggatgtttaggtattttatataaaatggtgtagtatttgtatatgtggatattaaaatttgaggatgtttaggttttttatataaaatggtgtagtatttgtatataatttatgtatatttttttgtattatttaaattatttttagattatttatatttagtataatgtaaatatgatgtaaatagttgttatattgtattatttaggaaataataaaaagaaaaatagtttgtatgtttataatataatttttttttgaatattttttatttaagattggtttaatttatggatgtataatttatggatatagagggttgattgtatagatagatagatagatagatagatagatagatagatagatagatagatagatagatagatagatataaatatataaatatatgtatatgtatgattttatgtatattatatatatataattataattatggaattattattgtttaaaaataatatatatataaattttataaagtttattaaatgttaaatttttgttgataattttatataaataagaattgttgggaaggtggtattatttttagtaatatagagataaaataaaattagtagtgattggatgaaattattaaataatgtaagagattttaaatattttatttattataagtgttatgtttatattatttattttagggggttaaataaaaatatgattatatgtttatatttagatagaaatgagatattaagggtatattgtttttttgaataaatattagtttttaaagttttgtatataaattattttatatgattttttaatatataaataaataaaatttttaattgttgttttatgtagtagtttagttgtcgtatatgtgatgttatttttaaaggtttaagtaaatggcgttatatatacgattattaagttgttattaatagtagtagttagtagtttaaatattattagttttttttagtcgataaatattttgagtgttttttatatgttaggtatttttttaggttttggaaatttagtagtgaattaaattggtaagttatttgtttttatagagtttatatttttgattttatttatattaattatggaatttataggaaaggaatttgatttgaaatggttatatgtttatgtaatttttattgtgatgtaggatagttagtttgtttttgggttataggtagtttttagaagtatagagatagttatagagttgttttttatggaattttgagaaatggtttatttttgtaatagtttaagtttattgagtgtatggatttaagttgttgtgttgaagggagagttttttattgattgttatatgtaaaattattttaaaaagtatgtaaatttagaatttataaattgatgtaattaatgagatttttatgttattatttttaatgttgataatgtatataattatttttgttttttagttatttatatattttaaaataagaaaggataaagtatattgttgtaaaaagtgttagttttggtttttttaggtaagattagatgtttggttggtgtattgtgtaattttatttatattatataaataacgaaattgtatatattataaatttaaagtaaataggtgaatatagataagtaaataagtaataataatatttgttttgaagaatttaatttttatgtttttgttattattattggttttgttgttattagtatcgttattggtatttttttttgagagtttattgtatattaattgttgttttaagtttattgtatatttcgtaggagggagaggaattgagtgggtggttatggttaatggaaagaggttaattgaaggtggtgatttaaattgagattttaaaatttatatggaaatcgagttgatagagtttaatagttagtgtatttttataataatttattgtttaaaaagtaatatttcggattaattaggaatattgttattaaaattttttttttttgagaagtgttagtgtgaatataataaacgttttgaagaaaatggatatattaaattttgttttatggataaattttttaaattaaatatataatttaaatatagagagagaagtaaatttttttttgttatagtaaagagagtataaatttatttaagtgttttgtttagttatgtttgttggttaagaggtgtttataagttataaaatgtttttgtttatggtttatgtaaagatgtgtattttttttaatatttaaattatagattatattagtaaaagttttgaataaaaatgatttacgttgttttttgaatatattataaattttttaaagtttttgtaataaaaaaggtaattagataatttttaaataattttgttagtatttagttttttttttagttttttttttgttatgtttaatataattatttatgaagtatgattatttaaaaatatttatatatattagattatttaggattttatttgagttatgaaaaataataatattaataatatatagtaatatttttatatttatagaagattatataaggtttgggtatttattggtaaattaaaatattttattagtttttatagtagttttgtttagtgtttttattatatttttagtgatataaagaaatttgtatttttaaatattaattatttttagaaaattttattgtaatttatttaaagaaatatttaataggataaaatgataagataaattgataataaaataagttatatttattatttaaataggtgtaaaagggttgtattaatagttatttttatatattatttatttgatgtataatattataaaataaaaattgttttataaattaaattaatatttatgaaatattagtaatattttttttttgaataatataaagataaatagtttagatagatttgtaggtttataattatatattaataaataatggaaattttcgaattttatgtaagttttgtgtgggttagtatgatagtatgagatattgagtgatttttgttgttaattgtaatttattagtaaatgttattttgatgtgatagaaaggataagaagtaaggtagttttatattgatttacgtaaaatttatttattttttatttatgtgttattgaagttgatgtgatggtaggttaataatgttgatataaataataggtattgatagtgttttttaagatgattatattttcgattatttgttaaattttttaggaataaaataatatagaattatataaattgaatataatttaaaagattggagaaagagttatagaataatagtggtatataaagatttgaagtttttatagttagtttttgatgaaaaatatatttgaaattaatagttagattgaaagagtttagaagttttaaaagaattgaatagtttagatgttttaaaaggattgaatagtttagaaattattatttaaattatagttttgaattaagatttaaaatatagtttttttaatatgaaaatattttatttgagaatattatttattaattatgttaatttttaagataatatggagatgtttaaaattaatgttaaagttttgtaaataaaatttaaatttttgggtagattataaatattaatttaaattagagatagtttagaggagagatttgttaataaaatattaagtaaaataatggttttgaggaatttagtttcggtttttggagattaatgtttatttttgtaaatattaattaaattatatttaaaatatttttttttatttagtattttttattagtatggttttgaatatttttgttttatttatatttagaagaagaaatagtgttaagtatcggtttgtaaatgtgaattttatttttgatttttgaagatttttttgttttagaaaaatataaaagtaataaagattaaaattaatatatttttaatattggttatggtattttatttttattttttttatttgatttaaagaggattaatattttaagatattttaaaaaatatacgtaagaaaaaatagtatgtttgtgatgtaaatgtagtgaagattttattgttttttttgttaattagattgttatatttgaggtttttttattaagaaattttggtattatttttgtatattaggatagaaataaagatattttaagagagtaagagtaatttatgttagttttagttaatatgtgttattgatagagttgttgaaaattgtaatgaagatgtttattaagaagttattttattggatatgaataaataaaatttgtaatttgtgaaagattaattattatgttttttaggtagtttaaggttaattttaaaagtagttttatttaaagttttgagtaatttttttttttataaatgtttttttaagttttaagttgttagtaagaataaattttttttatagtaatgattgagtatgttatttaatagtttattatttatattgaagagtataattatttaaataggttgtttagttataaatattaaatggttttttatggttttgtagataattttatataagaaaatttaataaagggttaaatagttgaaaaatatatatatttttttttattagtgggagttgtgtgaaatttatattttaattaggggtgagtggttatgattgtattttaattggtaagtttttgttgtattatatttattgtattatttatagaatttatttattttttatttaggagaatttttttaatatagtaagattggttaatatgtaaatttaggaaatatagagaatattattaagatattttatgagaagattaattttaagatatataattattagattttttaaggttgaaatgaatgaaaaaatattaagggtagttagagagaaaggtaaagtaatttataaagtaaagttttttagattaatagaagattttttaatagaaattttataagttagaagagattggaggttaatatttaatatttttaaagaaaagaatttttaatttagaatttaatatttagttaaattaagttttataagcgaagaagaaataaaattatttttgggtaagtaaatgttgagagattttgttattatttggtttgttttgtaagagtttttgaaagaagtattaaatatggaaaggaaaaattagtattagttattgtaaaaatatattaaaatataaaattaatggtattatgtagaaattgtattaattgttgtgtaaaataattagatagtattatgatgatggattaaatttatatataagaatgttaattttaaatgtaaatgggttaaatgttttaattaaaagatatagattggtaaattgaataaaaagttaggatttattgatgtgttatatttaggagatttattttatgtgtaaagatatatataggtttaaaataaagggatggaggaaaatttattaagtaaatggaaagaaaaaaaaaaaaaaaaaaagtatgggttgtaattttagtttttgataaaatagattttaaattaataagataaaaaaaaagataaagaaggttttgtatgatggtaaagggaatagtttaataagagttaattattttaaatatatatgtattttatataggagtatttagatttataaaataagtttttagagatttataaagatatttagatttttatataataatagtgggagattttaatattttattattaatattagagagattaatgagatagaaaattagtaaggatatttagggtttgaatttagttttgtattaagtggatttaatagatatttatagaattttttaatttaaattaatagaatatatattttttttagtattatatggaatttattttaaaatcgattatataattggaagtaaaatattttttagtaaaagtaaaagaattaaaattataataaatagttttttagattataatgtaattaaattagaatttaggattaaaaaatatatttaaaattatataattatatggaaattgaataatttgtttttaagtgatttttgggtaaataatgaaatttaggtagaaattaagaagtttttggaaattaatgagaataaagagataatgtattagaatttttgggatatagttaaagtagtgttaagagggaaatttatagtattaaatgtatatattataaagttgtaaagattttaaatcgatattttaatattataattaaaagagttagagaggtaaaagtaaattaatttaaaagttagtataaaataagaaataattaagagtagagtagaattgaaggatatagaaatttaaaaaattttttaaaaaaattaataaaattaggagttggttttttaaaaaaatttaaaaaatagataagttattagttagattaataaagaagaaaagagagaagtattaaatagatataataaaatatgaaaaagggggtattattattgattttatagaaatataaattattattagagaatattgtaaatatttttatataaataaattagaaaatttagaagaaattgataaatttttggtaattttttaagattaaattaggaagaagttggagttttgaatagattaatagtaagttttgaaattgaggtagtaattaatggtttattaattaaaaaatgtttaggattaaatggatttatagttgaattttattagagttataaagaggagttggtattattttttttgaaattattttgaagaattgaaaaggagggatttttttttaatttattttatgaagttagtattattttgatattaaattcgggtagagatataataaaagaagaatattttaggttaatatttttgatgagtattgatgtaaaaatttttaataaaatattggtaaattgaatttaggaggatattaaaaaacgtatttattatgattaagtcggttttattttgagatgtaagtttggtttaatatacgtaaattaataaatgtaattcgttatataaatagaatttaagataaaaattatatgattattttaatagatgtagaaaaggtttttgataaaaggtaatatttttttatgttaaaaattttaatagattaggtattgatggaatatattttaaaataagagttatttatgataaatttatagttaatattatattgaatggggataattgaaagtattttttttgaaaattagtatagataagaatatttttttttattgtttttatttaatatggtattggaaattttggttagggtaataattaggtaagagaaataaatgaagggtatttaaataggaatagaggaagttaaattgtttgtgtttgtagataatatggttttatatttagaatattttattattttagttttaaaattttttaagttgagaagtaattttagtaaagtcgtaggataaaaaattaatgtgtaaaaattataagtatttttttaatttaataatagataagtagagagttaaattataaatgaattttaatttataattattataaagagaataaaatatttaggaatatagttaaagagggatgtgaaggatttttttaaggagaattataaattattgtttaaggaaataagagattatataaataaatggaagaatattttatttttatggataggaagaatcgatatcgtgaaaatggttatattgtttaaagtaatttatagatttagtgttatttttattaaattattattgatattttttagagaattagaaaaaattattttaaatttcgtatgggattaaaaaaaaatttgtatagttaagatagttttaagtaaaaagaataaagttggaagtattatattatttgattttaaattatgttataaggttatagtaattaaaatagtatggtattggtattaaaatagatatatagattaatggaatagaatagagattttagaaataatattatatatttataattatttgatttttaataaatttgataaatataagtaatggggaaaggattttttatttaataaatggtgttgggaaaattagttagttatatgtagaaaattaaaaatggattttttttttatattttatataaaaattaatttaagatggattaaatttttaaataaaaattataaattataaaaattttagaagaaaatttaggtaatattatttaggatatagatatgggtaaagattttatgataaaaatgttaaaagtaattgtaataaaagttaaaattgataaatgggatttaattaaattaaagaatttttgcgtagtaaaagaaattattattagagtgaattagtaatttatagaatgggagaaaatttttgtaatttatttaattgataaaggtttaatatttaaaatttataaggaatttaaataaatttataagaagaaagtaaataattttattaaaaagtgggaaaaggatatggatattttttaaaagaagatatttatatagttaataaatatgaaataaagtttaatattattgattattatagaaatgtaaattaaaattatagtgagatattatgttatatcggttagaatggtgattattaaaaagttaagaaattatagatgttggtgaggttgtggagaatgaggaatgtttttatattgttggtgggaatgtaaattagtttaattattgtagaagatagtatggtaattttttaaggatttagaattagaaatattatttgatttagtaattttattattgggtatatatttaaaggaatgtaaattatttaattataaagatatatgtatacgtatgtttattgtagtattatttataataataatgttatggaattaatttaaatgtttatta

SEQ ID NO: 273 - DNA, 5845 bp, Artificial Sequence
  chemically treated genomic DNA (Homo sapiens)
ggataatttggagaggttgagtttgagttaaaatatgataggggtttggggtagtaggttatgttattagtaagaaggggagtatagttttttaataagatatatatgtatagttttatgcgtgtatatgtattttgttggggaagagttgggttaaggttattgttaagtaaggagatttgattttgattttatttgttaaaatatttcgggagtataggatttgatagtggatatgtatttgtttatttattgttgtatttgaataaatattgtagggtattttatttttattttataaatatgagaatattattaagaaaataaggtaatttgttcgaagttatatagttagtaatcgacggtgtttgagattttttattttaggttttttggtaatataattttgtaagtgaaagaaaggtagaaggaggaatttgttttgagtttgggtagaatttgtgattggtattttttgtttgttatagggtataagtatattttgttttatgttttaggtttagggaaggaaacgtttgtttttgagtatatatttaatatattgttttaatgtattgttgtttataaggttggggttattgttttaatttttgtacgagaaaggtttagggagggaggtaatttattagaagttagtttttggtttgagttattttaattttttatttttgagttagggttttgttttgttgttttgattggatatagtggtatgattatagtttacggtagtttttattttttgggtttaagtaatttttttattttagttttttaagtagttgggattataggtgtatattattatgtttagttaattttaaaatttttttgtagagatagggtttcgttttgttgtttaggttggtttcgaatttttgttttgaagtattatgtttggttaataaagttattatttttgggagtatattatgtttatttttgaagtattaatttaataggttatattaataataataaaaataatttatatgtattggttatagattatgttgtatttgatttttataataattttataaattagatattgtgatgattatttttgttttatagatgaggaggtaggagagtagatatatcggtatgtagatatatagttggtcgtagtagggttgagttaggaatttagttagttttatgagggaatttgggttttttgtttgtaaagttttgggttttttgtgttgattatagattttgggtatagggagggatagggatagtgatttatttatagagatagaggttggtgacgaatatggtttttgggatttttattttaggattttttttttagtgttttttaaggggatgaataaattgtttgtttggttttttattttttagataagttggttattttgatgaaggttgttttaggggtaagtaggtttgaggaggtgggtgtttttattaggataattagggttgtagatacggagttagagagggaacgtagagtgggggttaagttgggttttgttcgttaatgggggagggattgtggagtgggagagggtagttttagtatttgtttatttgtggaaagttttttagagtttttagtagttttagtgtattaggttttttgattatattgtgtaggagttggagttttttgggtttgtaggagaggaaggggttatttagagaagttagggtgggagatttagagagagagaggaaagagagagagatagagagatagagggataggggttgtttaggtttttgtgaagggatatttatttagtttttaagttttgatgtggaaaagtttaattttttttttttttttgagacggagttttatatttttgtttaggttggagtgtagtggcgttattttagtttattgtaagtttcgttttttgggtttatattatttttttgttttagttttttaagtagttgggattataggcgtatgttattatatttagttagagacggggttttattgtgttagttaggatggttttaattttttgattttatgattaggttatttcggttttttaaagtgttgggattacgggcgtgagttatcgcgttcggttaagttttatttttttttttttatttcgttttgtttagaattttttgattattttattaatggggtgagttattatgaaaaaggcgagttggtgagagttttttttttttttttttaggaggaaggggtagttatgggttttaaaggtttgaagttagtcgttttattttaggtagtggatatcgatttgtatgtgtcgagggtaggatttatttttggaatttgggaagtttggattttgtgcgatggttttgagagggaaagtaagtgtttttgagtttagatttttgtagttgtattagagggtttatgtaagttgtttgggttttggttgattttatgtgagggcgtgtttagtattggtcgaagtggaacgtttttttgaggtagttggaaaggggttttgaatatgttagatttgatttagaggaatataggagtatgtagtttttacgttttagtttaaggattaatattgttatttgttttttttcggtttggttttttggggattttgaagttagttagaagggtggaggaagtaggagagttttgagaggtttgatatttttggatggttttttttttaatagttataaaagatttgatgtgtaagttttgtttgattaataggttattggggtaatatttgaattgtgaaattaggttgtatagaagtttatttttttttttttttaaggttaggtgtgtaatcggtggttttcgtttaggtttttattttttaggagttttgttgtttaagtttttaagtgttttataggttaattgaggttaagaggtattttaggttttagggttatatggttagtttatagaggagttgggatcggaatttgttttatggacgttggatttttttattattttggttttttattttttttggttgtgattttttttttttttaatattagttatttattttagtttggtgttttagttagagtattaaatagggagtaatttgaggtcgaattaggagagattttttggaagatgtaggggtaaagaggagattgttgtgtttggttggaggttagggaaagttttatgaggtgaaagggtaggttaaatagaaggatcggggtagagttgggagaaagagtaggaggtttagatgagtttatgtgatgggggtatacgtgatagtttggtatttgtagtgtgtagggttggggtgagggtagtgggaattaaaaggttataggttttgatgttagtttagggggtgtgtgggtttttgaaggtagagggttgaaatggttaaattggtggtttaaaggaatttttggataacggtgtggagggtggattgtggtttggggagagtttgaaatttagagaaggtggagtttggaggttggggtagtattgtatgggagagaagatggcggtaggagttaggtaggggtggaaggagaggttagaggggagtgttttcgggaggaaggagttaaaggtgttttagggtttatgtagtgggtatttagtagaagagtagttaaggaggtttagtggggataatcgggacgtttatgggagtttcgaatttagagatatagattgggtggtgtttgtttattataattggtgttttgggagagggcgtttttagggaaattcgaggttagggaagagaagtagtttaggaggtgattttatacgtttttaatattaagaagatagtttttaggggagattaagaaggagttattagggaggtaggagggatagtaggagagtggtattaggggagatcggggtagtaagaaggaaggtttattagtgtttgtgtagataaagattaggtttgagggtggttatggattaagggtgggttggttagtttttagtggtttttagtatgaagaagagtgaaaagatggggttaagaagcgtagataattttttttaagatttggtttgggagaagttatggtgaaaggttatgtttggaggggtttgggaatattttgagattgaaaaaaatagtgaagaaggatgtagaaggggatagatggagtagagttttcgtttggttgacggttgggtttagagagtatgtggtatggttttgaattgaaagggtaatttgttttttgtaagagtgagtttttaggttgggggtggttattgtttttatttattagttttttttttttttttttatattgagttttattttgttatttaggttggagtgtagtggtatgattttagttaattgtaatttttgtttttcgggtttaatgggtttaagtgatttttatgttttagtttgtagttgggattataggtgtgagttattatgcgtggttaatttttatatttttagtagagatggggttttattatgttggttaagtttgtttcgaattttttattttaggtgattcgtttattttggttttttaaagtgttgggattataggcgtgagttatcgtgttttgttttatttattaatttttaatcgatgtttatagggtgttaggtaatgtttagagttggagatttagtagtttattatattgatttttgaggagtagaaggatgtagaataggtatttggttttttttttttttggagggatttaacgtttttgagtatttttggttatgataattttcggttaggtttgggaggttgttagagatgaagaaattatttttttattttgtatataaggaaggttttatttattgtttagtaagttttgtgaagtaatagttaggggttaaagtaaattttagtttatattttggtaggtagttagggatgggtggattaggaaggtttttggttgggtttttgtattaggtttaggttgggtataaaggaggtttttgtgggttagagggaggtagatatggggattatgaagatttaaagggatggttattttttggggcggtggttattggtgtttttgttgttgggtttggtgatgtttttggttattattgtttaggtttttagttataaggaagttgtgtttcgtgttatagatggtattaattagcggttttcggatgttaatttttatcgttttttggatttggattttaggtttacgatggtgagttttgggggatattttgttttgttttggttgggtttggttacgtgttgttttttttgtttttgttgtattgtttgttaggagggtatttttttttttaaatgtggtttcgtgttttttagggaattttttagagttcgtgtttttttttagttcgagagttttttgttttataatttttgttgtggtagagatatttttatttcgattttacgtaggttttgggatttttgcgagttttaggtattagaatggggttattggttttgggtagtgattttttttgttttaagttttttttgtattacgttattttatatagggaagaattttatttagattttaggttttagtgggtatgttttgttttttaggaagttttttgattttttttgtttttattttagagtgggaggggttttttgttagagtttatttgaggtttgtttttatttattgtttatttaggagggtaggaatggtttagtttttttttttttaatgttttagtgttaagtttagtatttagtgttcgtcgtatattaggtattgtggaaagtttgtttttttggtggggaggttatggatataaattagaaaatataagaatgggtttttttatttttttttttgattagg

SEQ ID NO: 274 - DNA, 5845 bp, Artificial Sequence
  chemically treated genomic DNA (Homo sapiens)
tttagttagaggaggaaatggggaggtttatttttgtattttttgatttgtgtttatgatttttttattaagagggtaggttttttatagtatttgatgtgcgacgggtattgggtgttgggtttggtattggggtattgaggggaggaggattgagttatttttatttttttaggtgaatagtgagtaggagtagattttagatgagttttaataaggagttttttttattttggggtgggggtaagggaagttagggggttttttgggggataagatatgtttattggaatttaaagtttggatagagtttttttttatgtggggtaacgtggtatagaagagatttaaagtagaggaggttattgtttagagttaatgattttattttagtgtttggagttcgtagaagttttaaaatttgcgtggggtcggggtgagggtatttttgttatagtaggaattataaggtaggaagttttcgagttgggaggagatacgagttttagaaggttttttggaaaatacgggattatatttaaagggggagatgtttttttggtaggtagtgtagtaggagtagaaggaataatacgtggttaagtttagttagagtagagtagaatgttttttaaagtttattatcgtgggtttggggtttaggtttaggaggcggtagaggttagtattcgaggatcgttggttgatgttatttatagtacgaagtatagtttttttgtagttgaggatttgggtaatgatggttagaggtattattaggtttagtagtaggagtattagtgattatcgttttagggagtggttatttttttgggtttttatggtttttatgtttgtttttttttagtttataggagttttttttatgtttagtttgagtttgatgtaaaagtttaattaggagtttttttgatttatttatttttggttgtttgttagggtgtgggttggggtttgttttagtttttggttattgttttataggatttgttgggtagtgagtgaggttttttttgtgtgtaagatgaggaagtggtttttttatttttgataattttttagatttgatcggagattgttatagttaggggtgtttaagagcgttaaatttttttagagaggaagagagttaggtgtttattttatatttttttattttttaggagttagtatgatggattgttaaatttttagttttaggtattgtttggtattttgtaggtatcgattaagaattgatgaatgaggtagggtacggtggtttacgtttataattttagtattttgggaggttaaggtgggcggattatttgagataaggagttcgagataagtttggttaatatggtgaaattttatttttattaaaaatatgaaaattagttacgtatgatggtttatatttgtagttttagttataagttgaggtatgagaattatttgaatttattgaattcgggaagtagaagttgtagttagttgagattatgttattgtattttagtttgggtaatagagtgagatttagtatgaaaaaaaaaaaaaagaattggtaaatgaagatagtagttatttttaatttagagatttatttttgtaagggataagttgtttttttagtttaaggttatattatatgttttttggatttagtcgttagttagacgaaggttttgttttatttatttttttttgtatttttttttattgttttttttagttttaaaatgtttttaagtttttttagatatggttttttattatggttttttttaagttaagttttaggaaaggttgtttacgttttttgattttatttttttatttttttttatgttgaaggttattgaaggttggttaatttatttttggtttatggttatttttaagtttggtttttgtttgtataggtattggtgagtttttttttttgttgtttcggttttttttgatgttatttttttgttgttttttttgtttttttggtggtttttttttggttttttttaagggttgtttttttaatattgagagcgtgtggggttattttttgggttgttttttttttttggtttcgggtttttttggggacgtttttttttaggatattagttataataggtagatattatttagtttgtatttttgagttcgagatttttatgaacgtttcggttgtttttattgggtttttttgattgtttttttgttgagtgtttattgtatgagttttgaagtatttttggtttttttttttcgaaagtatttttttttggtttttttttttatttttgtttggtttttgtcgttatttttttttttatgtaatgttgttttagtttttagattttattttttttaggttttaggttttttttagattatagtttattttttatatcgttgtttaggggtttttttaaattattaatttggttattttaattttttatttttaggagtttatatattttttaggttggtattagggtttgtggttttttggtttttattgtttttattttagttttgtatattgtaagtgttagattgttacgtatgtttttattatataggtttatttgagttttttgtttttttttttagttttgtttcgatttttttgtttggtttgtttttttattttatgaagttttttttgatttttaattaggtatagtaattttttttttgtttttatattttttaggaagttttttttgattcgattttaaattattttttgtttggtgttttagttgagatattaagttgggatgggtggttggtgttgggagagggagagattatagttaggagagataaagggttaaagtgatagaggggtttagcgtttatgaggtaaatttcggttttagtttttttgtggattggttatgtggttttgaggtttggggtattttttgattttagttggtttgtgggatatttgggggtttggatagtagggtttttggaaggtggaagtttggacgaaggttatcggttgtatatttggttttgagagaaggaagaagtgggtttttgtgtaatttggttttatagtttaagtgttgttttagtggtttgttggttaagtagggtttgtatattaggttttttatggttgttgggaaaagggttatttagggatattagattttttagggtttttttgttttttttatttttttgattggttttaggatttttaagaagttaaatcggggagaagtagatggtaatgttagtttttaggttagggcgtgagagttgtatgtttttgtgtttttttaggttagatttggtatatttagagtttttttttaattgttttaagaggacgttttatttcggttagtgttggatacgtttttatatgaaattagttagagtttaagtagtttgtataggttttttgatataattgtagaagtttggatttaggggtatttgtttttttttttagggttatcgtataaggtttaggttttttaggttttaggagtgagttttgttttcggtatatgtaggtcggtgtttattatttgaggtagggcggttgattttagatttttagaatttatggttgttttttttttttagagagggagaaaggaggtttttattagttcgttttttttataatggtttattttattaatagagtgattagaagattttaggtaaggcggaatgagaaaagaaaagtgaggtttagtcgggcgcggtggtttacgttcgtaattttagtattttggaaggtcgaggtggtttgattatgaggttaggagattgagattattttggttaatatagtgaaatttcgtttttagttgggtgtggtggtatgcgtttgtagttttagttatttgggaggttgaggtaggagaatggtgtgaatttaggaggcggagtttgtagtgagttgagatggcgttattgtattttagtttgggtaagagtgtaagatttcgttttaaaaaaaaaaaaaaagttaggtttttttatattaagatttgagggttagataaatgtttttttataaaggtttgggtagtttttgtttttttgtttttttattttttttttttttttttttttttttgaattttttattttgatttttttaagtggttttttttttttttgtagatttaggaggttttaatttttatataatgtgattagggaatttggtgtattgggattgttgaaggttttgagagattttttatagatgagtagatgttggagttatttttttttattttataattttttttttattggcgaataaagtttagtttagtttttattttgcgttttttttttggtttcgtgtttgtagttttggttgttttggtggaagtatttatttttttaggtttgtttgtttttgagatagtttttattagaatggttaatttgtttgaaaagtagagaattaagtaggtagtttgtttatttttttggggagtattggggagggagttttgggatgggaattttaggaattatattcgttattagtttttgtttttgtgggtgagttattgtttttgtttttttttgtgtttagaatttatagttagtatagaaagtttagggttttgtaggtaaagagtttaggtttttttatgaggttgattgggtttttggtttagttttgttgcgattagttgtgtatttgtatatcgatgtgtttgtttttttgtttttttatttgtagaatagggatgattattataatgtttagtttgtagaattgttgtgagggttaaatataatatggtttgtggttagtatatgtgaattgtttttgttgttattaatgtgatttgttaggttaatgttttagaagtaaatatagtgtgtttttagagatagtaattttgttggttaagtatggtgttttaggataggagttcgagattagtttgggtaatagagcgaggttttgtttttataaaaaaattttaaaattagttgggtatggtggtgtgtatttgtggttttagttatttgggaggttaaggtgggaggattgtttgagtttagaagatggaggttatcgtgagttgtgattatgttattgtatttagttagggtaatagagtaagattttgatttaaaaatagaaaattggggtgatttaggttaagagttaatttttggtaaattgtttttttttttgaatttttttcgtgtaaaaattgggatagtagttttaattttgtagatagtaatgtattggagtaatgtattgaatatatatttaaaggtagacgtttttttttttaaatttggggtatggggtagggtatgtttatattttgtggtagatagggaatgttaattataggttttgtttagatttaggataagtttttttttttgttttttttttatttgtagaattgtattgttaagagatttggggtggagggttttaagtatcgtcgattattagttgtgtgatttcgagtaagttgttttgtttttttgataatgtttttatatttgtaggatgggaatgagatgttttgtagtgtttgtttaaatgtaatagtgagtaagtaagtgtatgtttattgttaagttttgtattttcgggatgttttggtaagtgaggttagggttaggtttttttatttggtaatggttttagtttaatttttttttaataagatatatatgtacgtatgaaattgtgtatatgtattttgttggggaattgtgtttttttttttgttaataatataatttattattttaggtttttgttatattttggtttagatttagtttttttaggttgttt

SEQ ID NO: 275 - DNA, 12763 bp, Artificial Sequence
  chemically treated genomic DNA (Homo sapiens)
agaggtttagttgtttggaagtaggttaggttgtttatggatttaaatttatttttgttatcgggtgtgtttgagaagtgtttttatgggcgtgtagatgtaggtggtttagtggtttgatgtttagaatatttggggagtattgtagagggagttttagaggagggatatttaagttgagtttgtagagtgagtagagttggttaaaggaaggtagatagtaggtagcgggaggtggttttcgaggattttttgttggagtgtgtttgtttgaggttatttagatagaaagattgtttttttattttaggttttatttatggattttagagaaatttattttggttgggattttcgaagttgttttttataaaaggattttattattgtgttataaggttatggtttgatttttatgttttttgttaattgatattttttatgggttggttatgttatatttaggagttaaggcggaagtgtggatttatcgttgtttaatatatttttagaaggtttggttttttggtgtagatgtttgttggtttgtttttttttgaataaagaagagaagggttaggtgttgtaggttagattagtttgggttagaattttggtttagtagttgggtgcggtggtttatgtttataatgttagtattttgggaggttaaagtaggaggattatttgagtttaggagtttgagattaatttgggtaatagagtgagatatagtttttttaaaaaaaaaaaaaagtttagttgggcgtggtggtatatgtttgtagttttagttatttaggaggttgaggttggaggattgtttgagtttgggaggttgaggttgtagtgagttgtgattatagtatcgtattttaggtgtcgcgatagagtgagattttgttttaaaaaaaaaaaaaaaaattttagttttgttattgaattagtaatgtgatattttggataagttagttattttttttgagttttttaaagattttatgtttttagtaggaataatgatagtagatgtgaggacgtattaagtatatagtaggtttttatagaatagtagttgtttatagggtgattgaggtcgggggttaacgattgaatggaagtgaatattgtaattttttcgtaaagtttatagtatagtaagtttgtttttagttttttttatatttttttttttacgtttaattttaggattttttcgggcgttttagttttttataggggtttttcgttagtttagatcggtcgggtttttttttttgatttatcgggggcggtttttggtcgcgtatttttagggggcggggggcggttgagatagcgtttagggtttcggagtaaggcgttggtaggtaagtagtgcgtttcggggttcggtcgtcggggatttgggttttttatgtaggggtcgaacgggtttagtcggttcgggggcgtttcgtttttttttttttttttatagtcggggtttttttttaggggcgcgtcgttttttggttttttgtaagaaaaggcgggagagggtgggttcgtgttaaagaaatattttattttattttatttgggataaattaagtagtagtgtttaggggagattataagggtaggaatattgtgcgtttggtaaaaaaattagttttagagcgtcgttattagataatttattagtatgtgtattgagtttttagtcgttttcgagagttttaggttgagcgatcggtttttttgtttcgttgttgttgttgtttgttttttgagacggagttttgtttttattgtttaggttggagtgtagtggcgagatttcggtttatcgtaattttcgtttttcgggtttaagcgatttttttgttttagtttttcgagtagttgagattataggcgttcgttattacgtttagttaatttttgtattattagtagagatggggtttcgttacgttggttaggttggtttcgaatttttgattttaggtgattcgttcgttacggttttttagagtgttgggattataggcgtgagttattgcgtttagttagttgtttcgttgttaatgtgtaaattttttttttttttttttgtggtgataggagaggttttagtttagatagttgagtgtgaggaatagtgatttttattgatttttgtttttttcgtgggttatagagtttagaatttaagagttatttaaggtatgcgttgttgtgattaaaatttatgaagttttttagcgttggggttggggatggaaataggagagtgttttgtggtttaattttttttttttttgtggagaaatcgggagttaggggagtggttaggtatatttttattttaggtgttgatggtatattgtaaattaaagggaagagaaagaagtttgggtttatcgagtatgtattatttgtttattaattataggattttattttatttttatatttaattgtatgtacgtgttatagattggggtatagggaggttttaggaggttaagttatttgtatagttagtaaggagttaaattgtttagtttttattattttattaggttaatcgtttagtttgtggttttgtggggattaggttttattgggatttttatttagattattttttttttttttttttaaatttttaagtttaggggtatatgtgtatgtttgttatataggtaaattcgtgttatggggttttgttgtatagattattttgttttttcggtattaagtttagtatttattagttatttttttgaatttttttttttttttattttttattaaattattttattattattgttattattattattttttgagattgagttttgtttagttatttaggttggagtgtaatggcgtaatttcggtttattgtaatttttgtttttcgggtttaagcgatttttttgttttagttttttgaatagttgagattataggtatgcgttattattttcggttaattttttgtgtttttagtagagatggcggtttaattatgttggttaggttggtttcgaatttttgattttatgatttattcgttttggttttttaaagtgttgggattataggcgtgagttatcgcgttcggtttatattattttatttttaagtttggtagtttggttatggagatatttggatgttagttataggttatgttttttggggagaagatttaatttttcgttttgttttagtgaaattttattaatttcgttttaatgagaaatatttatttagtattgttttttttttttttgagatggagttttgttttgttttttaggttggagtgtagtggcgttatttcggttttttgtagttttcgttttttgggtttaagtgatttttttgttttagtcgttttagtagttaggattataggtatttatgattatgttcggttaatttttgtatttttagtagagatagggttttattatgttggttaggttggttttgaatttttgattttaggtaatttgtttgttttagttttttaaagtgttgggattatcggagatagttattatgtttagtttatttagtattgtattttttttagattttttttacgtagttaaataatgaggttttgtttgaaggtttgttaattaggaagatttgttttagattttgttttagggtttttaggttttgattttgaatttggagttttgttttaagttagtttgttgattaatatttttttaggataggtcggttaggttttgggtagaggaattacgtttgtgtggttgtataattgggtgtttatttttttttggagttttatattgagttcgtttattttttttttagggatttagaagggaatgggagttttttttgtaggggtttttattttttgtgtgtttgtgggtagttttttgtgtttttaggatttcggtgttttttagaaagttagcgagttggaggagataagttttagggtttagtgattgtgatgtaggtaggatagttgttttgggttaatttaggatgggttgttttttagagggtttagggtttagaagttatgatgataaatatttggtgaatgagaagtagattaaagggtagagatttgagaggtattagtatggtatgcggaagatggtgaagaatgttttatggttttagttattttttgagaattgagtttagttaggtgtagtagtttacgtttgtaattttagtattttgggaggttaaagtgggaggattgttttagtttaggagttttagattagtttgagtagtaagattttgtttttagaaaaaataaaaaaattagtcgggtatgttggtgtaggtttgtggtgttagttgtttaggaggttgaggtaggaggatcgtttgagtttaggagtttaaggttgcggttagcggtgataatgttacggtattttagtttgcgtgatagtgaattttgttttaggaaaaaaaaaaaaataaaaaaaattaaaaaattgattttaaaaaaaattaaatatttgtatttagggtaaggagaaagataaattgagggaggaggaaaaagtaatgtgaagttagtgattttgtttagaaaatgtgattaatttagtagcggtgggggttgtgtcgcgtttgttttaggttttgaatggagaatatggttttttttgttggttttagatttagagatgttttttttgatttgttttggttgtgatttgtagcgggttgaggttattgtggtggggttgtgtggatttttagtttttttgtgtgtttttttgaggagacggtttggtatatttattgtttattttagtgattgtttttttgttttaggtttgttggtttttagtattgtttgtttttttttgtcgggggatatcgtttttatatcggttggggaaggagtttaggggtggggttggtgggtggggttggtggttggggtagttagagaagtaagagggaagtgagaagtcgggtggggtaggttggaaggaagacgaatttacgaagtagaggtaggaggaagaaaggaaagtaggagtgttgaaaggtgaaggtggtagggtggttgttagcgcggttcgtggtatttttttgggtgggtaggcgagggttggttgtggtggtttgggaatagagatttatatttttggatattatattgtgttagggtggagtttttttagtttgttgttttgttagttttatgttaggttttaggtatttgatttgatggtagttgtgaagttttgcgggaggatgggtgggttgtgttatgttgtatatggaggaatttttgggttagggtttgttttagttgtgttagattttttgacggaggttattatattgtttttgaaggtttttagttagattggaggtgaaattagattagaagttgtttgtttttaagataggattgtggtgtgatgttatttgggtgggagtggtttggggagggggtagggtagttttagttatttgaatttaaatgtaagtggtatatttgattattttgtaaattttggaagattttggttgagggtttaggtggattgtttgaggtaggaggtggggagggaggaagtggttgattttggggaagggtaggagatttatttggtattaggggaaaaattatttggaatttttaaatgaggtttttggatttagattttgagaatgttatgttttaggttgggagatttagtttggtttcgagggtgggtatttatttttattaggagaagtggaggtgttgttttattttatatttaggggtaagtagggattgtgaagggaagagatttattgggggttagtggaattagggtttgaggaaggtaaaggtattattggatttcggtaggatttttgtttttttgatggttgttaagtttttttttaaaggtgtgtgtaacggtgatttttttttcgaggttttttagtgtgtttttaaagatagtttaagttaggattatgggatagttagtaggatttgcgttttttttttttttagttttatggtagtttgggatttttagtttttgttttttgttttttggggttgttttagtttgttttagttttttgaaattttgggttattttttaggtgttattttagtttaataattagagtttagtaggtttagttaattaaatgtattttttgagtatttgtatgaggttttagttagatttagaggtaaaatatattttttgttttaaaggattttatagtgtagtagtggaggtaggcgggtttataatttattatattatggtagagtggggaaaagtaaaggttttaagaggtgtagaagaggttgtttggtaaggtggtgagttttttattattggaagtttttaagaagaggatggtaagggatgttatagaagagatttttgtattatgcgtgtatgggtatgtgtagggcggtgtaggtagagtaggattagataagaattttagcgtttttttttttttgttttatttttttttttcggttttagtttttttttttaattttagtattttttaatgttgatatttgtgattttgtgatattttttatttagaggaagttcgtttgcggttttattgggtatggtggtttttttgtttattgtattttgtagttaaattataaaatatgggttattttttgtttttgtgtatgttatttttagtgttaagtttttagtatagacgttgagtggaatggaatagattttttgttgggttgtttgaggaatagaggtattaggtgtgtttttgttttagttgagatgtgaagtagttagtttatgttataaaataggttaaagtatgtgtttttaggggagagggttgggagaatttttagagaaggcggaggttatttaatgttttggaagtttttttggatagttggggtttgatacgggtttggaaggataagggggtttgtgtgtgtgtgtgtgtgtgtgtgtgtgtgtgtgtgtgtgtgatagattttttttttgttgtttaggttagagtgtagtagtgttatttcggtttattgtaatttttgtttttcgggttttagtaatttttttgttttagttttttaagtagttgggattataggtacgtattattatgtttggttaattttgtatttttagtagagatggagttttattatgttggttaggttggttttgaatttttaattttaagtgatttattcgttttagttttttaaagttttgggattataggtatgagttattgtgtttagtttaggatgagggggttttaatggatgtaagggtgaatatggatattgaggaagtttaaggagttgtgggtttggatagagggttgggataggggaaagaatgaaaggttagaggttagggtggatttttttttaggagagattggaataaaaggtttcgggatagagatttaatgaggtagtaggagttttaattttgattaagtattagagttatttggagttttttaaatattgatatttaggttttatttagagagtttggttttaatgagtttaatatggaagttagttattggggttttttttttttatttttttgtaaattatttttttttttttttttttttgagatagagttttattttgttatttaggttggagtgtagtggtgtgatttcggtttattgtaatttttattttttaggtttaagtaatttttgtgttgtagttttttaagtagttaggatgataggtgtgcgttattacgtttagttaatttttgtatattttgtagagataggattttattatgttgtttaggttggttttgaatttttaagtttaagtattttatttattttagttttttagtgtgttgggattataggtatgagttattatgtttggttggtattggggttttttaaaagtttttaaatgattttaatgtgtaggtgagtatttgatattgttttggatagaatttattggtattattattattattttgaatatatgtttaaaatatgggtgattaagttttattttagatttgtggaattagaatttttagattaggggtttgggtattgttaaagaaaaaaaatatggtttaggcgtagtgttttacgtttgtaattttagtattttgggaagttaaggtgggtaattattggaggttaggagtttaagattagtttgattgatatggtgaaattttatttttattaaaagtataaaaaattagttagatgtggtggtgtacgtttttaattttattatataggaggttgaggtaggagaattgttttaatttaggaggtagaggttgtaatgagttgagattgtgttattgcgttttagtttgggtagtagagtgaaattttgttttaaaaaaaaaaaaaagaaaatttttaagtaggaaatattaattagatcgattagatattaagggtagggggttttaggtaaatggttttagtagggtttttttgttaaaatcggattttataagtatatagatgggtttacggggtggtttagaagtttagttaaagtttggttaagtaaagaatttttgttagtatcgatattttaataaggttttaaggttattttaatgagtagttaaattttttttttttttttttttttttttgaaatcgagttttattttattgtttaggttggagtgtagtggtatggattttggtttattgtaattttcgttttttaggtttaagtgattttcggataatttttgtgtttttagtagagacggggttttattatgttggttaggttggtttcgaatttttgattttaagtgaattgtttattacggttttttaaagtgttaggattataggcgtgagttatcgtattcggtttgttaaattttttttatttaaattttgatgtggttttttggtatgtaggttgtttgattttgagttaaatatagaatgaaaaatagtaaaggtgataattggcgtatttcgtgttttatttttgagcgttttttgatggtttgagtttggggtagttattttattagtttaggtttgagttataggttgggttgtttgttgtaggggatgtgggtatagtatgtgattttttgtgggatggagaaacgttaaagttttttttcgtaaatttttgttttttgtatgttttttttcggaatcgtggtgttaaaatatgttttttattattttgtaggttgggaaaggaaaaggaaagttataatttatatagtattttatatttattattattgtttttgatttgtttttttttgttttttatttagatttaatattttttgttttgttatttgttttttttttatttttgatttttttggtttttgcgaaatattgtattttttgattttgttgttttagtttttaagaattttttaatggtgttagtttgtatttttattttttaattttttaagtttttattttgtgttattggggtttattttatataaattttgtttaaatggatgtatagtatgaattgtattatgtacgaagtgtatgttggttttgtgatttttgtattttgagttaaaaaaagaaattttttagtgatgggaatttatgaaagcgatagtgagtggagtcgtagttgttgtattttttgaattttttaaaaagataatatttttttaaaaaatatttgcgtttagtatttttttttttgaatgatttttgtttagaaaaagtgtttattattttggtatttgagggaagttgggtatatagaattgatagttgatgtttgggagtgggtgaaattttttagggagggagtttagaattagagtagttattaaatataatgttaggtgaagggtttttgtttgtttgttgtattttaatagatgtttttttaataggttaaggaaatttttttttatttttagtttgtgggtaaaaaaaaaattttttttttttttttgagagggggttttattttgttatttaggttgtagtttagtggtatgattttggtttattgtagtttttattttttgggtttaagcgatatttattttttagttttttgagtagttgggatttggaattataggtttgtattattatatttggttgatttttatttattttattttattttatttttttgagatagagttttgttttgttatttaggttggagtgtagtggtataattttagtttattgtaatttttgttttttgggtttaagtaatttttttgttttagttttttaagtagttgggattatagacgtatgttattatgtttagttaatttttgtattttagtagagatagggttttattatgttggttaggttggtttcgaatttttgatttcgtgatttatttatttcggttttttaaagtgttggaattataggtgtgagttattgtatttggttttggttgatttttaaaatttttgtagggttgtggtttttttatattgtttaggtttgaaaaaattttaaattaggaatgaatgtagaattttgttaaatgttgtttttgtatttattgaggtgattatatatatatgtttgttaatagggtgtatagtattgatttttaaattttggtttgttttttttttttttgcgttgtgagcggttttatttatttattttaaatttataattgatagataataattgtatatatttagtaggagtagtgtgatgttttattgtatatatgtaatgtatgtgtatatattgtataatgattaaattaaggtaattagtatatttattattttaaatatttattatttttttgtgatgataatatttaaatttttttttttggttattttgaaatatatattgtattattattagttattattattttgatttttagatattaaattaattttgtatttttgggataaattttatttggttattatggtttattttttatatattatttgattttatttgttaaaattttgttaattttttttttttttttttttttttgagatggagttttattttgttatttaggttggagtataatggtatgggtttagtttattgtagtttttgttttttgggtttaagtaattttttcgttttagttttttgagtagttgggattataggtacgtgttattatatttagtaaatttttgtatttttagtagagatagggttttattatgttggttaggttggtttcgaatttttgattttatgatttatttattttggttttttaaagtgttgggattataggcgtgagttatcgtgtttagttaaattgtgttaatttttgtatgtgtatgtttatgagagatattgatttgtaattttttttttgtataatatatttatttggttttgttattaggagaatgttggtagtataggatgaattgagaagtgttttgttatttttttttttgaagattttgtgtataattggtattatgttttttttaaatttttggtagaaattattagggaagttatttgggtttgggttttttggcgggggaacgagttttttattataaatttattttttttaatagatatggttattgtttagataatttgtgtttttttgaatgagtttttataatttgtgtttttgaaggaatttgtttattttatataagtggttgaatatattggtataaagtttttataatattttttttatttttttaatatttgtaaaatttatggtgattttatattttttatttttgtattgatatttgtgttttttttttttgttaattagtttgtttaaagatttattaattttatcggtttaaaaaaataatttgttaggtacggtggtttacgtttgtaatattaatattttgggaggttgaggcgcgtgaattatttgaggttaggagtttaagattagtttggttaatatggtgaaattttgtttttattaaaaatataaaaattagttaggcgtggtggtgtgggtttgtaattttagttatttgggaagttgaggtataagaattatttgaatttatgaggtagaggtcgtagtgagttgagattacgttattgtattttagtttgagtgatagagtgagattttgtttttaaaaaaaaaaaagttaatttgaggttaggtatggtggtttatgtttatattttcggtattttgggaggttgagatgggtaaattatttgaggttaggagtttaatattagtttgggtaatatggtaaaattttatttttattaaaaatataaaaattagttaggtgtgatggtgttgtttgtaattttagttgtttgggtggttgagatcggaggattatttgaattcgggaggcggaggttgtagtgaggcgagatcgtattattgtattttagtttgggtaatagagtgagatttagttttaaaaaaaaaatttattgttttttttttttgtttttgttttttgttaatttttgtttttattttaatttttgtgagattttagtagacggaagattttggtttaggggttagagattttatttttatgaattatttattagttgtgtggttttggatttatttttgagatttattttttttgtttgtataatggaattagggtttttagaggtggagtagttgatgaatatgaaagtatttggttattggaaagggtttttttagttttacgtgagaggttttttttgtggtatttgtaataataatggttttttttttttttttaga

SEQ ID NO: 276 - DNA, 12763 bp, Artificial Sequence
  chemically treated genomic DNA (Homo sapiens)
tttggaaagaaagaagaagttattattattataaatgttataaaaaggattttttacgtggggttggagaggttttttttagtggttaagtatttttatatttattaattattttatttttaggagttttagttttattatgtagataaagaaaatgagttttagaaatgagtttaaggttatatagttagtgagtggtttatggaaataaggtttttgatttttgggttagggtttttcgtttgttgagattttatagaaattaaaataaaagtagaaattaatagaaaatagaaataagagagaagagtaatgaattttttttttgagattgagttttattttgttgtttaggttggagtgtagtggtgcgatttcgttttattgtaattttcgtttttcgggtttaagtaatttttcggttttagttatttaagtagttgggattataggtaatattattatatttggttaatttttgtatttttagtagagatggggttttgttatgttgtttaggttggtgttgaatttttaattttaagtgatttgtttattttagttttttaaagtgtcgagagtataggtatgagttattatgtttggttttaagttggtttttttttttttggagatagagttttattttgttatttaggttggagtgtagtggcgtgattttagtttattgcgatttttgttttatgagtttaagtgatttttgtgttttagttttttaagtagttgggattataggtttatattattacgtttggttaatttttgtatttttagtagagatagggttttattatgttggttaggttggttttaaatttttgattttaggtgatttacgcgttttagttttttaaagtgttggtattataggcgtgagttatcgtgtttggtaagttgtttttttaaatcgataaaattgataaatttttagataaattgattaatagaaagagaaaatataaatattaatatagaaatgagagatgtgagattattatagattttatagatattaaaaggataaagggaatattataaaaattttatgttaatatatttaattatttatataaaatgggtaaatttttttaaagatataaattatgaaagtttatttaagaagatatagattatttgaatagtggttatatttattaaagaaaataaatttgtagtaaaaaattcgttttttcgttaaaaaatttaagtttagatggtttttttggtaatttttattaaaaatttaaaaaggatataatattaattgtatataaaatttttaaaaaaagagatgatagaatattttttaatttattttatgttgttaatatttttttgataataaaattagataaatatattatgtaaaaagaaaattatagattagtattttttatgaatatatatatataaaaattaatataatttggttggatacggtggtttacgtttgtaattttagtattttgggaggttaaggtgggtggattatgaggttaggagttcgagattagtttggttaatatggtgaaattttatttttattaaaaatataaaaatttgttgggtgtggtggtacgtgtttatagttttagttatttaggaggttgaggcgggaaaattgtttgaatttaagaggtagaggttgtagtgagttaagtttatgttattgtattttagtttgggtgatagagtgagattttattttaaaaaaaaaaaaaaaaaaaaaaaattaataaaattttagtaaatgaaattaaataatatataaaaaataaattatgatgattaaatgaggtttattttaggaatgtaaggttggtttaatatttgaaaattagggtgatgatagttaataataatgtagtgtatattttaagatagttagaagagaggatttgaatgttattattataaagaaatgataaatgtttaaagtgatggatatgttaattattttgatttgattattatataatatatatatatatattgtatatgtataatgaaatattatattgtttttgttaagtatgtgtaattattatttgttaattataaatttaaaataaataaataaagtcgtttataacgtaaaaaaaaaaaaaataggttaaaatttgaaaattaatgttatatattttattaataaatatgtatgtgtaattattttaatagatgtagaaatagtatttagtaaaattttatatttatttttagtttaaaatttttttaagtttgggtaatataaggagattataattttataaaaattttaaaaattagttaaggttaggtgtagtggtttatatttgtaattttagtattttgggaggtcgaggtgggtggattacgaggttaggagttcgagattagtttggttaatatggtgaaattttgtttttattaaaatataaaaattagttgggtatggtggtatgcgtttgtaattttagttatttgggaggttgaggtaggagaattgtttgaatttaggaggtagaggttgtagtgagttgagattgtgttattgtattttagtttgggtgatagagtaagattttgttttaaaaaaataaaataaaataaaataaataaaaattagttaaatgtggtagtgtaagtttgtaattttagattttagttatttaggaggttgaggagtgagtatcgtttgagtttaggagatagaggttgtagtaagttaagattatgttattgaattgtaatttggatgatagagtaaaatttttttttaaaaaaaaaaaaaaaattttttttttatttataaattaggaatagaaagaaatttttttaatttgttaaaaaggtatttattaaaatataataaataaataaaaattttttatttaatattatatttaatggttgttttaattttaaattttttttttgagaaattttatttatttttaggtattagttattaattttgtatgtttagttttttttaaatgttagaatgatgaatattttttttggataaaagttatttaagggaaaaaatgttaaacgtaagtattttttaaaaagatattatttttttaaaaaatttagaaaatgtaatagttacggttttatttattgtcgtttttataggtttttattattagaggatttttttttttggtttaaaatgtagagattatagagttagtatgtatttcgtatataatataatttatgttgtgtatttatttggatagagtttgtgtaagatgagttttagtggtatagggtaagggtttggggaattggagggtaaaaatgtaagttggtattattaggagatttttgggggttggggtagtaggattaggaagtgtaatatttcgtaggggttagggaagttaggggtagggggaaggtagatgatagagtagaaggtattaagtttgagtaggaaataaagagggataggttaagggtagtgataatggatgtgaaatgttgtgtgaattatgattttttttttttttttttaatttataaaatagtggaaggtatattttggtattacgatttcggaagaggatatgtagagagtagaggtttgcggagggaaattttaacgtttttttattttatagaggattatatgttgtgtttatattttttgtaataggtagtttagtttgtgatttaggtttgagttggtgaagtggttgttttaagtttaagttattagggagcgtttaagaatgagatacggagtgcgttaattgttatttttattattttttattttgtgtttaatttaaaattaggtagtttatatgttagagagttatattagggtttggatgaaaggggtttggtaggtcgggtgcggtggtttacgtttgtaattttagtattttgggaggtcgtggtgagtagtttatttgaggttaggagttcgaaattagtttggttaatatggtgaaatttcgtttttattaaaagtataaaaattattcggaaattatttgaatttgggaggcggaggttgtagtgagttaagatttatgttattgtattttagtttgggtaatggagtgagattcggttttaaaaaaaaaaaaagaaaagaaaggagtttggttgtttattagaatgattttgggattttattaaaatgtcggtattgataaagattttttgtttggttaaattttaattaggtttttgaattatttcgtaggtttatttgtgtgtttgtaaaattcggttttagtaaaagaattttgttaaggttatttatttagaattttttatttttgatatttggtcgatttgattgatgttttttatttagaaatttttttttttttttttttgagatagagttttattttgttgtttaggttggagcgtagtggtatagttttagtttattgtaatttttgttttttgagttgaagtaatttttttgttttagttttttgtgtagtgggattagaggcgtgtattattatatttggttaattttttgtatttttagtagaggtgaggttttattatgttagttaggttggttttgaatttttgatttttagtgattgtttattttggttttttaaagtgttaggattataggcgtgaggtattgcgtttgggttatattttttttttttaatagtgtttaagtttttggtttggggattttgattttataggtttggaatggggtttgattatttatattttgaatatatgtttaaagtgatggtagtagtgttagtgaattttgtttagaatagtgttaaatgtttatttgtatattagaattatttgggggtttttgaaaaattttagtgttagttaggtatggtggtttatgtttgtaattttagtatattgggagattgaggtaggtggaatgtttgagtttaggagtttaagattagtttgggtaatatggtgaaattttgtttttataaaatatataaaaattagttgggcgtggtggcgtatatttgttattttagttatttgggaggttgtagtataagaattgtttgaatttgggaggtggaggttgtagtaagtcgagattatattattgtattttagtttgggtgatagagtgagattttgttttaaaaaaaaaaaaaaaaaaaagtaatttatagaaaaataagaaagaaaaattttagtgattagtttttatattggatttattaaaattagattttttaggtggagtttggatgttagtgtttgagaagttttagatgattttaatgtttggttagggttgaaatttttgttgttttattagatttttgtttcgagattttttgttttagttttttttggggaagggtttattttgatttttggttttttatttttttttttattttagttttttgtttaagtttatagttttttgagtttttttagtgtttatgtttatttttatatttattaaagtttttttattttaggttgggtatagtggtttatgtttgtaattttagaattttggaaggttgaggcgggtggattatttgagattaggagtttaagattagtttggttaatatggtgaaattttatttttgttaaaaatataaaattagttaggtatggtggtgcgtgtttgtagttttagttatttaggaggttgaggtaggagaattgttggaattcgggaggtagaggttgtagtgagtcgagatggtattattgtattttagtttgggtaatagaggaagaatttgttatatatatatatatatatatatatatatatatatatatataagtttttttatttttttaggttcgtattaagttttagttgtttaaggaaatttttaggatattaagtggttttcgttttttttgggagtttttttagtttttttttttgggagtatatattttagtttgttttatagtataaattggttgttttatattttaattggagtaaggatatatttgatgtttttgttttttaagtagtttagtaaagagtttattttattttatttaacgtttgtgttgggggtttggtattgggggtgatatgtatagagataaagaatagtttatgttttatggtttagttgtagggtgtagtgaataagggagttattatatttagtgaaatcgtagacgaattttttttaagtggggaatgttatagaattatagatgttagtattagaaagtgttaaagttgaagaggggagttggggtcgggggggaggaataaaataaaaaaaagaaagcgttaaagtttttatttagttttgttttgtttgtatcgttttatatatatttatatacgtatagtgtagaaattttttttatagtattttttattattttttttttgaaggtttttagtgatgggaaatttattattttattaaatagttttttttatattttttaaagtttttatttttttttattttgttatagtgtggtgagttatggattcgtttatttttattattatattgtagggttttttagggtaggaagtgtattttgtttttggatttagttggaattttatgtaggtgtttaaagaatgtatttgattaattggatttgttgggttttgattattagattggggtggtatttaagggatagtttaggattttaaaaggttgggataggttggagtagttttaggaggtagagagtaggggttaggggttttagattgttatggggttgggggaggggaggacgtaagttttgttggttgttttatggttttgatttaggttgtttttgaggatatattgggggatttcggagaggaggttatcgttatatatatttttaaggaaagatttgatagttattagagggataaaaattttgtcggggtttagtggtatttttgttttttttagattttgattttattgatttttaataggttttttttttttatagtttttgtttgtttttaggtgtgaaatgaaatagtatttttattttttttggtggaggtaggtgtttattttcgaaattaaattgaattttttagtttgggatatggtatttttagaatttaggtttagaggttttatttggggattttaaatggttttttttttgatattaaataggttttttatttttttttagggttaattattttttttttttttattttttattttagatagtttatttagatttttagttaaggttttttagagtttgtaaaataattaaatgtgttatttgtatttgaatttaaatggttaggattgttttgttttttttttaagttatttttatttaaatagtattatattatagttttgttttggggataggtagtttttaatttgattttatttttagtttggttgagggtttttaggagtagtgtggtggttttcgttaggaggtttggtatagttgggataagttttgatttaagagtttttttatgtgtagtatggtatagtttatttattttttcgtagggttttatagttgttattagattaggtgtttggagtttggtataaggttggtaggatagtaggttgggggaattttattttggtataatgtggtatttagaaatgtgggtttttgtttttaggttattatagttagttttcgtttgtttatttaggagggtattacgagtcgcgttggtagttattttgttatttttattttttaatatttttattttttttttttttttttatttttgtttcgtaggttcgttttttttttagtttgttttattcggttttttattttttttttatttttttggttgttttaattattagttttatttattagttttatttttgggttttttttttagtcggtgtggaggcgatgtttttcgatagggaggggtaggtagtgttgggagttagtaggtttgaagtagaagagtagttattggggtgggtagtgggtatgttaggtcgtttttttagaggggtatatagggaggttggaggtttatatagttttattatagtggttttagttcgttgtaggttatagttaaggtaaattagggagggtatttttgagtttgagattagtaaggaaagttatgttttttatttagggtttggggtaggcgcggtatagtttttatcgttgttgggttagttatattttttgggtagggttattggttttatattatttttttttttttttttagtttgtttttttttttgttttgaatgtaagtatttgattttttttaagattagttttttggttttttttgttttttttttttttttgagatagggtttattgttacgtaagttggagtgtcgtggtattattatcgttaatcgtagttttgaatttttgggtttaagcgatttttttgttttagttttttgagtagttgatattataggtttgtattaatatgttcgattaatttttttattttttttggagatagagttttgttatttaggttggtttagaatttttgaattgaagtaatttttttattttggttttttaaagtgttgggattataggcgtgggttattgtatttggttaagtttagtttttagggaatggttgaggttataaaatattttttattatttttcgtatgttatgttgatgttttttaggtttttattttttggtttgttttttatttattagatgtttattattatgatttttgggttttgggttttttgagagatagtttattttgggttgatttagggtaattattttgtttatattatagttattagattttagagtttgttttttttaattcgttggttttttggaggatatcgaggttttgagagtataagagattgtttataaatatatagggagtggaagtttttgtaagggaggtttttatttttttttgaatttttgggggaaggatgagcggatttagtatgaggttttaggagaaagtgagtatttagttatgtagttatataagcgtagtttttttgtttagaatttagtcggtttgttttggaaaggtattggttagtaggttggtttgagataaggttttaggtttagggttaaggtttggggattttggagtaaaatttggaataaatttttttaattagtagatttttaaataaaattttattatttgattgcgtgggaaaagtttggagaaaatatagtattggataggttgggtatggtggttgttttcggtaattttagtattttgggagattgaggtaggtagattatttgaggttaggagtttaagattagtttggttaatatggtgaaattttgtttttattaaaaatataaaaattagtcgggtatggttatgggtgtttgtaattttagttattggagcgattgaggtagaagaattatttgaatttaggaggcggaggttgtagagagtcgagatggcgttattgtattttagtttgggagataaagtaagattttattttaaaaaaaaaaaaagtaatattggatgaatgttttttattgaaacgaaattgataaaattttattagagtaagacgggaagttaaattttttttttaaagaatatggtttgtagttagtatttaagtgtttttatggttaaattgttaggtttaaaaatagggtaatatgggtcgggcgcggtggtttacgtttgtaattttagtattttgggaggttaaggcgggtggattatgaggttaggagttcgagattagtttggttagtatggttaaatcgttatttttattaaagatataaaaaattagtcgggggtggtggcgtatgtttgtaattttagttatttaggaggttgaggtaggagaatcgtttgaattcgggaggtagaggttgtagtgagtcgagattgcgttattgtattttagtttgggtgattgggtaagatttagttttaaaaaataataataataataataataatagggtagtttggtggagggtgggaggagggagagatttaggaaaataattaatgggtattaggtttaatatcggggagataaaataatttgtataataaagttttatgatacgagtttatttatataataaatatgtatatgtatttttgaatttaaaagtttaaaaaagaaaaaaaaggatagtttgggtgagaattttagtagggtttagtttttataaaattataggttgggcggttaatttggtagagtgataagagttagataatttggttttttattagttgtgtaagtgatttaattttttggagtttttttgtgttttaatttgtaatacgtgtatatagttaaatgtgaagatgaaatgagattttatgattaatgagtaaataatatatgttcgataaatttagattttttttttttttttttagtttgtaatgtgttattagtatttgaggtagaaatgtgtttggttatttttttagttttcggtttttttataggaggaaagaaagttaaattatagagtatttttttatttttatttttagttttagcgttggaaagttttatagattttggttataatagcgtatattttgggtggtttttaagttttggattttgtgatttacggagggaataaggattaatgggaattattgttttttatatttagttgtttaggttaaagttttttttattattataggaaaaaaggggagaggtttatatattaatagcgaaataattggttgggcgtagtggtttacgtttgtaattttaatattttgggaggtcgtggcgggcggattatttgaggttagaagttcgagattagtttgattaacgtggcgaaattttatttttattaataatataaaaattagttgggcgtggtggcgggcgtttataattttagttattcgggaggttaaggtaggagaatcgtttgaattcgggaggcggaggttgcggtgagtcgagatttcgttattgtattttagtttgggtaataaaaataaaatttcgttttaaaaaataaataataataatagcgaaataaaagggtcggtcgtttagtttaggattttcgggagcggttaggaatttaatgtatatgttaatgagttatttggtaacgacgttttagaattagtttttttattagacgtatagtgtttttatttttgtggttttttttgagtattattgtttagtttgttttaaatgaagtaaaataaagtatttttttagtacggatttattttttttcgtttttttttataggaagttaggagacggcgcgtttttaagagaggatttcggttgtgggagaagaggagggagcggggcgttttcgaatcggttaagttcgttcgatttttatatggggagtttaggttttcggcgatcggatttcgaagcgtattatttgtttgttaacgttttgtttcgaggttttgggcgttgttttagtcgtttttcgttttttggaggtgcgcggttaggagtcgttttcggtgagttagagggaggggttcggtcggtttgagttggcggggagtttttatgggaggttggggcgttcgaaagggttttagaattgggcgtgggaaggagggtataggggaagttaaggataagtttattgtgttgtaaattttgcgagagaattgtagtgtttatttttatttaatcgttagttttcggttttaattattttgtgaatagttattgttttgtgagagtttattatgtgtttggtgcgtttttatatttattattattatttttgttggaaatatgaagtttttgggaggtttagagagggtaattaatttgtttagagtgttatattgttagtttagtagtagaattaagatttttttttttttttttgagatagggttttattttgtcgcggtatttggagtgcggtgttgtgattatagtttattatagttttaattttttaggtttaagtaattttttagttttagttttttgagtagttgggattgtaggtatatgttattacgtttagttaaatttttttttttttttggagagattgtgttttattttattgtttaggttggttttaaatttttgggtttaagtgatttttttgttttggttttttaaagtgttggtattataggtatgagttatcgtatttaattgttgaattaggattttaatttaggttgatttgatttgtaatatttgattttttttttttttatttagaggaaaataggttagtaagtatttgtattaggaggttaggttttttggaaatgtgttggatagcgatgggtttatattttcgttttggtttttgaatgtggtatagttaatttatgagagatgttagttgataaagagtatgaggattaggttatggttttgtgatatagtggtaagatttttttgtgggaggtagtttcgaaaattttaattagaatgagtttttttgaagtttatgggtggggtttggggtaaggaaataatttttttatttgggtgattttagataagtatattttagtaaggagttttcggaaattatttttcgttgtttattatttgtttttttttgattaattttgtttattttgtagatttagtttaaatattttttttttgaaattttttttgtagtgttttttaggtattttggatattaagttattgggttatttgtatttatacgtttatgggaatattttttaggtatattcgatagtaaaagtggatttggatttatgggtaatttggtttgtttttagataattaggttttt

SEQ ID NO: 277 - DNA, 6309 bp, Artificial Sequence
  chemically treated genomic DNA (Homo sapiens)
atattttttttattattaaggtattaaaatgataagtagtagaaatatagttaaagtatataaatattgggagttgaatagtttttagttaattaattattttgtttgaaagttttagtaatgagatttttaggatttttatttattaaattttcgaagggttattttagattaaaataattttttaggttagtgggtagatagttattagtagttttagtggaaataggttattatattagttattgataatggaggttatatagttagtattttaggagaaatagtagagatattggtattttatattagatttgtttgttttatgataagttttgttaaaggttatagtgttatacgaagatttgttagaattagatagttgttgttgttttttttttttttttttttttttttattgagatagaattttgttttgttatttaggatggagtgtaatggtacgatttcggttaattgtaatttttgtttttcgggtttaagcgatttttttgttttagtattttgagtaatcgagattataggtatgttttattaggtttagttaatttttgtatttttagtagagaaaggtttttattatgttggttaggttgatttcgaatttttgattttatgtaatttatttgtttttgttttttaaagtgtaatagttgttttttgatagttgtttttatttaggtcgacggtattagattgttgtttaattagagttagggaaaggggagtttgattatttatatgtaaggatatagagattttatatttaatttatattaattaaattttagttaagtatttatttttaaggaaattaagagatttggagtttagtttgtttttatagtgaattggttgagtgattttggttatggtatttgatttttttgggttttgttaaagaaaagagataatttttagtttgggtgtagtggtttacgtttgtaattttagtattttgggaggtcgaggtagggggtttatttgagtttaggagttcgagattaatttggttaatatggtgaagttttatttttattaaaaataataaaaattagtagggtatggtggtatatgtttgtaattttagttgtttaggagattgaggtaggagaatcgtttgaattcgggaggcggaagttgtagtgagttaagattgtattagtgtattttagtttggtgatagagagagattttatttaaaaaaaaaaaaagagagataatttttaaaattttgtgagttttttgatatttaattgttaaaatatagtagatattttaagtttttttagttgtaaaatggatttagtgaaatttgtagagtttttttataaatttaaaatattttatgtgtatagaaagggaaaaatagtaatattattagggagaaatttagtaaatattattttaggtaagtgattaaagttgatattatttgtaataaaatttattaatattatgtgtttttaaatatggtttgaggaggtagttatgttatatttgtgatagtttttttttaaatttataattttagtttaattatgtgaaaaatattagagaaatttaaatttagggttattttataaaaatttgataagtattttttaaaagtgttacggttatgagagataaagattgtggaatgattagagattggaggatattatttttgtaatttttttgtaagtttttgtaagttttttgtaagtttaaaattattttaaaataaaaagttttttaaaggtttttgtgaagtggttagtttttagtaggtatttaatgaatgagaggtattataatgataagtaaagatattgtttttaatagtgttagtaattaaagaaatgttttttggtggaaaagatagagttattagttggtaatgttgtgtagtagaaattattttagttatagatattatatgatcgtgggtgaaatatgttataaaaattagttttttatttttgaaggggtttttgggaattgaaatgtgtagttgtttatgtgtttattatttgttttttgtttatgggttcgagttggatttttttttgatagtattggtttttatagttgtgttattgaataaattttgagtttggatttgtttatttgagagaatgttttatttataataattgatagagtaaaatgaatggtattttgttttttttgtgtttgatatgtttattttgttttgataagaggttcgttggtgttatatatttttgttagttatttatagatggtgttggttgagatagttgaggaaagaaagtttagtgggtatgcggtttaagatagttttttcgtttggagtagattagtagagaaattttgattgtattggtaaagttagaagtgtaagaaatttttttttgtataggaaaattttatttattagatatataatacgtatttattaagggttttttaaatttgagagggaaatgggaatttattttttagttttacggttttatgggtaaacgggaagttaaataagtaaaaataatatagtgtgggttagtgttttgaattttagggtgggatagaatgttaggttgggatttaaatttatgatagtgggggaaagaaattttatttttgttgtttatgttattggtgattttgagggtggaagttagtttttttgttgtaggtagataggttagtttttgattggagatgttgtatattatatgagtttgggtagattatatttatttttgtgttgtttatatagtagatatttagttaatgtttattgagtggatgttgatttgcgttagcgagtaaatgtagtattcgatttgatttaattttaaagtaatattaaatttaggttttttttaataatattatttattgagtgtttaagaaaattttggtattgtgtaaaatgtattatataaattatttaattgttattaaaatttaataatagaatgattgtaattgtatttattttataggtgagaaatttgagatagaaaggaagaaataatttatttaaagttatataggtatagttaataaggggttaatttagattttgaatcgaggtggttagttattagagattattgttttttattttgtttttttaagattagtaaaaagttttgggtatttttttggagggatagatggttaggttgatggtttttgtaagtttagatatagagttttttaaagtcgtaattttagggattaggaggttgatagtattttttattttatttgttattttttatttttttttatagtttttaattttggattattgagattggtcgtatgggaataggtatgattgtagtttaggatatgtttttattttgttatatttgaaatgtgtttatttttttatagtttagggagtagttattgtgggtagaagataaggtggaggttaggtaggtattttttttttttagagttatttatgtttttatttaagagttttgaaattaggtgtgatattttaggagttgatagatagtttggtttagtatttaattttaatttttgttttagatgtttaatgtggtatggttgaatgagttaatatataatttgtatagtaagtttttatttaatattattgataggtgtttgtaaattgtgattttaacgaaaatatatcgtgtgttgtagggatttaatttttgtttatattagttagtttggttttattatatagtatattattttgtttaaagttatagtttacgagaatttatcgatgatgttaagtgaggattttttttgtttaggtgtatttttttttttttttaagacggagtttttttttgttatttgggttggagtgtagtggcgtgatttgggtttattataatttttgttttttgggtttaagtaatttttttgttttagttttttaagtagttgggattataggtattcgtcgttatattcggtttatttttgtatttttagtagagatagggttttattattgttggttatgttggtttcgaatttttgattttatgtgatttattcgtttcggttttttaaagtgtagagattagagacgtgagttatatggtttagtaggattattttttagtagatttagttttagtgtttattttgtggatggggagagataagaggtggtaaggttaagtgtgtaggtagagatagggatttttttaaatgaggattttgttgagtagtattttttatgtagatatttttaatgagcgttgatttaagaatattttaaaaaagatattaaatttaatattgaataatgttttgatattttaaaattttaggattaaaaattatgttttttaaaatttatagaatatttttgtagaatttagtatttttcgtttattttaattagtttttttgtaatattgttttttatttatttgatggttagtagttgggtggtttgtataattgtttatttaataatatgttagtagtttttagtttttttttagtgtttattttatttagatattttttttttattttttggtaatattagtattttatggtaatagaaatgtttttagttaggttttttttttattatgtagttttttttgtttttatatttatagtgtttttttatatttatttttagtttttttggtttaagtatttttaggttattgaaatataatttttattttttttttttttttttttggtatgtatgttgttggtaggagatttttaagttaatattgttttagaaattttttagtatttattttttaggagaatttatggttttagaattatagttcggtttttaagatggatataatttgtacgattttttgatgggtttttaattttgaattggatgtggatattttttttttagatgatagaattattttaattttttttttgtagttgttttttttttttgaaggtagttgtattttattttttttaaaaagtttttttttttaaagttatttgttatgtcgatcgttattagcgtatttgtggttttaaggatagcggttgagtttcggtttttagggttagttttttattcggtttagagtaaggttattgaggttgggggtggaaatttaagtggtatttatttagttattattagtcgtaatttttttattatcggagtgaaagagaagatattcgagtaattttataagaaatgtttagaaaagaaagttttttatgtggattttgagtttttatcggatgagattttttttttttatagttagaagttttttatttagttcgtttggaagagattttcggtgagtagttttttgtttgttggttgggttttttttttacggaggagtttttttatttagtattttcggtagtttagttgtgtatatgggtattgggggaaggattttggtagtagttttgttgggttttgtttttaagtgtgaagtagggaggagaggaataggttttagatattttattaaattttagtaaaatttagagggagagcgtaggaggtggggttgatttttatgttttggttttttttttttgaaaaaaaaaaaaaaattttgttttttataaaagtgggtggaatttagtttaatttattttgtaaaaataaatattttttttttagaataaattttagatagtttagatgtatttgttcgttttaaatattatttatttttgtaagattattttagtttttttggttaaaattatgatgttatttttttttaatttattaatggttatatttttttgaaatatagaaattttagaaagagaagagttataggtaaggaatatttttttatgtataaaatgttggggttaaagagagagagatttagtaatcgtttttgtttatttattttattttataagtgaggagttaaggtatattagagtgaaatatatttagtgggtatatgatagagttcggattaaaattttttgttttaggaaatttttttagtttttgggttttatttatagtgatcgttaggagggaaattatatttttttggtttatttttttgattatttttttagtgtgatttttgtttttaattcgagaaatatttattgagtatttattagtgttagtattgggtaagtaattggggggatagtagtgagtaagaaagattaaaattttagttgttttggaatttagggttttgaagggaagatgggtattgaataagagtgatattgttaggagacgatgttttgggtgttataggattatgtggtaaggagagttaatttggtttagggagataaattttt

SEQ ID NO: 278 - DNA, 6309 bp, Artificial Sequence
  chemically treated genomic DNA (Homo sapiens)
gagggtttgtttttttggattaggttagttttttttgttatatgattttgtggtatttagaatatcgttttttgataatgttatttttgtttaatgtttattttttttttaggattttaggttttaagatagttggaattttggttttttttatttattgttgtttttttagttgtttgtttagtgttggtattagtagatgtttaataaatatttttcgaattaagaataagagttatattggagggatgattagagaggtgagttaggggaatgtgattttttttttggcgattattgtaaatgaaatttagaggttgggagagttttttaaaatagaaagttttaattcgggttttgttatgtgtttattagatatattttattttagtgtgttttgattttttatttatgaggtgaggtaggtggataaaagcgattgttaggtttttttttttttaattttaatattttatgtatgaaaaaatattttttgtttatgatttttttttttttagggtttttgtgttttagaaagatatggttattggtaaattaaagaagaataatattatgattttagttagagaaattgaaataattttataaagatgaataatatttaaaacgaataggtatatttgggttgtttggaatttgttttgagaaaggaatatttatttttataggatgaattaaattgagttttatttatttttataaaaagtaagattttttttttttttttagagagaaagagttagagtataagaattagttttattttttgcgttttttttttggattttgttgagatttggtgaaatatttgagatttgttttttttttttttgttttatatttaaagatagagtttagtagagttgttgttaggattttttttttagtgtttatgtgtatagttgagttgtcggaggtgttgagtgagaggattttttcgtggggggaaaatttagttagtaagtaggaagttatttatcggaggttttttttagacgaattggatggggaatttttggttataaaagagagaggttttattcggtgggaatttagggtttatataaagaatttttttttttagatattttttgtgaagttgttcgaatgtttttttttttatttcgataataggaaaattgcggttgatgatggttgaatagatgttatttgggtttttatttttagttttagtggttttgttttgggtcgggtgaggaattggttttggggatcggggtttagtcgttgtttttggagttatagatgcgttaatgacggtcggtatggtaagtggttttggaagaaaaagttttttaaagaaaataagatatagttatttttaaggaaaggaagtaattgtaaaggggaagttggagtaattttgttatttgagagaaaagtgtttatatttagtttaaagttgaaagtttattagaaggtcgtataggttatgtttattttaaaaatcgagttgtgattttgaagttataagtttttttgagaaatgagtgttaaaggatttttgaagtaatgttgatttgggggttttttattagtagtatgtatgttagagggagagagaaagagagtgagggttgtgttttagtggtttgaagatgtttgagttaggaaaattaaaaatagatgtgaagaaatattgtgagtatgagagtaagagagattgtatggtagagagagaatttggttagggatatttttgttgttatgaagtgttggtgttgttagaaaatgaaaagggagtatttgagtaaggtgaatattggaaagaagttgagaattgttgatatgttattgagtaggtagttatatagattatttaattattggttattaaatgaatggaaaataatattgtaaaaaagttagttagggtgaacgggaggtattgaattttataaaaatattttgtgaattttagagaatatgatttttagttttaaaattttaggatattagaatattatttaatgttagatttggtattttttttagaatgtttttgggttagcgtttattggaaatgtttgtatggaaaatgttatttagtagagtttttatttgagaaaatttttgtttttatttgtatatttgattttgttattttttgtttttttttatttataaaatgaatattgggattgaatttgttaaaaagtggttttgttgggttatgtggtttacgtttttaatttttgtattttgggaggtcgaggcgggtggattatatgaggttaggagttcgagattagtatggttaataatagtgaaattttgtttttattaaaaatataaaaataagtcgggtgtggcggcgggtgtttgtaattttagttatttgggaggttgagatagaagaattgtttgaatttaggaggtagaggttgtagtgaatttagattacgttattgtattttagtttaggtgatagaaagagatttcgttttaaaaaaaaaaaaaagtgtatttgagtagagaaaatttttatttaatattatcgataggttttcgtaagttgtgattttaagtaaaatgatgtattgtatagtgaaattaggttaattgatataaataagagttaagtttttatagtatacggtatgttttcgttaaagttatagtttataagtatttattaatgatgttaagtgaggatttattgtataggttatatgttgatttatttagttatgttatattaggtatttgagatagaagttggaattagatattgaattagattgtttgttaatttttgggatgttatatttggttttagggtttttagatgagagtataagtggttttggggaagggaagtgtttgtttggtttttattttgttttttatttataatagttgttttttgggttgtaaggagatgagtatattttaagtatggtagagtggaggtatgttttaggttgtagttatgtttgtttttatgcgattagttttaataatttaagattagaggttatggaagaaggtgggaagtgataggtaaaatagggagtattattagttttttgatttttgggattgcggttttgaaggattttatgtttgggtttgtaggaattattagtttagttatttgtttttttaagaaaatgtttagggttttttattagttttggagaggtagaatagaggatagtggtttttggtgattgattatttcggtttaaagtttaggttggttttttattggttgtgtttgtgtaattttaggtgagttatttttttttttttgttttagattttttatttataaaataggtataattatagttattttgttattaggttttggtaataattaaataatttatgtaatatattttatatagtgttaggatttttttaagtatttaataaatggtgttgttagagaagatttgaatttaatattattttggagttagattaggtcgaatgttatatttattcgttgacgtaaattagtatttatttaatgggtattaattgaatatttgttatgtggatagtataggaataggtataatttgtttaggtttatgtggtatgtagtatttttaattagaagttggtttatttgtttgtaataaaaagattgatttttatttttaaagttattagtggtatagatagtaaaggtggggttttttttttttattgttataagtttgggttttagtttagtattttattttattttgaaatttagagtattgatttatattgtattgtttttgtttatttaatttttcgtttgtttataagatcgtggagttgggaagtgggtttttattttttttttaggtttagaaggtttttaataaatgcgtgttatatatttggtgaatgaaatttttttatgtaaagagaaattttttatatttttggttttgttagtgtaattaaagtttttttgttgatttgttttaggcgaaggagttgttttgggtcgtatatttattgagttttttttttttagttgttttagttagtattatttgtgagtaattaatagaagtgtgtgatattagcgagttttttgttagagtagggtgggtatattaaatatagaaagggtaaggtgttatttattttgttttgttagttgttgtggataaaatatttttttagatgaataggtttaaatttaaggtttatttaatggtatagttgtggaaattaatgttattagggagaagtttaattcgagtttatgaataaagggtagataatgaatatataaataattgtatattttaatttttagaagtttttttaaggataaagaattagtttttataatatattttatttacggttatgtaatatttgtggttggaatggtttttgttgtatagtattgttaattaatggttttgttttttttattaagaagtatttttttgattattaatattattggaagtaatgtttttgtttattattataatattttttatttattaagtgtttattgggagttagttattttatagagatttttaaaaaattttttattttaaaataattttagatttataaaagatttgtaaagatttataaaagagttgtaaagatagtgttttttagtttttgattattttatagtttttgttttttatgatcgtgatatttttgaagagtatttgttaggtttttgtagaatgattttaaatttgggtttttttgatattttttatatgattagattgaggttatggatttaggggaagattgttatagatgtgatatggttatttttttaaattatatttgggggtatatgatattgataggttttattataggtgatgttaattttgattatttgtttaaagtgatgtttattgggtttttttttggtaatgttattatttttttttttttgtatatataagatattttaaatttgtagaaaaattttgtaagttttattaagtttattttataattgaggaaatttgagatatttgttgtattttgatagttaagtattagaaaatttataaaattttagagattatttttttttttttttttttagatggagtttttttttgttattaggttggagtgtattggtgtaattttagtttattgtaattttcgtttttcgggtttaagcgatttttttgttttagttttttgaatagttgagattataggtatgtgttattatgttttgttaatttttgttatttttagtagagatggggttttattatgttggttaggttggtttcgaatttttgaatttaagtgaattttttgtttcggttttttaaagtgttgggattataggcgtaagttattgtatttaggttagagattattttttttttttaataaagtttagagaggttaaatgttatggttaagattatttagttagtttattgtagaagtaaattagattttaggttttttgatttttttggaagtaaatgtttgattaagatttaattgatgtgaattaggtataagatttttgtatttttgtatgtaaatagttaggtttttttttttttggttttgattggatagtaatttaatatcgtcggtttgggtggaaataattgttaagaagtagttgttgtattttgggaggtagaggtaggtggattatatgaggttaggagttcgaggttagtttggttaatatggtgaaaatttttttttattaaaaatataaaaattagttgggtttggtggagtatgtttgtaatttcggttatttaggatgttgaggtagaagaatcgtttgaattcggaaagtagaggttgtagttagtcgagatcgtgttattgtattttattttgggtgatagagtaagattttgttttaataaaaaaaaaaaaaaaaaaaaaaaaagtagtagtagttgtttaattttggtaagttttcgtgtggtattatagtttttagtaaggtttgttatgagataagtagatttgatataagatgttaatgtttttgttattttttttagaatgttagttatatggtttttattgttagtggttaatatgatagtttgtttttattggagttgttgatggttatttatttattggtttgagaagttattttagtttagagtagtttttcgagggtttggtaggtggaaattttaggaattttattattaaggtttttaggtagagtggttaattagttaaaaattatttaatttttagtgtttatgtgttttgattgtgtttttgttgtttattattttgatgttttgatagtgaaaaggatgt

SEQ ID NO: 279 - DNA, 8201 bp, Artificial Sequence
  chemically treated genomic DNA (Homo sapiens)
gataaaatattatgagaggttgggtatggtggtttatatttataattttagtattttgggaggttaaggtggttagattacgaggttaggagtttgagattagtttggtgaatatagtgaaattttatttttagtaaaaatataaaaaattagttaggtgtggtggtgtttgtaattttagttatttgggaggttgaggtaggagaattatatgaattcgggaggcggagatggtattattgtattttagtggggtgatagtgcgagattttgttaaaaaataaaaaataaaaaaaaaaaacgatgtttttttatatagtgagttttagttaaatttaaatatatttaattttttatttagagtatagaaaataaaattggtagtttatatgttaaaaggtggatgtttttttaattttgggtttttaatttttaaaaatattaaggtaataaattaggagaatttttggtaaagaatttgataaacgtaatatatcgtgtgtattttgtaattagtttattttttattaaatagatttataaaataaattagttatattgagtttgtttttgggataagtaattgaatatgtgattgtaaaggtagagattttttttggttttttttggtttttttgtttaaagtttatgagttttgtaatattttgttttttattttgttaattttttttttattatttttattatttgttatatttgaatagtttgaatattttagttatatattatatattaggtgtattagtttgtttttatgttgttaataaagatatatttaagattgggtatttataaagaaaaaaagaggtttaatgggtttatagttttatatggttggggaagttttataattatggtggaaggtaaaagaggagtaaggatatattttttatggaagtagataaaaaggtatgtgtaggggaatttttttttatgaagttattagattttatgagatttttttattattatgagaataatatgggaaaaatttatttttatgatttaattattttttattaggtgttttttatgatattaggggattattataatttaaggtgaggttttggtggggatatagagttaaattttgttattttgtttttggttttttttaaatgttatgtgtttatattttaaaattaattttgttttttaattgttttttaaagtttttatttattttagtattaatttaaaagtttaagtttaaagttttttttaagataaggtaagttttttttatttatgagtttgtaaaattaaaagtaagttagttattttttagatataacggggatataggtattgggtaaatatatttattttaaatgggagaaattggttaaaggaaggggttatattttttatgcgagtttaatatttagtagggtagttaaattttaaagttttaaaatgatttttgattttatgttttatatttcggttatgttgatgtaagagtcggggttttatggttttgggtagttttattttcgtggttttgtagtgtatagtattttttttagttgtttttatgggttggtattgagtgtttgagtattttaggtgtatggtgtaagtcgtttgtggatttattattttaggatttggaggatggtggttttttttttatggttttattaggtagtgttttagtgaggattttgtgtgggagtttatattttatattttttttttgtattgttttagtagaagttttttatgagggttttatttttgtagtaaatttttgtttggatatataagtatttttatatattttttgaaatttagatagaggtttttaaattttaatttttgatttttgtgtttttataggttttatattatatggaagttgttaaggtttggggtttgtattttttgaagttatagtttaagttattttttggttttttttagttatggttttagtggtttaggaagaagggtattaagtttttaggttgtatatagtagaagggttttcggtttattttatgaaaatattttttttttttttaggtttttagttttgtgataggaggggttgtttggaaggtttttgatatattttggagatatattttttattgttttggagattaatgttttagagattaatatttggtttttcgttatttttgtaaatttttatagttggtttgaatttttttttagaaagtgggttttgtttttttagtatattatttggttgcgaatgttttaaatttttatgttttgttttttttttaaatataagttttaattttaaattatatttttgtaaatatataaaaatgaatgtttttaatagtatttaaattatttttggaatgttttgttgtttagaaattttttttgttagatgttttaaattattttttttaagtttaaagttttatagatttttagggtaggggtaagatgttattattttttttattaaaacgtagtaatagttatttttattttattttttaataagtttttatttttattcgagatgagtagtatttagttaaagttatttaataagtttttagaaagttttagattttatttttttatttttttttaagtttttagaattgttttaatttttgtattttatttagttttaatatcgtttttatatttttggagatttttatagtagtattttattatttagtataaatttattgtattagttattttttatattgttaataaagatatatttaaggttgggtaattatatagaataaaaaagatatttaatagatttatagttttatatggttggggaggttttagaattatagtaaaaggtaaaagaggagtaaggatacgttttatatgggtgtaggtaagagggtatgagtagaggaatttttttttataaaattatcggattttatgagatatttattattaagagaatagtatggaaaaaaaatagtatttatgatttaattatattttattagatattttttataatatatgaggattattataatttaaggtgagatttgagtagggaaatagagatagattatattattagtttttatgtttgttttttttttttgaatgtgagattaaaggggaaaggattatgatatgttttgattgaatttttggtatttagagtaatgtcgttcgtatatgtttgttaaatgaatgattagatgtattgtttgaggattttaataaaagataaatttagttaaataatttgtaaataattatttttgattatttttttaattttaaatatttgtattaattataataatattatttattatttgtttattatttgttaggttatgttttatgtattttttatatttttttttatttaatgtttaaaattgtgtaggtatatattattaataaaattattttatatatagaggaattaatgtatagggaagtttattattttgttaaggaagggaagtttaaaatgttaagttcgatatttttattttagagtttatgttttgggtttttataatgtaattttttttaaaaataaattttttaggatgggtgggtggtttatgtttgtaattttagtaatttgggagattaaggtgggtatattgtttgagtttgggagttgaagataagtttaggaaatataaggagattttgtttttataagagatataaatattagttggttatggtggtatgtgttagtaattgtagttattcgggagtgttgagttggaagaattatttgagtttgggaagtggagtgttgtagtgagttaaggttaaataattgtatttcggtttgtacgatagaatgatattttgtattagaaaaaaaaaaaaatagaaagaaaaaagtaatgtgaaaagaaggatattaaataagaaaagttttaattttggtgaaaaatgtttttattttttaaagtaaaaatgttttatagggatatatattatttataatttttttaagagttatgaggtggggttaggggaatagtggtttatatattttaaaggttgtgttattttttttcgttaagttttttaatgattgagaaattttttattgtgtgaatttaattgtatatatatttttttaattttgttttattttttaagttttattttttttttattttgatttatttaagggttggtgaagaaaattttttatggatatattatttgatgtaggttatagttttgattttttaatgggaagaaaaataaagatatgtatatgtatgtatagtgagtattttttaatatatgtataggttttgttaaaaaggaaggcgaagtatatttttagttttagttatataagaagggaggagagaaaagttatggtcggtgagttttttattgttttaagaataggtttttgggaagaaagagttttggaaggggttggtttttttggaagttataattagtatttgtggaagtttatttgagtagaagtaaggaaaaggggggagagggaggagagaaggaattagaagatttttgtagattttagaaaggaaaggtaagtttagaaaggaattgaggttttaggggaagtttgatgttattttgtaattttaattaaatttttatttatatgttgaaagtttgatagagggtatagaattggtataggaggagtattagtagtagtggtttttaaatgaaatgggttatttttgttttattattttattaattagagttaaataaatatgcgatataagaggatgatttttgttttttagggattgatgtggaaatggtaaatttagtttttaggttattttatgtatatgtatggagattattgagggaaataagtaggatagtaatatagtaagaagagggattatttaattgtgaggagggggatattttattgatgaaatttaaatgaggttattttttgttgattatatgagaggaatatgaggttgtttttatgatgtgagaaatttttgtgttttaaatagataaggttttgaaggagaagagaaagttgtttattcgttttatgggtgaaggtataataaatggtttattggatgaattattatagataagggtgttgaataaggaagagatggagaaagtaaaacgtgaaaatgttatagttatggataagattcgagttttgattgatttcgttatttcgaaaggggtataggtatgttaaatttgtattatatatatttgtgaagaagatagttatttggtagggacgttgggatttttagtaggtaagggttagtgatttatatttaagtttatttagggtttgttttcgtgtttaatatttgatttttttattagttatgttaattggaagaaaatttttttatttttggttttagggttatatttttgtagtagggtttttattgtatgttttttgatttttttttgatttttttttttaatttttagtggtatttttttgattaaagtttattttttgttttgagtatgtggtagtttttttattgaagtttttgagaattatttgaaaagttttatgttgtgttttttagtgtttttggtaaggtaaaatatttatttgtggatttatttttgttgagtgtaaggggtttgtaggtatttatgtagttgtaaagttatatgaagttttaaggtttataattaaatattttttataatttttttttaaaattttatttttttaaaagaataaaatatattttaatgatggcgatatatttagagaatatattgaacgtatagaaaagtgaagatttttaatgggtttatttttttagttgtttttttgtattttttttgagtaagattatttggttgtttgttattaggttgtgggttatgttgtgaggtttggaaattttttatttgtaattttttttaggtttaatatagggtttaggaattgagttggttaaattttatgattatttggatttattacgtggtgaggatgagagttttggtggatttttagttattgatgtttgtggtattttttaaagttattttagagggagatgttttttgaaagtaaaagttttttgttttaagggttagggaaagtttatgtttgtttaagtagatattgtagatgtttttgtttttatttatgtgtaataaatacgtatttttttattaatgttttttttattttttattttttattattttttaaattaaagaatatttttaatattatttaatgttagttagttagttagtgttatgggagaaatttttagtggggagtgttttatagattggggtaaagttttttagagatgataagtgattattttaatattttttatttttttatagattaaatatttggaaattattttaatatgtaagatttttaaggagtattttttttttttttaggtaatgttgtttttaaaggaagagtattttttgatttatattttttttgatattaattttgtaggattaaacgtgggtaaatgggttatggagaatttttatagattggttatataattttttttttgtaatttattttgtttttgtagaaattgtttttatagttttattatttatatttatattaaaaattttgaatttgtgttttaaattttgattatttaaataagtattaaattttattatttaagtttattgaaatatttatttttattttttagagatattttattttaaatttttttagagttgaaaatgttatatttttatattttgtttttttttcggttttgtgtaatttggttattggtgttatcgttattagttgtttaaattaggaatttgaaatttatatgggattttttttttttatgtatttttaatatttaatttatggttaagttttatgtaggttttttttaaatttggaattatttttttatttttatttttattattttattaaagaatttttatttttatagtgtatttttaaatttatatttgaaagtaatgtagaggttaggaatgtaaattatttattaagtttagatattattttattgaatttattaaggttgggtattatgaatatttttttaaatgttttatagtatgggatatttaatatataaagaaatattgtattttttattatgaaaaaatagtttaaaaataatttaattatttttagtttttttttattgtttttatatttttttatgaagaaatttaatattttatttaataaatgattattttataattttttttaatatatttattttaattcgtttttttttatattagtatattttatgttgtttttgtttatttaattgattgtataataattttttaaatttgtttttaaaattaaatattattttttgttttaatagtttttaaaagattttttatatatttagaaaatttatttttattttaaaataaaggttatattaatttttttaataaggatattatattgttggattgtgttgaatttgtgatgaaataaaaggtttaaggatttttttatataaattttgtgaaaatatttttttaagtgtttgtgtaatgaatgtttagtgttataaatttatttagtgtgtattttgattttagtatttattattatatttttattttattttatatatttaatatttatgtttttttatatgtatatatagaaggaagagattttgaaggataggataaagatttattaaaaaatatttttagtgtttattattatgtatattaagtaaataaataaaaagataaatatgtattttaaaaaatattttagtagattaaattaagatttgattttattaaattttattttagggtttgaatattttgaaaaaagtttatatttttaattattttattttatatattttttgttttttgagtgttttattaggtatagattttaaattttttttttttatgttagtatttaaaatgtttgtagaaaggttgattttgaaatatgaaagaagatatttgtaatgtatatttggaaattttttgtttgaaatgtgttttattaggagtaaatttatttagttgtgttaatgatgtagattaggattgttttttttagagtgtatttttttttttgtggttttatttataggtgaggttgtaataaatataaagtggaataaatagggatgttattgtttatgatgttttttgttttttgtagt

SEQ ID NO: 280 - DNA, 8201 bp, Artificial Sequence
  chemically treated genomic DNA (Homo sapiens)
gttgtaagagataaagaatattatgaatagtggtatttttgtttgttttattttgtgtttgttatagttttatttatggatgaagttatagaagaggaaatgtattttgaggaggataattttgatttatattattaatatagttgagtgagtttgtttttaatggagtatattttaagtaagagatttttaggtatgtattataagtatttttttttatattttaggattagtttttttataagtattttagatattaatatagaaagggaaaatttaaagtttatgtttgataaaatatttagaaaataaaaaatgtgtgagataaaatagttaagaatataaattttttttaaaatatttaaattttaggataaaatttaatgggattaggttttaatttaatttattaaaatattttttaaaatatatgtttatttttttatttatttatttaatatatatggtagtaagtattaggaatattttttaatgaatttttgttttgttttttaggattttttttttttatgtatatatatgaaaggatatgaatattgaatatatgaagtagaatgaagatataatgataaatgttaaaattaaggtatatattagatggatttatagtattaaatatttattgtatagatatttgaggaaatgtttttatagagtttatgtgagaaaatttttgagttttttattttattataggtttaatataatttaataatgtgatgtttttgttaaagaaattaatgtaatttttgttttaaaatagaaataagttttttagatgtgtggaggattttttagaagttattaaggtaaaaaataatatttaattttaaaaataaatttgaaaaattgttatataattagttagataaataaaggtagtatgaaatgtgttgatgtggagaagaacgaattagaatagatatattggaaaaaattatagaataattatttgttggataaaatgttggatttttttataaagaagtgtgaaaataatagaaaaaaattagaagtagttaggttatttttgagttatttttttatagtagagaatatagtatttttttatatattgaatattttatgttgtgaaatatttaagaaaatatttatgatatttaattttaataaatttagtagagtaatatttgaatttgataaataatttgtatttttagtttttatattgtttttagatataagtttaagagtgtattatgggaataggggttttttaataaaataatagaagtagaaatagagagatggttttaaatttgagaaaagtttgtataaaatttggttatgggttgaatgttagaggtgtatgagaaggaagggttttatatgagttttaagtttttggtttgaataattggtgacggtggtattaataattaagttatataaaatcggaagagaagtagggtgtggaagtatagtatttttagttttgggaaagtttagaataaggtgtttttgggagatgggagtgaatattttagtaggtttaaataatgaagtttggtatttatttgggtaattaggatttgagatatagatttagaatttttaatataaatgtggataatgaagttgtggaaatagtttttataaaagtagaatagattataaaaagaaaattatatgattaatttatgagaattttttatagtttatttatttacgtttgattttataaaattaatgttaaggaagatgtgggttaaagaatgttttttttttaaaaatagtattatttggaaaggaagaaagtattttttgagagttttgtatattaaggtaatttttagatgtttgatttatgaaaagataaagggtattgaagtagttatttattatttttggaaaattttattttaatttgtaaaatattttttattaaaaattttttttataatattgattgattgattgatattaaataatgttaaagatgttttttaatttagagagtggtgggaggtagaaaatgaaagaggtattggtagaaaaatacgtgtttattatatatagatgaaaatagaaatatttgtaatgtttgtttagataggtataagttttttttaatttttagaatagaaggtttttgtttttaaagaatatttttttttgaagtggttttaggaagtgttatagatattaatgattgggaatttattagaatttttatttttattacgtggtaggtttaagtggttatgagatttggttagtttagtttttgagttttgtattgggtttgaggagggttgtaagtggaggatttttaggttttatagtatgatttatagtttggtaataggtaattaggtgattttatttaaagaaaatataaggaggtaattggaggaatgagtttattagaaatttttatttttttatacgtttaatgtgttttttgagtgtatcgttattattgaaatatattttatttttttgggagggtaaaattttggagaaaagttataaaaagtatttgattataaattttaaagttttatgtgattttataattatataagtgtttatagattttttgtatttagtaaaaataaatttataggtaaatattttgttttgttaggaatattggaaaatatagtatgaagttttttagatggtttttaagagttttagtaaaggagttattatatatttagaataggaaatgagttttaattagaagagtgttattgaggattaaggaaaagaattaaaggagagttaagggatatgtaatagggattttgttatagaaatatggttttgaagttagaaataagaaagtttttttttaattaatatgattagtaaagaaattaaatgttaggtacgaagataggttttaggtgaatttgagtgtaagttattgatttttatttgttgagagttttagcgtttttgttaggtaattgttttttttataaatgtatgtgatgtaaatttggtatgtttgtgtttttttcggaataacggagttaattaaagttcgggttttatttataattgtagtatttttacgttttattttttttattttttttttgtttagtatttttgtttgtaataatttatttagtaagttatttattgtatttttatttatggaacggataaatagttttttttttttttttaggattttgtttgtttagagtataaggattttttatattatgaaaatagttttatattttttttatgtaattaatagaaagtgattttatttagattttattagtgaaatgtttttttttttatagttgggtaatttttttttttattgtattgttgttttatttgttttttttaatagtttttatatatgtgtatggagtgatttgaagattgagtttattatttttatattagtttttggaaagtagagattatttttttatgtcgtatgtttatttaattttggttaataaagtaatgaagtagaaatagtttattttatttaggaattattgttgttagtattttttttgtgttaattttgtattttttgttagatttttaatatgtaagtaagagtttaattaagattgtaaaatgatattaggttttttttaaagttttagtttttttttgggtttgttttttttttttaaagtttgtaagaattttttagtttttttttttttttttttttttttttttttttgtttttatttaagtaaatttttatagatgttaattatggtttttagaagagttagttttttttaaaattttttttttttagggatttgtttttggaatagtaaaagatttatcggttatggttttttttttttttttttttgtgtgattgaaattgaaagtatgtttcgtttttttttttggtagggtttgtatatgtattgggaaatatttattgtgtatgtatatgtatgtttttatttttttttttattaaagaattagaattgtagtttgtattaggtagtgtatttatgggaaattttttttattagtttttggatagattagggtaggaggggaatggggtttggagagtaagataggattgaaaaagtatgtgtataattaaatttatatagtgaagagttttttaattattagaaagtttgacggagaaaagtaatataatttttggagtatgtgaattattgtttttttgattttattttatagtttttgggaaagttgtgggtaatgtatgtttttgtgaaatatttttgttttaagaaatagaaatattttttattagaattaaagttttttttatttaatgtttttttttttatattgtttttttttttttgtttttttttttttttgatatagggtattattttgtcgtgtaggtcggaatgtagttatttgattttggtttattgtagtattttattttttaggtttagatgatttttttaatttagtattttcgagtagttgtaattattggtatatgttattatggttagttaatatttgtattttttgtaaagatagggtttttttgtgttttttaggtttgtttttagtttttaggtttaagtaatgtgtttattttggttttttaaattgttaggattataggtatgagttatttatttattttggagggtttatttttgagggaaattgtattgtagaggtttagagtataggttttggaatgagaatgtcgaatttagtattttaaattttttttttttggtaagataatgaatttttttatgtattggtttttttgtatgtgaaataattttattaatagtatgtatttatatagttttgagtattaagtgagagaaaatgtggaaaatgtatggaatatagtttggtaaatggtaagtaaataatgagtgatattattataattaatataaatgtttaaggttagaaaaataattaaggatgattatttgtagattatttagttaagtttattttttgttagaatttttaagtagtgtatttagttatttatttagtaaatatatacggacgatattgttttaggtgttagaggtttagttaaaatatattatggtttttttttttttggttttatatttaagagggaaagataaatatgaaggttggtgatatggtttgtttttgtttttttatttaaattttattttgaattgtaataatttttatgtgttatgggaggtatttggtgggatgtaattgaattatgggtgttgttttttttttatgttgtttttttgataatgaatgttttatgagattcgatggttttataaaagggaatttttttgtttatatttttttgtttgtatttatgtaagacgtgtttttgttttttttttgttttttgttatgattttgaggtttttttagttatgtggaattgtgagtttattaaatattttttttgttttatataattatttagttttgagtatgtttttattagtagtgtgagaaatgattaatgtagtaaatttatattgagtaatggagtgttgttgtaaagatttttaaaaatgtggaagcgatgttggaattgggtaaaatgtagaggttggaatagttttgagggtttagagaaagataggaaaatagaatttggaattttttagagatttgttgaatggttttgattaaatgttgtttatttcgaatgaagataggaatttgttgggaagtggaataaaagtgattgttgttgcgttttagtgaagagagtggtggtattttgtttttgttttagagatttgtggaattttgaatttgagagagatgatttagggtatttggtagaagaaatttttaagtagtaaagtattttagaagtgatttgggtgttgttaaaagtatttatttttatgtatttgtaaagatatggtttggaattggaatttatgtttaaaagggaagtagagtataaaagtttgaaatattcgtagttagatgatgtgttgggaaagtaaaatttattttttaaggagaaatttaagttaattgtagaaatttgtagaagtaacgaggagttaaatgttaatttttaagatattaatttttaagataatggggaatatgtttttagagtatgttagagattttttaggtagttttttttattataggattggagatttaagagggaaaaaaatgtttttatgaggtaagtcgagggtttttttgttgtatgtagtttaaaggtttagtgtttttttttttgggttattgaagttatggttaaaaggggttaagaaatagtttgggttgtgattttaaagggtgtaagttttaagttttggtagtttttatgtggtgtggagtttgtaggggtatagaagttaagaattgaggtttgggaatttttgtttagattttagaggatgtatggaaatgtttgtatgtttaggtagaagtttgttgtaggggtgggatttttatgaagaatttttattagggtaatgtagaagggaaatgtggggtgtgagtttttatatagagtttttattggggtattgtttagtggagttatgagaaaagggttattattttttagattttaaaatggtagatttataaacggtttgtattatgtatttggaatatttaggtatttaatgttaatttatgaaagtagttaggagggatgttgtatattgtaaagttacgagggtggagttgtttaaggttatgggatttcgatttttgtattagtatgatcgagatatgagatatggagttaaagattattttgaagttttaagatttggttgttttattggatattggattcgtatggggaatgtagtttttttttttggttaattttttttatttggaatgggtgtatttatttaatgtttgtattttcgttgtatttaggaagtaattaatttgtttttgattttataggtttataggtggaagggatttgttttgttttagagaagattttggatttggatttttgggttaatgttggaatgagtgaagattttgaggaatagttggaaggtaggattggttttgaaatgtgagtatatgatatttaggagaggttaggggtagaatgatagagtttggttttgtgtttttattaaaattttattttaaattgtaataattttttggtgttatgggaggtatttggtgggaggtaattgaattatggaggtgggttttttttatgttgtttttatgatagtgaaaaagttttatgagatttgatggttttataaaggggagtttttttgtatatgtttttttgtttgtttttatggaagatgtgtttttgttttttttttgttttttattatgattgtgaggtttttttagttatgtggaattatgagtttattaaatttttttttttttttataaatatttagttttgggtatgtttttattagtagtatgagaatagattaatatatttggtatgtaatatgtaattggaatatttagattgtttaaatgtagtaagtgatgagaatgataaaaaaaaaattggtaaagtaggagataaaatattgtaggatttatgaattttagatagaggagttagggaaggttagaaaaggtttttgtttttgtaattatatgtttaattgtttattttagaaataaatttaatgtggttaatttattttataaatttatttgatgaaaggtgggttaattgtaaaatgtatacggtatgttacgtttattaaattttttattaaaaatttttttgatttgttattttaatatttttggagattaaagatttagagttagaaaaatatttattttttgatatgtgggttattagttttattttttgtgttttaggtgaagggttaaatgtgtttgggtttgattagaatttattgtgtaggaggatatcgttttttttttttattttttattttttgatagagtttcgtattgttattttattggagtgtaatggtgttattttcgtttttcgggtttatgtgatttttttgttttagttttttaagtagttggaattataggtattattatatttggttaattttttgtatttttattagagatggggttttattatgtttattagattggttttaaatttttgatttcgtaatttggttattttggttttttaaagtgttgggattatagatgtgagttattatgtttaattttttatggtgttttatt

SEQ ID NO: 281 - DNA, 7603 bp, Artificial Sequence
  chemically treated genomic DNA (Homo sapiens)
ttggttacggatattttaatttagtggtgttagaggaattagatatatatatagaaatatagagtgtggagtgggaaattagggggttgatagtttttagagttgatagtttcgaatagagagttatttatatatttattgatattaagttagtgataagtattgtttttatagattatagattaattaaaagtattttttatgggaaataaagggatgggtcgaaataaagggatgggttttggttagttatttgtagtaggaatatatttttaaggtatatattatttatgttattgtttgtggtttaggaatgtttttttgtagtttttcgttttgggtgggttaggtgttttttgtttttatttcggtaaaataatagtttttagcgtggttattatggttattaagaatatgttatagtgttgtagagattttgtttatggttagttttcgggttagtttatggttagatttgggggattgtttttaatattagggtgtggttgtagttatttttttaggtgtaggatttgggtatttttgtagtttgtattttgggggttttaggaaggatttttttttattttatttcgtaggtttgggggtgtttgttttcgttgtttggtttttttttatttttggtattttttttaattttgaagtggggttggggttaagttttggggttttgaatggtaatgggaggtagaagggggtaggtttttagtaaggtttttttttaggttagggagggttgaaggttgggggtggggttgttagttttgtggattgtagtagggatttatggtgttttttttgggtgttcgtggataaattggtagttatttttttttttttgaggtttataaaagttttgggtttagttagagtagggtagaggatggttagaggataaagagggtagagaggtggtgggatgattagttgtagagaggagtattttttgttgatagttggagataatgggatggttggttgtagagaagagttattttttttattgagagttgtagagataatttgttagtagagagaagttattttttttagggttttttttttattgagaattgagtattggatagatgatttgtttatagagaggagttatttattgtgggttttttttgagttgttttagtattaaataaagtttttttttattttgtttattttttatttgtttgtgtattttattttttttggacgtaggttagaattcgggtaaaggtgttgtagttagagaggtttttagttagaaaattgatattttaaagatttcgtaataaaggtatggagtaaagtgggggtaaggaggttttggaggttgggggtgttaaatttagaagatttgttattttaagattttttgaggatttttataggttggggtggaggttttagtgttttgagtttttttttagttagtatatttttttttttttttttatggtttatgttaattttttaggagttattattttttttttttggatggagtttcgtttttgttatgtaggttgtagtgtaatggtatgatttcggtttattgtaatttttgtttttcgggtttaagtgatttttttgttttagttttttgagtatttgggattataggtatgtgttattatgttcggttaattttgtatttttagtagagatggggtttttttatgttggttaggttggttttaaattttcgattttaggtgatttatttatttcggttttataaagtgttgagatgataggtgtgagttatcgtgtttagttaggagttattattttttagtttatttagatagagggtggggaatttggattatagattgtatgttaaggaaagttaattattgttattattattttttattaatgtggaattaaagtagtagttgatatttatttttataaaaggttatgaaggttttgattggttttttacgtgtatttagtagattgtaattaattaggaaagagattgtaagacgtgtttattttattattattaatatgtttttagtaattgtgtgtaggaggaagtagaaaatgttgagtataaatatttgtattgtacgttattttttttttgtaatttgatttaaatgtttttttggagtagtaggataaaagttatagttttattttttgggtttttattttatttttattttttagatttagattaaatatttttttttttaaggaatgtttgattgattgtttttttttaaagtttttgtggtattaaagtgaagttttattgtggtattattattttttgttcgtagttatagatgttatacgatgttatattgagattcgggtaatggtagttcggggattaagagtaaggggttcggagttagagagatttacgtttgagttttgaatttttgtttatagttttgggatggtggtaagattttttgtttttttgaatttgggtttttttatttattgaatgtggataataatgttagttaaggttgggagttgttatgagtttattagagaagtttagaaatggtagtatcggtcgttatagttattatggaaagtaggttattttgttttttaattgtgtttaatttagggttttgaattgtttgttaaatatttaatattattgaattaaagttgaaagagttaatatattttatgaatagagtgagagaaagtgatagttttaataagttgtttttttaaatggtttaataaatttaatatttataataaaataattaaatagaagattaagatttacggtttgtttttttttttttttaagttattttttagaaaataatatttatattttaagttaaagtaattgtaaattggaaattatagggggagttttaggttgggataaataatgattagtttggttttaatagaataggtaaagaaggtggtttttatattttttatggttagttggggttttttttttattttgttgtagtattttagggttagggttttattttttttggaattggggtagtgagtaatttagtttgttgtgtttcggttttttttttttaagaaggttttttttttttttttttttgagagagtttttttttgtcgtttaggttggagtgtaatggtacgattttggtttattgtaatttttgtttttcgggtttaagcgattttttagttttagttttttagtagttgggattataggtatgtgttattaagtttggcgaattttatgtttttagttgagatgtggttttattatgatggttaggttggttttgaatttttgattttaagtaatttgtttattttagttttttaaagtgttgggattataggtgtgagttattgtgtttggttaggatttgttttttttttttttttttttttttgagaaggagttttgttttgtagtttaggttggagtgtgatggcgtgatattcgtttatcgtaatttttattttttgtttttaagcgattattttgttttaatttttcgagtagttaggattataggtgtgtgttattacgtttagttaattttttgtatttgtagtagagatagcgttttattattttggttaagttggtttcgtgattcgtttgttttagttttttaaagtgttgggattataggcgggagttattgtatttggttttaggatttgttttttttaagtatagaagttttttgaatgatgtttaggatatggaaaggatattttaatatatttgttaattaaagtattataaattttgttttttttttttatagataaaatatttttttaagattttgtatttttttttagagtgttgtatatttgagttagtttaattatagtgtagtgattttgatttaaatttgttggtttaaattttggtttttttagtcgtttattgtgtgattttgggtaaattaattaatttttttgtgttttagtttttatatgttaaagtagtagttatagtaatagtatttattttatagtgttgttgggatggtgaaatgagtaaatatttgtaaatgttttggtatatggtagttgtaatattagtgtgtagtattgtttttatgattagaaataatgtttttaaagttttatttttttgttggtttgaatgtgttgtgagaatatatattgttagttttgtttattataaatttgttgagttttttgtaggtatttttaaatgggtttgtaatttattatttttatttttttttttttttttttttttttttttttttattttttaattttttttataaagattgaaagtgaatttttattttttttttattttttaaaaattttatttgtgggtcgggtacggtggttttatgtttgtaattttagtattttgggaggttaaggagggtggattataagtttaggagttcgagattagtttggttaatatggtgaaatttcgtttttattaaaaatataaaaaattagtcgggcgtggtggcgtatgtttgtaattttagttattcgggaggttgaggtaggagaattatttgaatataggaggtagaggttgcggtaagtggagatcgttttattgtttatttgtatgtggatataagaaagggttaatatggtcgataattattttatgagttttttggttttatttgaaaagtgaagtgtgtttggggaaggagttggttaggaaaatagatgtttttttttttgatttattaaggaaatggagatttaaaggaaagtttgaagtattttgtggtttttacgggttcgtttttaggaagtttttgttttatttggggaaattttaagttttatagtgagaaagttgtaaattagtttttaggagacgttgtttgttaaagttattttaattttggaaaaggggagggaaaaaggtagataagtagtgatgatattagtaggaaattagtattaggttatttagttttgaagatttagtttttatttaaataattagtaagttttgaagtttttttttaagtaaatgggagtttttttggattttggagtatatagaggattttattttttttaaaattttgtttttaggtaatttttttgagaatcgtttatttttagaagattggtggagtttgatttgaaggtatgtaattaataattttttttattttagagttttatgtttgaatttttttttttgttttatggtttcgtgttgtagaaatttgtaaaaatttgttagtaatggtattatttttttttagatttttttgttatgtttgggaaaataaaagttaaaaaattcggaagtttttaatatagttttttatcggggtagaaatatgttagtttatagagataaagtttggtagatttattaaaattagagattagaattgttaagaaattataaggtaaatgttagatgcggtagaatagaaaggtgtttttaataaattatttatttgattttagggttagtagtagggaagattttttggattattatattaaaaatgatatttttttgttttttttaatattaaaagtaatgtgtatgtttatatatgtataaaatttgagaaatttaattggaagtttagaaggaaatttgtattatttatagttatgttatttcgatataattattgtttgttatggaggttttgatttttgttgtgtttttttttttttatttatttatttatttatttatttatttatttatttatttatttgagacggagttttttttttttattttttagtatttaagttggagtgtagtggtataattttggtttattgtaattttcgttttttaggtttaagtaatttttttattttagttttttatgaagttgggattataggtatatattattaagtttagttaatttttgtattttttgtagagacggggttttatcgtgttgtttaggtttgtttcgaatttttggttttatagtgatttatttgttttagttttttgaagtgtttttttgattataatgaaatttagtatgtagaatattatagtttatagattagttagatggaaatattgatttatgtaatttttattttttttcgttgatttgagtaatttttgtttaaaattattttttttttttgaggtttaggaggtttttttgttgttgttttgttttgtttttgaggtagggttttgttttgttatttagggtggagtgtagtggtataattatggtttattggaatttttattttcggggtttaaatgatttttttgttttagttttttgagtagttgggattataggcgtgtattattatgtttggttaatttttgtattttttgtagagatggggttttattacgttgtttagtttggttttgaatttttggttttaagtgatttattcgttttggttttttaaagtgttgggattataggcgtaagttatgatattttatttgtttttttttttataaagtatttttttgtttttaaaaatagttaagttttgtatattgattatatattttaagtgtttatagaataaatagtattataatgaaaattttattattgtattgtttttttgattatgatgaaatttagtatagagaatagtatagtttataaattgattagatggaaatattgatttatgtaatttgtttttttttagtgaaaataagtttattagagaagtaaagaaataaaagaatggttattttatagatagagtagtcgatttatgtaatttttaattttttatattgatttgagtaatttttgtttaaaattattttttttttttgaggtttaggatattttatttatttatttttttttttgaaatagggttttattttgttatttagggtgaagtgtagtggtatgattatggtttattgtaatttgtgttttttaggtttaaatgatttttttattttcggttttttgagtagttgggattataggtatgtgttattatgttttgataattttttgtatttttagtagagattaggtttcgttatgttgtttaggtttgaggtttaggattatgttttttttttttgtaagataaaggtttgtttttttataggtagtagtttgaagttaagatgtaatatatatattttacggtattttgttgtttttgggttgatagattataaggataattttgttttttttagattgttttgtgtttaaaatttaaagtatagagttaagtgttatttttgttacgtgttggaaatgaatgtaagggttttaattaggttattaggtttgagaaaaattgtgttgtgtttttttattttaattttttttttttgggaatattttgatttgggagaaattaaggtgaattgaattttaatataagtattttttaagttttttaaaaagtaatttgtaagtgttggggaaaagttttttgggttgttgttttttgaagtagtttcgtcgtaatttttattttttagtatttttaggaaagtttaatgtttagaacggagaaggttgtggtgaggggagggtttgggaagttagggggttatatgtttttattttttaattttttgttttatttttttgttttttttagg

SEQ ID NO: 282 - DNA, 7603 bp, Artificial Sequence
  chemically treated genomic DNA (Homo sapiens)
tttgaaagggatagagaggtggggtagggagttagagagtgaggatatatggttttttgattttttaggttttttttttattataatttttttcgttttgggtattagatttttttagaagtgttgaaaaataaaaattacggcgaggttattttaaaaagtaatagtttagaaaatttttttttaatatttgtaagttattttttaggaaatttggagggtgtttatattggaatttaatttattttgattttttttaaattaaaatgtttttagagagagaaagttaagatggagggatatagtataattttttttaagtttggtagtttgattggagtttttatatttatttttagtacgtggtagaaatagtatttggttttatgttttaagttttagatataaagtaatttgggggaggtagggttatttttatgatttattaatttaaagatagtaaggtatcgtgaggtatgtgtgttatattttaattttagattgttatttgtaagagggtaggtttttattttatagaaagggaaggtataattttagattttaagtttgagtaatatggcgagatttggtttttattaaaaatataaaaaattattagggtatggtggtatatgtttgtggttttaattatttaggaggtcgaggatggaaggattatttgagtttggggagtataggttgtagtgagttatgattatgttattgtattttattttgggtgatagagtgagattttgttttaaaaagaaaaataaataaataaaatattttagattttaggaggaaagggtggttttagataagagttgtttaaattagtgtaggaagttaaaaattatatgagtcggttgttttgtttatggagtagttatttttttgtttttttatttttttaataaatttgtttttattaaaaaaaaataaattatatgagttaatgtttttatttgattagtttataaattatgttattttttatattaaattttattataattagaggagtaatgtagtgataaaatttttattgtaatattatttattttataagtatttgaggtatgtagttaatatgtagaatttggttatttttagaaataagaaaatattttataaaggaaggaataggtggggtgttatggtttacgtttataattttagtattttgggaggttaaggcgggtggattatttgaggttaggagtttaagattagattgggtaacgtggtaaaattttatttttataaaaaatataaaaattagttaggtatggtggtgtacgtttgtggttttaattatttagagggttgaagtagaaggattatttgagtttcggggatggaggttttagtgagttatgattgtgttattgtattttattttgggtgatagagtaagattttgttttaaaaataaaataaaataataataaaaaaattttttagattttagaaggaaagggtgattttagataagagttgtttaaattagcgaaggaagataaaaattatatgagttaatgtttttatttgattagtttataaattatggtattttatatattaaattttattataattagagaagtattttaggagattgaggtaggtggattattgtgaggttaggaattcgggataagtttgggtaatacggtgaaatttcgtttttataaaaaatataaaaattagttgggtttggtggtgtatgtttgtggttttagttttataggaagttgagatgggaggattgtttgaatttgggaggcggaagttgtagtaagttaagattgtgttattgtattttagtttgagtgttggagggtgaaagagggagatttcgttttaaataaataaatagataaataaataaataaataaataaataaataaaggaaggaagatatagtaaaaattaaaatttttataataaatagtggttatatcgaggtgatataattatagataatataaatttttttttgggtttttaattgaattttttaaattttatgtatatgtgagtatatatattatttttggtgttaaaagaaataaaaaaatgttatttttaatgtgataatttaggggattttttttgttattagttttgaggttaaatgagtggtttattggagatatttttttattttatcgtatttagtatttgttttgtggttttttgataattttgatttttagttttagtgagtttattaaattttgtttttgtgagttaatatatttttgtttcggtaaaaggttatgttggaggttttcggattttttaatttttgtttttttaggtatgataaagaaatttaagaaaaaatagtgttattgttgataagtttttgtaagtttttataatacgaagttatgaagtaaaggaaaagatttaagtatgagattttggagtaagaagggttgttaattatatatttttagattaagttttattaattttttggaagtaaacggtttttagggaaattgtttgaaaataaagttttaaagaaagtagaattttttgtgtgttttaaggtttaaagaagtttttatttgtttgggaagagattttaagatttgttggttgtttaagtgaaaattgaatttttaggattgggtagtttgatattagttttttgttgatgttattattgtttatttgtttttttttttttttttttttagggttaagataattttgataaatagcgttttttaaaggttaatttataatttttttattgtagagtttggggtttttttaggtaaagtaaaagttttttagaaacgaattcgtggaagttataaagtgttttaggtttttttttggatttttatttttttggtaagttaaaaagggaagtatttgtttttttaattaattttttttttaaatatattttattttttaaataaagttaaaaagtttatgaaatagttgtcggttatgttaatttttttttatgtttatatgtaaataaataatggagcgatttttatttatcgtaatttttgttttttgtgtttaagtgatttttttgttttaatttttcgagtagttgggattataagtatgcgttattacgttcggttaattttttgtatttttagtagagacgaggttttattatgttggttaggttggtttcgaatttttgagtttgtgatttattttttttggttttttaaagtgttgggattataggtatggagttatcgtgttcggtttataaataaaatttttaaaagataaaagaaaagtggggatttatttttagtttttgtgggagaaattaagaaataaaaagaaaaagaaaggaaaaaaaaaagaaaagtggggatggtgaattataagtttatttggaggtatttgtaagagatttaataaatttgtggtaggtaaaattgatagtatgtgtttttatagtatatttaaattagtaggaaagtgagattttgaagatattatttttaattataaaaataatattgtatattaatattgtaattattatgtgttagggtatttataaatatttatttattttattattttaataatattgtaagataaatattattattatgattgttgttttaatatgtgaaaattaaggtatagaaaggttaattaatttgtttaaggttatatagtgagcggttggaagagttaagatttaaattagtaagtttggattaaagttattatattataattaagttaatttaaatgtgtagtattttggaaagaggtatagagttttagaaagatgttttatttatggggaaaaaaagtaagatttatgatgttttgattagtaaatgtattaaaatgttttttttatgttttaggtattatttagagaatttttgtgtttaagaaagataagttttggggttaggtgtagtggttttcgtttgtaattttagtattttgggaggttgaggtaggcggattacgagattagtttggttaagatggtgaaacgttgtttttattataaatataaaaaattagttgggcgtggtggtatatatttgtaattttagttgttcgggaggttgaggtaggataatcgtttgaaggtaggaggtggaggttgcggtgagcggatattacgttattatattttagtttgggttatagagtaagatttttttttaaaaaaaaaaagaaaagaaaaagataagttttggttaggtatagtggtttatatttgtaattttagtattttgggaggttgaggtgggtagattgtttgaggttaggagtttaagattagtttggttattatggtgaaattatattttaattaaaaatataaaattcgttaggtttggtggtatatgtttgtaattttagttattaggaggttgaggttggagaatcgtttgaattcgggaggtagaggttgtagtgagttaaaatcgtgttattgtattttagtttgggcgatagagaaagatttttttaaaaaaaaaaaaaaaaaaaatttttttgggaaaggggggtcggagtatagtaggttgggttatttattattttagttttagggaaggtggggttttgattttagaatgttgtagtagagtgaggagggggttttaattgattataaagagtgtagggattattttttttgtttgttttgttgggattaggttagttattatttgttttagtttggggttttttttgtggtttttaatttgtagttattttaatttaaaatataaatattattttttggaaaataatttaaaaaggaagaaagataagtcgtaagttttggttttttatttagttgttttattataaatattaaatttattgggttatttagggaggtaatttattgaaattattatttttttttattttgtttataaagtatattaatttttttaattttgatttaataatattaaatatttagtaggtaatttaaagttttgaattgggtataattggaaagtaaagtgatttgttttttatagtaattatggcgatcggtattattatttttaaatttttttgatgaatttataataatttttagttttagttggtattattatttatatttaatagatgaggaaatttagatttagagaggtaaggaattttgttattattttaaagttatgagtaagaatttagggtttaaacgtgggtttttttgatttcgaattttttgtttttgattttcgggttattattgttcgaattttagtatgatatcgtgtagtatttgtaattgcgggtagggggtggtgatgttatagtgaggttttattttggtgttataggggttttaagaagggataattagttagatattttttggaggaggaagtatttgatttaggtttggaaggtaaaggtagaataaagatttaggaagtaaaattgtaatttttattttattgttttagggaaatatttgaattaggttatagaggggagatggcgtgtagtgtagatatttgtatttagtattttttatttttttttatatatagttattgagggtatgttgatggtggtagaataaatacgttttataattttttttttgattggttgtagtttattgagtgtacgtgaagggttaattaaaatttttatggttttttgtagaggtggatgttaattattgttttagttttatattagtagggggtagtggtagtagtggttggttttttttgatatataatttgtggtttaagttttttattttttgtttgggtagattaaagggtaatgatttttggttgggtacggtggtttatatttgttattttagtattttgtgaggtcgaggtgggtgaattatttgaggtcgggagtttgagattagtttgattaatatggagaaattttatttttattaaaaatataaaattagtcgggtatggtggtatatgtttgtaattttagatatttaggaggttgaggtaggagaattatttgaattcgagaggtagaggttgtagtgagtcgagattatgttattgtattgtagtttgtataataagagcgaaattttatttaaaaaaaaagagtaatgatttttaaaggattggtataagttatgggggaggaggaagggatatattggttagagaagagtttagagtattgaaatttttattttaatttatgagggtttttagaaggttttgaagtagtaagttttttagatttgatatttttaatttttaagatttttttatttttattttgttttatatttttgttacgggatttttggggtattaattttttggttggaaatttttttgattgtagtatttttgttcgagttttggtttgcgtttaggaagaatgaggtatatagataagtgaagggtgaataagatgaagaagagttttatttagtgttagaatagtttagaggaggtttatagtgggtagtttttttttgtaggtaggttatttgtttagtgtttagtttttagtggagaggaggttttggaaagggtggtttttttttgttggtaggttgtttttgtagtttttagtggagaaggtagtttttttttgtagttagttattttattgtttttagttattagtagagagtatttttttttgtagttggttattttattatttttttgttttttttgttttttggttattttttgttttgttttggttgagtttagggtttttatggattttagagaggaggaagtggttgttaatttgtttacgggtatttagaagaggtattatgagtttttattataatttataggattggtagttttatttttagtttttagttttttttggtttgaaggaggattttattggggatttgtttttttttgttttttattgttatttaaggttttaggatttggttttaattttattttaagattggagaaggtgttaggagtgaagagaggttaggtagcgggagtagatatttttaagtttgcgggatggggtgggagggggttttttttggggtttttagggtgtaggttgtagagatgtttaggttttgtatttaggagggtggttgtagttatattttggtgttgggaatagttttttaaatttggttataaattgattcgaaaattggttataaataaaatttttgtagtattgtgatatgtttttgatggttatgatggttacgttgaaggttgttgttttatcggaatgagggtaaggaatatttggtttatttagggcggaaaattgtaaaaaggtatttttaaattataaataatagtatgagtgatatgtgttttaaggatatgtttttgttgtagataattagttagaatttatttttttgtttcggtttatttttttgttttttataagggatatttttaattaatttataatttatagaaataatgtttattattggtttgatgttaataaatatgtgggtaattttttgttcggagttgttagttttaaaggttgttagttttttgattttttattttatattttatatttttgtatgtgtgtttaatttttttagtattattgggttagggtgttcgtgattaa

SEQ ID NO: 283 - DNA, 6853 bp, Artificial Sequence
  chemically treated genomic DNA (Homo sapiens)
ttatttaaatagaaggtaaattgtttagggttgtaattaatatataatatgcgtcgagagggaaaggttaatgttaatttcggttttaagtataaagattattgggagttaggggtgtatttttattagggtatagtatgggtgggtggagagagtaaaaattagaataaattaaggtttagtagttggaagttagttttagggagaaaaggggcggagattgattgggttagaatagggattgggatagaaaaagagggtggggttagtgggttttatttattcgtttcggttttttttattattttttattttatttattttttatagtttgtggagataggtgagcgacgaatttttgagataggtgtgggtgcgagggtcgggagggttatgggattgggatcgaggtgtgaggagggaatttgtaattttttgttatatagagcgttggtaatttttgataggttgtttttggggtatgggttgtttcgggttgttgttgttataaggaaagaaaagagtttttttgtttatcgttttttagttattgggttattttttggtaggaaatttgtaaattgagtttaataagttaggattagtagagggtagaggagggttttggtagatgtggggtttagaagaggataggagttattagggttttcggttattgtgttgggtttttgtttgtataattgttttttaagtagttgtgtttttgtggttttggtgcgtttgtgtgtattttttttttttatttggagtatgggttaatatcggaggaaaggaaaagatagagttagatagggtaagtggggttttttttttttttttttttaacggggttggattgagggtttttggttggggaggtgggggtggagatttagtaggagtaataatagaggaagggtagggtttgttttattatttgaattttagagatgttagtgtgtattgaagttttaggtagggcgtgtttaggatcggattttggatggtggtaagggataaagttggaagggagattatagggaaggagaaaggaaagaaggtagagttatgatatagttaatttatagaatggttgggagttaaagtttttgggttggttttttggttattttatatattttaagatatagagagaatttcggaattggaggggattttatagatgatttatttgagattgaagaatttagaaattaaataaagaaatattatatggttattttggtatttgatatagttatgatattaattgttagtgtagatataatagttgtgtgtttttttgtaggagtttggggaggggttatggtgttaatgtatttattggggagattggagaagtcgtttttttttttgtgttgcgttttttttttattggggttggttttgttgggtataaagacggatattattttcgttgtttattttttttttatattgggtggtttttttttgtttgtttattttttggttcggtttttggaatgggggtttcggttttagttttaattaatgtagattgagagtttagggtttttaggtaatgtacggtgagttaagggtgggtatcgtaagaggaatatattttgggtttattttttttttttttttgtagtttttgaggtagagagtttttggttttttgttattggtattagcgggaggaggggttagaggttaatagaggattttttgtttatagtagataaaaaaaagggaaaaagggttttttttatggaagttattaatggttttatttttttttttttagggataatgaagtttttgaagtgttagtttatgaagaggtcgtggtgggattagaattttagtgtcgtttttaagagttggattaattatttttttatagtattgttgtgatatttttagtatttgaggaggaataatttagttatttagaggggtttaggagagttaaattggaatagaggcgaatggttttagaggggtttatggtttaggaaggaagttttggaagagttttaattaattttcggtttcggggattacgggttgtgtttattgtttttgatttgtagagtttggcggtagtttttatattagagtttttgattttattttttgtttatgatgtttgttttggttattttgatgatgatagtgttttttatgaggataattgggtatttttttaaatgatttttttaagattttttttttttttatattagatttcgtttatttgattaatattttttagcgtttattatgtgttagaaataagtgtttttgtttggatattataaatggggatttggattttgaggagagttaggttacggtaagttttttttagttgagatatgggtggtataatttgagttttttggtaatatttggtgatttattttatatttaatatttttagcgttagattgaggatgaggtagggaggtgatttagagaaggcggagaaggaagaagtaatttttgagtggcggttattgtttttgttttaggtgttgttcgagttgttagaatttttaggtttgatagttttgtgagttattattgaaaaatgaggattttaagagttagaggagtttgataatgtgtacgagggtatattgttagtaaataatattaaaataattggaatgaatttttgattttaaagtttattgtgtttttaatataaggtaataggaagttaagtaatttgtatgttttttaatttttgtttagggatagttgttggtgtaggatggaagattttttataaatagaatgggcgattaattgtgtttatagagggggtgggttgagtatgggtacgtatgtttttagttttttggacgagtaaagttagttaaagcgttggtgatttttgtttcgcgtgcgtagtagtgtttgtgttttttttgtttaggggttagagagtagtttttagtgtagggtttttattttatttgaaaatagtggagttagtgattttaggtggagggatttttagttttaataatgggttggtatgaaggttagaaggagtgaaatatgtgaattttttggcgaggagatttttttttgaattatttatatgtagtttcggggttatttgcgaagagtttttaatagtttttgttttatttttaagttttgatcgttagtttttattttagtcgtcggttttgatttttgagattttaatattgagtattaggttttttggaattgtgtgttgcggttgtgatgtaggtttcggtcgttggaagttgttaaattatagttgacgtttttttttaagttagtttttttttttcgcgcgggtatttgtttagggttttgtcgcgtttttagtttttttcgtagtttggttttaatcgtttaattttaataaagtaaaattttagttacgttcgttttcgtgaagttatcgttataggtcggttagggggcgcgagaggtatcggggtgattttcgcgggaatcgataattaatcggatttttaggtcgaacggagtatattcgttcgttttcgtttttttttcgttttttgtttcgtttcgtttttttttttttttttgtttgttcgtcgagtattttattttattttattggatcgcgcggtcgtcgttagagttttgcgtttgcgtacgtatcgggtcggggattgggtggtttggtgtgtgggcgcggtagggcgtagcgtaggcgtagtgtgcgttcgcgtttgaggggagggatgtgggggaagcgacggttttcggtttgtttgggttgtgggcggtgcgtagcggagagttcgggaaaagcgggaaatggcggcgtcgagcgcggggttttggtttattttttagtataaggagttgatggtcgttgataggggacgtaggtaagtagggaacggttttagggttttttaggggagtttagggaaggggagcgtggtttttaggcgtgcggttttgtagtttttttttttcggagtttcggaaagtagtcgtgttcgcgttttttgttaagggtgggacgttcgttcgagtcgtttcgagtttgatttcgcgtaagggttcgcgggcggattttttggttttgtttttcgtgggaaaagattgttttagtttttttttgtttaatttacgagggttttaaaggggaggtttttgtagttttgttcgtttttgggtttttttgaagattttttatttttttttttggtttttttatgagggaaattataaaaagattatattttgtttttttaaaaatcgacgagattttttgtagatttcggtgttttgtttgatgtgtatttgatttgtatcgattgtattatgatttgtatggttttgttttggtagaataagggggtttttgtggtttcgagtgtttatgtttttgtttcggttattttattttatggtagttattatttaggagaatattgtaatgttttttgttcgagattgaagattaaggttttcgtaaagggaatttgtagaaggatatagaattaagacgtaggaatttcgtggtgtttttcgttttttttttttttttagttgtgttttgaaattttaaatgattggaaatttttataatgtttacgtttaagatttttatattatagagtagaggaaggagcgggtgtgtagagggggtgatgttttagattaaaattaaagagttgattgaaaatttaagtttggaattcgagagagttaagaattataagttagtaagttgtaagtatgggtgagattgtttagggaaaggttttttgaaggggcgtttttaatggaatattaatattaagggtaggttaaaggttttttaaagaaaataggaattgggtaggtagagagaagatttttaaagaatgttgttatggaaattagaggaagagaacgatttaaggagcgaatattattggtaaattaatggaagaaatttgttgtattattggttagtattttagttgtagtgttatatgtgatcgttattattgttttgacgtattcgaaagtgatttatttttaaataggtttttttatttgtatagtttttttttttgtagttagttttttttgaaagttttgggtaatggaaatattatagtaaaaagaagaaaaaatggagttttagatttatttttttaaattttagatttattggttgtttttaatttattttatttgttttaggattttatttgttattttagtttttttagtttttttaggatttagttttttttttttttaattataaattttttatttaatagtatttgtaagttaagtgtatttattttatagatgtgtggtattttattgattttaagatatatattttttttttttttttttttttttttttttttttttggacggagtttttgttgtgttatttaggttggagtgtagtggaatgattttagtttattgtaatttttatttttaaggtttaagcgatttttttgttttagtttttcgagtagttaggattataggtatgtagtattatattcggttaattttttgtatttttagtagagatagggttttattatgttggttaggttggttttgaatttttgattttaggtgatttgtttattttagttttttaaagtgtagggattataggtatgagttatcgtgttcggtttttttttatgttttaatattttagaaattagaatgtattttagagtaggtttttaagttataaatggaagttattgtatttttattgttattaggtgttattttttttgttgttatatatgtggaaaatgtgacggggtaggttagagaattttggatttatgtaaattaggtatgtagatgatatattggtaataggattattttagtttataagtagaagttgatttttttgtaagtttgtagtaaaattagttggaggtgatagtatatgtttgtagttttaattatttgggaggttgaggtaggtggatcgtttgagtttaggagttttgggttatagtgtgttatgttagttacgtgtttatattaagtttagtattagtgtggtgatgttttgggagttagggtttattaggttgtttaaggaagggtgaattcgtttaggttaaaaatggagtaagttaaaatttttgtgttgttttgtaatgggattatatttgtgaatagttattgtattttagtttgggtggtatagtgagatttttttaaagtaaatagataaatatttatttattgtgattttttgttatattttttgtttatttatattttaataggattcgttattttgttattggaatttaaaagttttaaaaaatatgtaattatatgtttatattattagtgaaagagagttagtgtttgttttatttattttttgttaaagttattggtttgagtttttattatagtgttttaatttttatttaagattattataaatttatattatttttattagtttagataatgtgagatgttttttgaaataattttttttattaaaattggtttattagagaagtatttttttttataaatatgtgtatttgggggtattgttttgtttaagatagatattttttttttttagttagattatttattttagatgattttagttgaatataaattataaggaattagatattatttttttatgattaatgtgtttttgtttagtatatttttgttttaattagatttaagaaatatgtataattttggttattgtaagttttattttttttgttttttttatttatgttttttttattttatttttttgtgttaaattgtgatttgatagtttttttttttatcgtttatttgtagg

SEQ ID NO: 284 - DNA, 6853 bp, Artificial Sequence
  chemically treated genomic DNA (Homo sapiens)
tttatagataaacggtagaaggaaaggttgttaagttataatttgatatagaagagtggagtggaagaggtatgaataggaagaataaaaagaataagatttataataattaagattatgtatattttttaaatttggttaaagtaaagatgtattaagtaggaatatattgattataagaaaataatgtttaattttttatggtttatgtttagttgagattatttgagatgaatggtttgattagaggagggaaatatttgttttaagtaaaataatatttttaagtatatatatttatgagaaggaatatttttttgatagattaattttaataaagagaattattttagaaaatattttatattatttaagttggtgaaagtgatgtaagtttataatgattttagatgagggttaaaatattatggtaaaaatttaagttaatggttttaatagaaaataaatgaggtagatattaatttttttttattagtgatataaatatataattatatgttttttaaaatttttaagttttagtgataaaatggcgaattttgttaagatgtggataagtagaaagtatgatagaaagttatagtggataggtatttatttatttattttaaaagagttttattgtgttatttaggttggagtgtagtggttatttataggtatgattttattatagagtagtataggagttttgatttgttttatttttgatttgggcgggtttatttttttttaggtaatttggtggattttgatttttaggatattattatattgatgttgaatttaatgtggatacgtgattggtatagtatattatagtttagaatttttggatttaagcgatttatttgttttagttttttaagtagttgggattataggtatgtgttgttatttttagttaattttgttataggtttgtaaagagattagtttttgtttataaattaaaataattttattgttaatatgttatttatatgtttagtttatataaatttagagttttttagtttgtttcgttatattttttatatatgtaatagtaggaagggtggtatttgatagtagtgaaaatataataatttttatttataatttaaaaatttattttaaaatgtattttgatttttaaggtgttaaaatatgaggggaggtcgggtacggtggtttatgtttgtaatttttgtattttgggaggttaaggtgggtagattatttgaggttaggagtttaagattagtttggttaatatggtgaaattttgtttttattaaaaatataaaaaattagtcgagtgtggtgttgtatgtttgtagttttagttattcgggaggttgagataggagaatcgtttgaattttggagatggaggttgtagtgagttgagattattttattgtattttagtttgggtgatatagtaaagatttcgtttaaaaaaaaaaaaaaaaaaaaaaagggagggaaaaaatgtgtattttagagttagtgaaatattatatatttatggaatggatgtatttggtttgtagatgttattgggtgagagatttatagttagaagagggaagagttgggttttggaagaattgggagaattaagatagtaggtgggattttaaaatagatgaagtgggttggaagtagttaatgaatttgaggtttggaaaaatgagtttgaaattttatttttttttttttttattgtaatatttttattatttaagatttttaggaaaaattggttataagaaaaagagttatataaataaaaaaatttatttaagaatgaattattttcgaatacgttaaagtagtaataacgattatatataatattgtagttgggatattaattagtggtgtagtagattttttttattagtttattagtagtattcgttttttaaatcgttttttttttttggtttttatgatagtattttttgggagttttttttttgtttatttagtttttgttttttttagagggtttttggtttgtttttaatattgatattttattagggacgtttttttaaagagtttttttttagataattttatttatatttgtaatttattgatttatagtttttaattttttcgagttttagatttgaatttttaattaattttttagttttaatttgaagtattattttttttgtatattcgtttttttttttattttgtagtatgagagttttaaacgtgaatattataaaagtttttaattatttagaattttaggatataattggaaggggaggaggggcgaagggtattacggagtttttacgttttaattttgtgtttttttgtaggttttttttgcgaagattttaatttttagtttcgagtaggaggtattataatgtttttttgggtgatgattgttatgaaatggaatgatcggggtagaggtatggatattcggagttataggaatttttttgttttgttaaaataaagttatgtagattatgatataatcgatataaattaaatgtatattaggtagagtatcgaggtttgtagaaggtttcgtcgatttttaaggagatagagtatggtttttttatagttttttttataagggagttagaggaaaggatgaagaatttttaagagaatttaagagcgggtaggattgtaaagattttttttttagaattttcgtgggttgaataaagggaggttggggtagtttttttttacgagagataaggttaagaggttcgttcgcgggtttttgcgcggagttaggttcggagcggttcgggcgggcgttttatttttggtaggaagcgcggatacggttgtttttcggggtttcgaggggagggggttgtagggtcgtacgtttgggggttacgttttttttttttgggtttttttaaggagttttaagatcgttttttatttatttgcgttttttgttagcggttattagttttttgtgttggaaggtggattaagatttcgcgttcggcgtcgttatttttcgtttttttcgggtttttcgttgcgtatcgtttatagtttaaataaatcgggggtcgtcgttttttttatatttttttttttagacgcggacgtatattgcgtttgcgttgcgttttgtcgcgtttatatattaggttatttagttttcggttcggtgcgtgcgtaggcgtagagttttagcggcggtcgcgcggtttaatggggtgaagtggggtgttcggcggatagataaaaggaggggaaggagcggggcggggtaaagggcggggaaagagcgagggcgggcgggtgtgtttcgttcggtttgggaattcgattggttatcgattttcgcggaaattatttcggtgtttttcgcgttttttggtcggtttatggcgataattttacggagacgggcgtggttggagttttgttttattgaagttgaacggttggggttaggttgcgaaggagattgagagcgcgataaggttttggatagatgttcgcgcggggaaggaaggttggtttaggagggggcgttagttatggtttagtagtttttagcgatcgaaatttatattatagtcgtagtatataattttaggaaatttggtgtttaatattgggattttaggaattaggatcggcggttggggtgaaagttagcggttagagtttaggagtgaggtagaagttgttagagatttttcgtaagtgatttcggggttatatatggatgatttaagagggagttttttcgttagaaagtttatatgttttattttttttggtttttatattaatttattgttaaaattggaagtttttttatttggggttattgattttattgtttttagataggatggggattttgtattggagattgttttttagtttttgggtaggagaggtatagatattgttacgtacgcggagtagggattattagcgttttgattgattttgttcgtttaggaggttggggatatgcgtgtttatgtttagtttattttttttgtagatataattggtcgtttattttgtttataggaagttttttattttgtattagtagttgtttttagatagggattgggagatatgtaagttgtttggttttttattattttgtgttgaaaatataataggttttgggattaggagtttattttagttattttaatgttatttattagtagtgtgttttcgtgtatattattaaatttttttgatttttggaatttttattttttaataataatttataaagttgttaagtttaagggttttaatagttcgaatagtatttggaatagaagtaatagtcgttatttagaggttatttttttttttttcgttttttttggattatttttttattttatttttaatttaacgttggaaatattggatatggggtaggttattaaatgttgttagaagatttaaattatgttatttatattttagttgggaagggtttatcgtggtttgattttttttagggtttaagtttttatttatgatgtttaggtagaaatatttgtttttgatatatagtaggcgttggaaaatgttagttaaatgaacgaggtttggtgtggagagaagagaaattttgggagagttatttaagggggtgtttagttgtttttataaaaaatattattattattagggtgattaaagtagatattataggtagggggtggagttagaggttttaatgtggggattgtcgttaagttttgtagattaggagtagtggatatagttcgtggttttcgaagtcgaaggttgattggagtttttttagggttttttttttgggttatggatttttttgaggttattcgtttttgttttagtttggtttttttggatttttttggatggttaggttgtttttttttaggtgttgggggtattataatagtgttgtaggggggtggttggtttaatttttgggggcggtattgggattttagttttattacggtttttttatagattggtattttaaaggttttattgtttttgagggaagagaaataaggttattggtggtttttatgaaagaagtttttttttttttttttttgtttgttgtgggtaaaagattttttgttggtttttgattttttttttcgttgatgttaatgataggaaattagagattttttgttttagagattatagggagagagggaggatgggtttaaggtgtattttttttacgatgtttatttttaatttatcgtgtattgtttgagggttttgggtttttagtttgtattgattggagttgggatcgaagtttttattttagaaatcggattaggagataggtaaataagaagaagttatttaatgtgagaaagaaataagtaacgggggtgatgttcgtttttatgtttagtaaagttagttttagtaggaaggaggcgtagtataggaggagaagcggtttttttagtttttttagtaagtgtattggtattatggtttttttttaggtttttgtaaaaagatatatagttattgtgtttatattagtaattggtgttatggttgtgttagatattaaagtaattatatgatatttttttgtttggtttttaggttttttaattttaaataaattatttgtagagttttttttagtttcgaaattttttttatgttttggagtgtgtggaatagttaggaaattagtttaggagttttgatttttagttattttgtaagttgattgtgttatggttttgtttttttttttttttttttttttgtagttttttttttagttttgttttttattattatttaggattcggttttgggtacgttttgtttggggttttagtgtatattggtatttttggaatttaggtgatggggtaggttttgttttttttttgttattgtttttattggatttttatttttatttttttagttagaggtttttaatttagtttcgttagagagaagaggggagggagttttatttattttgtttgattttgtttttttttttttttcggtgttagtttatgttttaggtggagggagaaagtgtatataggcgtattaaagttatagggatataattgtttgagaaataattgtataggtaaaggtttagtataatggtcggaggttttgataatttttgtttttttttagattttatatttgttagggtttttttttattttttgttgattttaatttgttaaatttagtttgtaaattttttgttaggaggtagtttagtggttgggaggcggtgggtaggggaatttttttttttttttgtaatagtaataattcgaggtagtttatattttagaaatagtttgttagaagttgttagcgttttgtgtagtaaggaattgtagattttttttttatatttcggttttaattttatgattttttcgattttcgtatttatatttgttttagaagttcgtcgtttatttgtttttatagattgtagaaagtagatggggtggggggtggtgggaagggtcggagcgggtaggtggagtttattggttttattttttttttttgttttaatttttgttttggtttagttagttttcgttttttttttttttaaggttgatttttaattgttgaattttgatttgttttggtttttattttttttatttatttatgttgtattttaatgagagtgtatttttgatttttaatgatttttgtatttaggatcggagttagtattaatttttttttttcggcgtatattgtatgttaattatagttttgggtagtttgttttttatttgggtaa

SEQ ID NO: 285 - DNA, 18683 bp, Artificial Sequence
  chemically treated genomic DNA (Homo sapiens)
tttttaagtgtcggttagtttgagaaataaagggaaagagtataaaagagagaaattttaaagttgggtgttcggggtagatattatatgtcggtaggttttatgatgttttttgagttataaaattagtaagtttttgttagtgatttttaaaaggggagggagtgtacgaatagggtgtgggttatagagattacgtgttttataaggtagtaaaatattataaggtaaatggaggtagggtgagattatagaattagggtgaaattaaaattgttaatgaagttttgggtacgtattgttattgataatattttattatgagatagggtttgagagtagataattagtttgattaaaatttattaggtgggaatttttttattttaataagtttgggagtattataggagatcggggtttattttattttttatgataatcgtaaaagatagatatttttagagtagttattttagagatttttttttaggaacgtattttgttttttgttgagaaaaagaatttagtaatattttttttatttgtttttgaaagaagagaaatacggttttgtttcgtttagtttttaggtagttagatttaatggttattttttttgttttttgaacgtcgtttttattttgttttttttttaaggtgtttagattttatattgtttaaataatttgtgtagttaacgtaattattatagggttttaaggcgatatatatttttagtttataaagatgatgggatgaagagattaaagtaaagataggtataggaaattataagaatattgattggggaagtgataagtgtttatgaaatttttataatttatgtttagagattgtagtaaagataggtataagaaattataaaagtattaatttggggaattaataagtgtttatgaaatttttataatttatgtttttttgttatggttttagtcggtttttttgttcggggtttttgattttttataatattagagtttatgtgaaatggaagtaaattatttttgtgtatatttatattaagaagaaagagtttaaaggttgaattataaattatagagtttttaggttttattattttttttgtttgttttaaatttattattattttttttttgagataaaaattattttttgtttttgtttttgttagatcgttttttatttttgtattgagtattttaagtattgtagaaaagatgttatttttttttttaaggttgttttgtaatatatataaggattggaattgtgtttttaaagaaaagtatttaagtatgataatatattatttgtgtttttattattaaaagtgttgtttagtagtttaaatttaaattatttaatgttatttaataaagtgattaaaatgtgttttttattgtatttttatagttttgaaaaaataaataatttaattatatatttttaatattttatagtttttttaagaatgtataatagttaataaatataaaagaaatagtagatagagtatgagatgttgaagaaatattatagtgtattgaatgtaaaattatgtatttgtgttgtgtaggggaaatagtttggggttaaattagttatttagtgatgtgaagattttgaagaattggaagaattataaatttagttgtaattatgagttttttttaattttaaatttattaaaagtgaaggcgaatttttgattttttgtaattttttaatgttaagttttatattgttattttattttaatatttttttaagttttggaatatatgtgtaggatgcgtagtttgttatataggtaaacgtgtgttatggtggtttgttgtatagattaatttattatttagttattaagttaagtatgtattattttttttttttaatgtttttttatattttttatttttttatttggtttttatgtgtgttgtttttttttttgagtttatgtgtttttattgtttagtttttatttataagtgagaatatgtagtgtttggttttttgtttttgtattagtttgttgcggataatattttttagttttatttttgtttttgtaaaggatatgattttatttatttttatggttgtattgtattttatggtgtatatgtgttatattttttttatttagtttattattgatgggtattttgattgattttatgtttttgttattgtgaatagtgttgtaatgaatatatgtatgtatgtaatgtatttttataatagaatgatttatatttttttgggtgtatatttagtaatggtattttttggttaaatggtatttttgttttaaatgatttattatatatttttttataattattgatttaatttatatttttattaatagtgttttttgaatatagtatattgatgagttttgtttttttgtttagtttgttattgtgtgttttttaattggggaatttggtttatttattttaaggttaatattggtatgtgtgaatttgattttgttattatgatgttgtttggttaattttgtagatttgttaatgtagttgttttatagtgttatgggtttgtgtattttagtgtgtttttatagtggttgttaatagatttttttttttatgattattgttttttataggatgttttttaaggtaagtttggtggtgataaaattttttagtatttgtttgtttgaaaaggattttattttttttttatttatgaagtttagtttggttagatattaaattttgggttggaaattattttttttattaatgttgaatattggtttttagttttttttggtttgtaggatttttgttgagaattttattgttagtttgatgggtttttttttgtaggtgatttggtttttttttttggttgtttttaatattttttttttttattttaattttggagaatttgatgattatgtgttttgggattgatttttttgtggagtattttattgggattgtttgaattttttgaatttgaatgttgatttgttttgttaggttggggatgtttttttggatgatattttgaagtgtgttttttgatttggttttattttttatattttttttaggtattttaattagttataggtttggtttttttatatagttttatagttttggaaggtattgtttattgttttttatttttttttgtaattttttttatttgttttattttagtaagatagtttttaagttttgatatttttttttttgtttggttgatttggttattgatatttgtgtttgaattatgaaggttttacgttgtgttttttagttttattatgttatttgtatttttttttaaattggttattttaattaatagtttttgtaattttttattacggtttttagtttttttgttttgggttagaatataattttttagtttagtaaagtttgttattatatattttttgatatttatttttgttagtttatttattttagttttagttttgttttgtgtttttgttggagaagtgttgaaattatttgaggagaaaaggtattttagtttttggaatttttagcggttttgcgttggtttttcgttatttttgtggatttatttatttttaatttttaaagttgttgatttttggatgggatttttgtagggttttttttgttgatgttgtgttattgttgttttatttttttttgttttttttttaatatttaggttttttttttgtaggtttgttgtagtgtgttgaggatttattttagatattgtttatttatgtattattaatggaggttgtagaatagtaaagagtgttgttttttttttttttcggaagtttttttttagaggattattgatttgacgtttgttggaatttttttgtatgaggtgtttggtaatttttgttgaatggtttaatttagttaggaggtttaggattaggaatttatttaaggaaagagtttggttattttttagtagagatggtgtattgggttgggggaattttttttgtttggatcgttgatattttttagagttagtaggtaggaaagattaagttggttgaatttgagatcgtagttgttttttttcgtaggtgttttgtattagggaaatgagagttttgtttgtaaattttaggtggagttgttgaaatttttgtaagtattttttgtcgggagaggagggatggatttcggttttatttaaagaagtagtttggttatgatttgttatagcggttgtgttgtattgtgaagattgttgtttagtttaatttgtttagtttttttagtattggtagggaaaaatcgttgattagagttgtagtaatggtagtcgttttttttttggggaattcggttatttttggcgtattttaggttgttatgttggttagtggggattttaatttagcggatttaagtttgtaggtttttgtgagaatggatttgttgtaaggttattttgttttttggttttagttttttttttatgggagtggacgggatttttgttttattagagtttcgggagttgttggattatgtaaaaatttttgtagtttagtgtttgtttaaaaagttggaaatatgaattattgggttaatttttattaggaaatgaaaaagagttgttagattaaatttttttagttattgtcgttttttgtaattagagaaagaaaaattgagagattaggaagagaagagatagatggatagaagaagtttgggtggttataggaaataagaaaagaaataagttgaggtgttaatttataggataatattttgttatttttattttttttttttaagttagaaattaaattttagtaattggatgttaatttgttgatgataaggtattttttgataatgagtttggaattttgagtagtagttttataatttgtaattatacgttttcgttttttgtaataaggaaatatatagtttatttttatttttgattttgaggttttttttaacgttgtaaaaaaggatagaggttgttttttatggtaggtgagtttttttttgattaggagtttgggagtaggaatttagaaaatatttgatttattgttttgaaataaatataagaaaggaagtgagtcgatagtatatatgttgaatttttttttttattgattgtgtgtagtttgaattatgggatttggtgttagagatattgacggaggttatatgttttttagatgtttttgagttagaaagaagttaattttttttttttagtttttggtaattaaagggagggtaaagaaagttagaggaagttatttgtgtgagataattttagaagtttcgaaatgtattttgaaattttttttttgattttaaattaattgtttagattataaatttttttcgtagaattagatttgagagtttttgaattgttatttttttcgatattttttattgtgaattatatttttggtttgtttaaagtgatttaatttttttttttttttcgttggttttgatattgattattttaatataatattttatgggttaatattatagttgttttgttttgtcgttgttattgtttttaattggtatttttttttttaggatttaattttttaatttattttgtatataatttttatggttatttgtcgttatatatagaagttgaaaaagtttaagggatagagttatttaggtagttagtattttagtaggttataacgtttttttggttttattttttttataggaaaaggaagaaattggattagattagtgaattttaaattttataatatatcgtagtaatttgtagttatataaaaaaagttagatgattatttttttttttatcgcgaatagtttaattttaaatattttgtaggtatttattatttttgaagatcgttatataatttttatgaaattgatttgatataggtttgttttattaggaaagttgattagttagttaatattttttgtttatttgttagtgatttattaatgtaattaattttgtttagggatatatagtggttttttattgtttttttttttttttattatttgaatttttagataattttttttattttttgaaatatgtgtatttagtttttttattaatttttgtaaagtatgattttaattttataaaaaaatattgtatttattttatttatattattttgttgttgtttttttatttttttgattttttttatagaataatttttttcggggtttatgtttaattttataatatttaatttaagttttggaattaagggattattagataaagatagggtaaattgaaagttattagttaaaaataagtcgtggtttgataattataaataattaaatgtagatagttattattattttaaatttttgaggaattgtattttgtaatgtgtttaagtattatattattttgtttggaattaaaattgtggttttgataagtttttttttttaattgatttttgttatttttattattattgtagtttttatttagtgattattataataataaaaaataatttatagtaattatttttttaaaaaatatttattatatgatagttaatttatgtattttttttgatttaatatttaatattaattaatatagttgtgttattatttttatattgtagttgaaggggatatttagagaatgtttttaaaatatgttttaggttaaaagtttgttgagaggagtggttttaggttggtatgatttttaaattttgttattaatttaattttttgtaaatatttttaaatatttgttttgtttttgattattgttattttagttttggttttatatttttattttttttaaagtttagtttttttagttttttggttatacgagatatttttaagtttttgtgtttttttttttattgttttttgttaaaagattagtttttagttttttaggggataaatttttattagttttttaggttttagtgttaagtttttttttttttggatagttgtatttgagatatattttgtttatgttttttttgagtttttgttaattatttatatttttataatattttttattttatttatttgtatatgtatttttttatttgattgtaaattttaaagtgtatagatatgttgttaaagtggtatttttaataatagtagagtaagttttaagaatttatgtttattaaatatatttgaatggataggggaatgaatatgttttttttttgttgaaatatttaatatgtaattattatttattaaatgaaattaaatttatttggtttgttattaagaatttgtaattattaggtgggtttattttgtttattgtttagatagagttaatttattaagataggggaattgtaatggcgtaagagtaatttacgtagattcggttgttttggagagggtagtgttattattatttaaattagttttttcgagtatttagaaataagaacgtttaaagataatttggtagttaggggtttgggaagtaggaagtgttgattatttaggtgggagatggaattatagggtgttaaagtgaggtttttttgttgtgttttttttttgggtgtgatggtagaattggttgggttagattattggtttgggtggtgttagttgatttattgagtgtagcgtttgaaaaatattttaagtgttgatattagattttataaagtgatattatttttgggagtataatggggatattttaattttaggagttagaggttgtatgttttttatattgtaatttttagttttgtagttaatttgttagttttgtaaagggagattggattttaggtaagaagagggttttttcgagaaaaggttgttatcggttttgttttagttaaattatgaattgaatttttttttaaagttagttcggtttatgtttaggaatgaataagaatagtttaagggatagaagtaagatagagttggttaggttttattttttttattgtcgtaattattttagttataatattgtaaaggtagttttaatttttttgtttgggttttttaatagtttaattttaaggtgtaggttatgaagatgggaaaaggttgtcgattattttggtttttttttgttgataggagatatagtggaaattagagtgaattttaaggtgagaagaatgtaattattttgtaattgtttgagtatatttatgtaggattggttgggtttttaatgtttgtaatgtaaaaatattagtatttttttttgtagttttgttataatatttaagttaatagttttttgtaaggtaaataataaattttaggatgaggagtataatttttaattttaaaagtaaaaattggaaagtattaatttggggatttttaatttataaagaatttaggatttagtttaaattgtaggaaaaaatttaaataaaattaataatgggtatattatatgtttttttttgaagtataatttttttttttagattttatttttattaaaagtaaattataatagaattaatttgtttattaaaataagttttagttttattgtatttggtttgattatttgtatgaagtgtaataagaataattattttttatttaggttgttttttgtttaaattggttttgatggaattttgttttatgaggaattttagataagattttttaagagttaattttagttatgtatttgtatttttaaatatttatgagttgggtaaatttttttttttttaaggttttaagataatttggagtttatgaatttgttagaaagtgatattttttatttattatagattaagaattttgtataaggattttgtgtagataaggtatgaagttagattttttaaggggtttttattggttttgtaagttaatttcgattttttaagggaagagtgttattttagttaaagttttggtaaaataattaatttttttaattgtgttatgttataaaagaaaatagatttttattgtgtttatggaattaattatgttgttataaattgagaatatttataaagagtttttaaattttggagaaattaggtagagagaaataaatatgttttaaaatttttttataggagtgtattttatttatttgttaaaagttgtaaatatttttaaagaaataagttattttgattgtgaaaattgaaggattggtgatatttaagatattagttttttatgagagttttggaagttttgttttttttttttattttaatagtataatttttaaagttatttgagatttgtatttagagttttatatttgattataaattgttttttgaaaacgattaaagtaagataaaatgtttgtggatgataaaagtttatagatattattaaagttataattgattaggaattttgtttatttttgtggtatttaataattttgtataataattataattattaataatgtatagtaaattttattagaattatagaagtttatataaatatatagatagatagaaaatttagtatttgtaagattttttatttgttagttgttaattggattattggttttagagtggagtttttggaggaatagggttaggaaagtatgtattttttttttaagttaaataagtaggtatagttgaaggtaaagatagatttttaaaatgaaggatgttattttatattggattttagatttttaaaaggaaggaaatattattggagaagagagtgtagtgtttttaatttgtattttattgtaaggtaatttaaagttaattaatttattttgaaattagtttattttttatggaagttttattttttagttaggtatggggatgttttcgtatttttttggtggtttagagtatgtttttttgatttaagtgtgcgaagagttaagtttttttttgaaaatattattagttattttttaaagtatattttttatttagttattatatattaaagttattttataatgtaaagtaatttttgatatttttaaaatttaaattgttagataatataatgtaaaatagaatagagtttttgattttgagagtgatttatttatttttaattttttggttgttatgaagaaaatagagggttttttgtttgttttttgttgtttgttttttttaaaatggggtttgtggtgttttttttgttttttttaaggagttttaggttattaaaagttattttagtgttttttatgtgtgtattaagagtggtaagataaaaaatggagaaaaataatttagtttattaagaagaaaaaatttttttttatagaaaaacgagatttaagaagagaaaaatataaaggttttttaaatgtatttataatttgtttatttatttttaattaagttgatttttaattttagtgtttttaataaaatttttttaaatttcgtattatttaattttagttatgcggttaatatttttggtttttgaattttattaaaagtaattttttaggtgttttaaaggtgtggtaagtagtttttttttataagatttagaatttttttaaggtagtttagagaaaggaaaatttaagagaggaaattagaagttatttatggggttgtgggggaattttattaaatggtaaagttatgtaaatagtaaattagaaggaaatcgttttagaagttaagaatagagtttgagtttttatgttaaaaggtaaagttttagttattgaattatagtattgagtagtttttattgttattttaagaaggagattagagaagttatttttaattttgttaaggtttttaattgtttaagaaaaatttttagggttggatggtataaattaaaaggaagtatttatatatggttataagattaagtttttaaggaggttaaataagatagagaaattttatatagtattggttttagggatttattataattggttagtttgttgagttggtttgaaaagtaggtttataggggttttaaatttatgttttattttgtgatatttttttttttattatagaatattgaaagataaatttttagtaaaaatatattagatttgttataggttaagattagttttgtaaatttttttttttattaattaaaattttatagagaaatatatagtgatgtttattgtttatatagatggagaaagagagagagattagaaatttagttggtaagaattttttatattttttgttggtatattagatttttgggtgttttttttttgtaatttttagaagaacggaacggtttttgattagtttgtttattttattatagttgtggggtttaagttattttataagaaaaaagttattattttttgttttatggaaatataggtaagatttttaaaatgtaagatgttgtttaattagttgtatggggaattatttaatattttttattttagtagaatttatataataaaatagatattagttatttcgtttagtatttaatattaatttggtaaagtttagatttttttttgttcgtttttgttgtttttgatttattttaggtggggagggacgattttagaatagtaatttataatggggtttttgggtaaggtaaagagtagatagttattatgagataggtttattgaattttttttagggtttatcgaatgtaattaaataagaagagttttttgagttaggtttgttggattttttttagtaattttttttgagattttttttatatatataaatatatacgaagatgagatagatagaaggttttttaaattagatgatttttaaataggaattttaagagtattttttttaaattatttttttattttttgtttgagaaattttaaaattgttttgattgaggataagttttttgaattaagattttttttattagttagagttaattaagattttagtggagtcgaatagatatttcgtggtggagttataaatagatattttgtaatggggttatagatattttgtaatggggttatagatattttattatagagttatagataagtcgagagaaggaaggaggtattagtagtgtttagtagatttattaattttaatattttgtaatggggttatagatagatattttattatggggttatagaattagttaggagaaggaaggaggtattggtagtatttaggatatttattaatttagatattttttaatgtagttatagacggaaattttgtgatagggttatagttagaggatatttttttaggattattttttcgttgtaattaaatgtatgtatattgggttggtagtgtttgttagtggagagagtattagagttagtttttagtttaagagaattaggcggttatttgggttagtttttggatttatcgttggagcgggggtattaaattataagtaggtagttataaaggtttttttagtttgatttcgtttattgttgtaatttttttagttataattttgtaaaggtggttttatattttttaagagttgagttatatataagttttatttatttgtttttatatggatttgattattgatttagtaaataattagtaaatatttagtaaataattagtaaaaagaatgttaaaaatagtgtagatgtagtttatggtttttgtttttatagagtataaattttaatagtggatagagataagtaggttgggaattataattaaatggaaaaataaaaaaaaaggttggatgtggtggtttaggtttgtaatttaatagtagtaatttgggagattaagatgggtggattatttgaggttaggagttcgagattagtttggttaatatggtgaatttttatttttattaaaaatataaaaattagttaggcgtggttgtgtgtatttgtagttttagttatttagaaggttgaggtaggagaatcgtttgaattcgggaggtagagattgtagtgagttaagatagtattattgtattttagtttgggtgatagagtgagattttgttttataaaaatatataaatatataaataaataaatggaaaaaaaatgttattttaaggagatataaggtgttttaggagtatatatttttgatgttgttttttttggaagaattagagaggatttttttaagaaaatattatttaatttgatatttgaaggatagatagatagatagatagatagagaatagtttaaaaattagaagaaattagaagcgggggtgttgaaattatatagatttttaagtagagatttgattttttgagaaaggtgttatttaatttgagatttgaaggttagatagatagtagtaggaaaataagaatgaatgagaaggtaggggttggaaatatagagatttttaaatagaatttttttagaaattaaatgaaggtagaacgttttgaatgtaatgagtaaggtgggaatagtattagaaaatgagtgaatgagaaggtttagattagaataggttgaaagtttttatggttaaatttagatattggaatatttttcgttgtaaagagtagaatagagggacggagagtagattgataaagtttttatgaatttattttttaagaaagaaaggatgttggttcgaatagaagtaatgaataattagaattgagagaagtggttagattttgaaaatgtttagtaaataaaatcgatgtaatgtgaattaagaagggaaataagatatagagaaggttaaagaggttgaatattattaggtattgttgtttttttgtatttggagtataggtattatttattagtatatggaaaagagaatgaaggatggaaatgaaaaaatgaatagtttatttttgtaagttgagttaaatgaggttgtgagatgtagttgagatattttattgtttattgaatgtataggttttaatatcgatatttatatttgggttgaatttataaatttgagaatgatttatttatttttttaagtatataatggatgttattagaatgtgtagattatattttaggttatatttttaatttatttatttatttatttgataaataaatattgtatatattttttatgtataattttttgtttttatgagtttaatttgtttagagtttatgtataagtgagataatgtgatattttgtgttttggtgtttggtttggtttattttatttaatataatgttttttatgtttattaatattgttagaaacgataggatttatttttatttaaaagttgaatagtgttgtattttgtatataatttatattttttttatttattaatttgtttatagatatttaggttgattttatattttggttattgtgaataatgttgtaatggaaatagaagtttagatattttttcgagatattgattttttaatttttgatatatatttaatagtgggattgtttgattatatttttagttttatttttaatttttagaggtgtttttatataggtttttataaagattatgttaatttatttttttttttttttttttttttttgggaaaaaaattttttttttgggggttcgggggggggggtatttttttttaattttaaaggggtttttaaaaaaggtttttaaaaaaatttttttaattttttttttttttttttttttttttttttgagatagagttttattttgttgtttaggttggagggtagttatggaatttaggtttattgtaattttcgtttttagggttttagtaattttattgtttttgttttatgagtagttaagattataggcgtttattattacgttcggttaatttttgtatttttattagaagtagggttttattatgttgtttagtttggtttagaattattgattttaggtgatttgttcgttttaattttataaagtgttgggattatagtcgtgagttattgcgtagggtttaatttacgttttattaatagtgtataagagtttttttttttttatattttttttattatttgttattttttgtttttttggtaatagttattttaataggtgtaaagtgatattttattgtgattttaatttttttggtggttagagaggttgattattttttatatatatattttttgtatgtttttttttgaaaagtgtttattttggttttttgtttatttttaaattagtttattttttttttattgaattgtttgtgttttttgtattttgtatattaattttttattagatgtatggtttgtaaattttttttattatattgttgattatttttttaattttttgattgtttttttgattgtgtaaaagttttttagtttgatgtaattttatttgtatattttagtttttgttttttgtttttttttgttatatttaaaaattattgtttagattaatgttatgaagttgtttttttttgtttttttttagtagttttatagttttggtttttatatttatatatttaatttattttgagtttatttttgtatatgtttagagatttttatttttttgtatgtggttttataatttttttaatattatttattgaagaatttgtttttttttagttgtgtgtttatgaaatttttgttgaaaagttaaattaatgtaaataattgggtttatttttgggttttttgttttgtttatttgttttttgtttttatttttatgtaattattgtgttattttgatgattgtagtattttgtagtttattttgaatttagatagtgcgatgtttgtagttttgttttttttatttaaaattgttttgtttatttagggtttgtttttttttgtgtgattttatataaattttaggatttgtttttatttttgtaaaagttgttattagaattttgataggaattgtattgtatttttagatttttttgggtattagggatattttaataatagtaattttttagtttattaatttaaaatatatttttatttatttttgttttttttagttttttttattaatattttatagttttgagatttgttattattgttgatatttttgagataggattttattttgtagttaagattggagtatagtgttataattatagtttattataattttaaatttttgggtttaagtaatttttttattttagatttttaagaagtaaggattatagatatatgttattatggttagttaattttttaaattttttgtagagatatagttttattatgttgattgggttgaagttttatatttttacgtgtatttgttttttatttattcggttaaattgatttttaagtatttttgtagtaattttaaatggaaatttatttattttttaaagatggtttattgttatatagaaatattatagatttttgtatgttgattttttttattttgtaatttttttgaatttgtttatttgttttaaaagatttttggtggattttttagggtttttcgtatataagattattttatttttaaataggtataattaaatttttttttttttaattttgatgttttttatttttttttgttggcgaattgttttggttagaattacgttgaatggaagtggtaaatgtgaatatttttgttttttttttgattttagagaaagggtttttaattttttattattgagtatgatgttagttgtgtgtttgttatatgtgattttttttgttaaaaattttttaattttattgtttattatatttttttatatattatttatttagttaatattatattagtttattgagtatataaataaataaaatagaagtttagaatttaggtagtttggatattttatatattaatttgtgtattgtttgtaaattatattgtgttgtaatatttgtatttgatgttgtaagattaatatttttgttatttttttttagaagtttttgtgattttatttgttggaatgtattaatgttttttgagttttttaaatattttgtttatatttttttaagaagttttttattaattgttaggtaatgtagtttgatgaattaagaatgggggttttggattttgaatttttagattttaatttttgtttttagttattatatattcggtgtttttttatattatttgagttaattatttattattttttattttttatataagagaggttaatatatgttttatatggaatttttgtgaaattttagtaatgtatttggtatgatgagggtttaatgaatattaattattttaattgaattatattatgattaattatatagattatggtgaaaaaaataagatttgaattttaatttatgtgatgtgatataagttattatttaaatggtgaatataaaatagggaatataataattattttattggtttattgtgagggtttagtatattaatatttgtaaaatttttggtatagtgatatgtaaatgataatgatgattataataatgatttaaattgttttatatgtatttattttttatttataataagtatatgggagatattattttttattaagttaatttatattatgtaattttttttttggtttgtaatgtttaatgttttttttataatagttgtttaataagtacgtatgaaaatattaatttaagataatttagataatgaggttggtgtttttgtgttaaagtttttgtgtaatgttttgatatgatttttttagatgttattttgtgttagtattatttttatatttatatggattgtataattatttttgtagtattgattgagaattgataagatatttagtatttttgtgtataatttgtcgaaattatatttgttgtattgaaataaaggatgtattattttggtatttatatttttttataaatatttaaattattttaaggagtaatatattaatatggtgttaaattaaattaatttattatattggaagattaggaattaggttatttttaattttaaatttttattgagaataagatttgaaagaattataaatatggatgtatttatttatttattttttatgtatttagtaagtatattaagtatttttaaatattttgaatataaagatgtgggtataggatgtaagttaaaaaaatgtaaatttaaagatatagtttttttattaagaaaattaaatatagaaaagagtaaaaattatataggaagtaaaaatttagtaggaagaatttatattttagataagagtattgattttttcgggaatatatattttaggtagattattattattatgggtcgtgaattagtaaaagagaaaaatgaatatagtggatgattaggaagtttgtattaggtttaatgttatagaaggaagttgagaagttaaaagaaaagaaaagaaaaaagaataaaaaagaaaataaaaagtatttagtggtaataaattgttaaataatttggtaggaatatgatgaatgatagaattttataggtataagaagatagatggtgaagtaggatatatttttagaagtattttatattatagaattatatttaaagtgagggtgaaattttttaagttgtgtttatagttaaaggaatttttttatttttaata

SEQ ID NO: 286 - DNA, 18683 bp, Artificial Sequence
  chemically treated genomic DNA (Homo sapiens)
tgttagaaatagaaagatttttttaattatgggtatagtttaaagagttttatttttattttagatatagttttataatgtgaaatatttttgaaagtatgttttattttattatttgtttttttgtatttatagagttttgttatttattatatttttattaggttgtttaataatttattgttattaaatattttttatttttttttttgttttttttttttttttttttttttagttttttaatttttttttgtggtattggatttaatgtaaattttttggttatttattgtatttattttttttttttattggtttacggtttatagtgataatgatttgtttaaaatatatattttcgggaaagttaatgtttttgtttagaatataaattttttttattagatttttattttttatatgatttttatttttttttgtatttagtttttttggtgaaagaattatatttttgaatttgtatttttttaatttatattttatatttatatttttgtatttaaaatgtttaaaagtatttaatatgtttgttaaatatataaagaataaatggatgagtgtatttatatttataatttttttaaattttgtttttaatgaaaatttaaaattgaaagtaatttgatttttaattttttagtgtggtggattagtttaatttgatattatgttaatgtattattttttagagtaatttgaatatttataaggaaatatagatattaaagtaatatattttttgttttaatataatagatatgatttcggtagattgtatatagaaatgttggatattttattaatttttaattaatgttataaagataattatataatttatgtaggtgtaaggatagtgttgatataaaatgatatttaaagaaattatgttaggatattgtataaaagttttggtatagaagtattagttttattgtttgggttattttgaattaatatttttatacgtgtttattgggtagttattatgagaaaaatattagatattataaattaggaaaaaagttatataatataaattaatttagtaaagggtaatattttttatgtatttattataaataaaaaatgaatgtatataaaataatttaaattattattataattattattattatttatatattattgtattaaaggttttataaatgttaatatattggatttttataataagttagtggggtagttattatattttttattttatatttattatttaaataataatttatgttatattatatgaattaggatttaaattttgttttttttattatagtttatatagttaattatgatatggtttagttaaaatagttaatatttattgagtttttattatgttaagtgtattattgaaattttataaaaattttatataaaatatatattaattttttttatatggaaaatggaagataataagtaattgatttaaataatgtaaaagaatatcgagtatatagtaattgggaataagaattgaaatttaggggtttagaatttagagtttttatttttaatttattaaattatattatttgatagttggtgaagagttttttaaaagaatgtagataagatatttaaggggtttagaaaatattagtgtattttaataggtgagattataaaggtttttgagaagaggtagtaaaaatgttagttttgtaatattaggtatagatgttgtaatatagtgtgatttgtaaatagtatatagattagtgtgtgggatatttaaattatttgagttttgggtttttgttttatttatttgtgtgtttagtaaattaatatagtgttgattgaataaatgatatgtgaagaaatataataagtaataaaattgaagagtttttaataaaaaaagttatatatgataaatatatagttaatattatatttaatggtgaaaagttgaaaattttttttttaagattaggaagaagataaagatatttatatttattatttttatttaacgtagttttgattagagtaattcgttaataaaaagaaataaaaggtattaaaattggaaaggaagaagtttaattgtgtttgtttaaagatgaaatggttttatatacggaaaattttaaaggatttattaaaaattttttagaataaataaatagatttaagaaaattgtaggataaaaaaaattaatatataaaaatttgtagtgtttttgtataataataaattatttttaaaaaataaataaatttttatttaaaattgttgtaaaaatatttagaaattaatttaatcgagtaggtaaaaaataagtatacgtaaaagtataaaattttaatttaattaatatggtgagattatgtttttataagaaatttaaaaagttggttggttatagtagtatgtgtttatagtttttgttttttggaagtttgaggtaggaggattgtttaagtttaggaatttgagattatagtgagttataattgtgatattatattttagttttggttatagaatgagattttgttttaaaaatattagtaataataataaattttaaaattataaaatattgatagggaaaattgaagaagataaaaataagtagaaatgtattttgagttgatggattggaaaattattattattaaaatgtttttaatatttaaagaaatttaaagatataatgtaatttttattaaaattttaatggtagtttttataaaaatagaaataaattttaaaatttatatggaattatataaaaaaaaataaattttgaataggtaaagtaattttgagtaaagggaataaagttgtaggtatcgtattatttgagtttaaaatagattataaagtattatagttattaaaatagtataatagttgtataaaaatagaaatagagagtaaatgaataggatagaaaatttagaaataaatttaattatttatattaatttgattttttaataaaggttttatgaatatataattgggaaagaataaattttttaataaatgatattgggaaaattgtaaaattatatgtagaagaataaaaatttttaaatatatataaaaataaatttaaaatgagttaaatatgtaaatgtaagaattaaaattgtgaaattattagaagaaaatagaggggaatagttttataatattggtttagataatgatttttggatatgatagaaaaggataggaaataaaagttaaaatatgtaaatgaaattatattaaattaaaaagtttttatatagttaaagaaataattaaaagattaaagagataattaatagtatggtagagaagatttgtaaattatatatttgataaagaattaatatgtaaaatataaagaatataaataatttaatagaaggaaaataaattgatttagaaataagtaaaggattagaataaatattttttaaaagaagatatatagagaatatgtatatgaaaaatgattaatttttttagttattagggaaattgaagttataatgaaatattattttgtatttgttggaatggttattattaaaaagataaaagataataaatggtggagaggatgtagaaaaaaagaaatttttgtatattgttggtaaaacgtaaattaggttttgcgtagtggtttacgattgtaattttagtattttgtgaggttaaggcgggtagattatttgaggttagtagttttagattaggttggataatatggtaaaattttgtttttagtaaaaatataaaaattagtcgagcgtggtggtgggcgtttgtaattttagttatttatgaggtagaggtagtagaattgttggaattttagaggcggaggttgtagtgagtttagattttatgattgttttttagtttaggtaatagagtgagattttgttttaaaaaaaaaaaaaaaaaaaaaaaaaaaaaattaagggggtttttttggaaattttttttggaaatttttttaaaattaaaaaaaaatgttttttttttcgggtttttaaggggggaattttttttttaaaaaaaaaaaaaaaaaaaaaagagtaaattagtatggtttttatggaaatttatatggagatatttttgaaagttaaaaatagagttaaagatatgattaagtaattttattattaagtatatattaaaaattggaaaattagtgtttcgaggagatatttgaatttttatttttattgtagtattatttataatagttaagatataaaattaatttaaatgtttgtggatagattaatagatgaagaaaatgtggattatatataaaatgtaatattatttagtttttaaatggaagtaaattttatcgtttttgataatattgatgaatatgaagaatattatattaagtaaaataagttaggttaggtattaaaatataaaatattatattattttatttatatatagattttaaataggttaaatttataaaagtagaaggttgtatatagaaaatatgtataatgtttatttgttaaataaataaataagtaaattaaaagtatggtttgaggtataatttatatattttgatggtatttattatatgtttaaaagaataaataaattatttttaaatttatggatttagtttagatgtggatgtcggtattgaaatttatatatttaatagataatgagatattttaattatattttataattttatttaatttaatttataaagatgaattgtttatttttttatttttattttttatttttttttttatatattagtaaataatatttatattttaagtataaaagagtagtaatatttggtgatatttaatttttttggttttttttatgttttatttttttttttaatttatattgtatcgattttatttgttaaatatttttagaatttgattattttttttaattttaattgtttattatttttattcgggttaatatttttttttttttaagaaataaatttataagaattttattaatttatttttcgtttttttattttattttttgtaacgaagagtgttttaatatttagatttgattatgaaaatttttagtttattttaatttaggtttttttatttatttattttttgatattgtttttattttgtttattatatttaaaacgttttgtttttatttaatttttagaaagattttatttaggggtttttgtatttttagtttttatttttttatttatttttgtttttttattgttgtttgtttaatttttaagttttagattagatggtattttttttagggaattaagtttttatttagggatttgtatagttttagtattttcgtttttaattttttttggtttttgaattgttttttgtttatttgtttatttgtttattttttaagtattagattagatggtatttttttaagggaattttttttgatttttttagaggagatagtattagagatatatgtttttagggtattttgtatttttttagagtagtattttttttttatttatttatttatgtatttatatatttttgtgagatagagttttattttgttatttaggttgaagtgtagtggtgttattttggtttattgtaatttttgtttttcggatttaagcgatttttttgttttagttttttgagtagttaggattataggtgtatataattacgtttggttaatttttgtatttttagtagagatggggatttattatgttggttaggttgatttcgaatttttgattttaggtgatttatttattttggttttttaaattgttgttattggattataggtttgagttattatatttagtttttttttttatttttttatttaattgtgatttttagtttatttatttttatttattgttagaatttatgttttgtgaggataggggttatgaattatatttgtattatttttggtattttttttattagttatttattgaatatttattaattatttattgaattagtagttaagtttatgtaggaataaatgaataaaatttatgtgtggtttaatttttaaggaatatgaaattatttttgtaaaattataattgaggaaattataataatgaacgaaattagattgggaaagtttttgtggttatttgtttgtggtttggtgttttcgttttagcgatggatttagaagttagtttaagtagtcgtttagtttttttggattgggggttggttttggtattttttttattggtaggtattgttaatttaatgtgtatgtatttaattgtaacggagaaataattttggagagatgttttttaattgtggttttattatagggttttcgtttgtagttgtattgaagggtgtttggattggtgagtattttaggtgttgttaatgttttttttttttttttgattggttttgtggttttatagtggggtgtttgtttgtagttttattgtagggtgttaggattggtgaatttattaggtattgttaatgtttttttttttttttcgatttgtttgtagttttatgatggggtgtttgtagttttattgtagggtgtttgtagttttattgtagggtgtttgtttgtagttttattacggggtatttgttcggttttattggggttttggttggttttaattagtaggaagagttttggtttaggagatttgtttttaattaggataattttgagattttttagatagagaataggaggatagtttggaagggatatttttggagtttttgtttagggattatttgatttggaaggttttttgtttgttttattttcgtgtgtgtttgtatatgtggagggaattttagaaggaattgttgaaggaagtttagtaggtttaatttagaggattttttttatttggttatattcgatgagttttggagaaagtttaataggtttgttttatggtgattatttgttttttgttttatttagagattttattgtgaattattgttttgaggtcgtttttttttatttggagtggattaaagataatagggacgaatagaaaaaagtttgagttttgttaggttgatattgggtgttgaacgaggtgattagtgtttgttttgttatgtgaattttgttgggatagaaaatgttaaatggttttttatgtagttggttgggtagtattttgtattttaagaattttgtttatgtttttataaaatagaaaatggtgattttttttttgtaaagtggtttgaattttataattatggtgaggtgagtaggttgattagaagtcgtttcgtttttttggaagttatagagaaaaggtatttagaaatttggtatgttagtaaaaagtgtaagaaatttttattagttaggtttttggtttttttttttttttttatttgtgtaaatagtaaatattattatatgtttttttgtaaagttttgattaatagaaaaaagaatttataagattagttttagtttatagtaaatttggtgtatttttgttaagaatttgttttttagtgttttgtaatggaaagaggggtattataagatagaatatgggtttaggatttttataagtttgttttttaagttagtttagtaggttggttaattataatgggtttttgaaattaatattgtatgaaatttttttgttttgtttggtttttttaagagtttaattttgtgattatatgtggatatttttttttggtttatattatttagttttaaaaattttttttgagtagttaaaagttttggtaaggttaaaagtggtttttttagttttttttttggaatagtaatagaaattgtttaatgttgtaatttagtagttaagattttgttttttgatatagaggtttaggttttatttttggtttttggaacgatttttttttggtttgttatttgtataattttgttatttaatgaggtttttttataattttatggatagtttttgatttttttttttgaatttttttttttttggattattttggggaaattttaaattttgtaaaaagaaattgtttattatatttttgaaatatttgggaagttatttttgataaagtttaaaagttagaaatgttggtcgtatggttaaagttgggtaatacgaaatttaaaaggattttgttaagagtattaaggttaaaagttagtttaattaaaagtgaataaataagttatggatatatttaaaagatttttatgtttttttttttttggatttcgtttttttgtaaaagagggttttttttttttagtaaattgaattatttttttttattttttgttttgttatttttaatgtatatataagaggtattaagataatttttggtagtttgagattttttgagaaaaatagaggaagtattatagattttattttgggaaaaataaataataagaaataaataaaaaattttttgttttttttatgataattaaggaattaaaagtagatggattatttttaaaattaaaggttttgttttgttttgtattgtgttatttgatagtttgaattttggggatattagaaattattttgtattatgagatagttttggtatgtaataattaggtaggaaatatattttaagggatggttaatagtatttttagagggaaatttggtttttcgtatatttgggttagagaagtatgttttgggttattaggaagatacggaaatatttttatgtttgattgagagatgagatttttatgggggatgggttgattttaaaatgggttgattggttttaggttgttttgtaataaaatgtaggttagaagtattgtatttttttttttagtagtatttttttttttttggggatttgggatttagtataaaatggtattttttattttggagatttgtttttgtttttagttgtgtttgtttatttagtttggaaaaaaaatgtatgtttttttggttttgtttttttaagggttttattttgaagttagtagtttagttaataattggtaaataaaaaattttataagtgttgaattttttgtttgtttgtgtatttatataaatttttataattttgataaaatttattgtatattattagtaattataattgttatataaaattgttggatgttatagaagtaagtaaaatttttagttaattatagttttaatagtgtttatagatttttgttatttatagatattttgttttgttttggtcgtttttaaaaggtagtttataattaggtataggattttgagtgtaggttttagataattttaaaaattgtgttattggaatagaggaaaaaaataaaatttttaggatttttatgaagagttgatgttttaaatgttattaattttttagtttttatagttaagataatttatttttttagagatatttgtaatttttaataagtaggtaaaatatatttttgtgaaaaaattttgaagtatatttgtttttttttatttgatttttttagaatttggaaattttttgtaagtatttttaatttatggtagtatggttaattttataagtataataaaaatttgtttttttttgtaatatgatataattggagaaattggttattttattaaggttttgattggaatggtattttttttttaaagaatcgaagttgatttatagagttaataaaagttttttggggaatttggttttatattttgtttatatagagtttttgtataaggtttttgatttgtagtaagtaaagaatattattttttaataggtttatgagttttaagttattttgggattttgagaggagaggaatttatttaatttataggtatttaagggtataaatgtatggttgggattggtttttaaaaagttttatttgagattttttatggaatagagttttattaaagttaatttaaataaaaaatagtttaaataaaaaataattatttttgttgtattttatgtaaataattaggttaagtatagtaagattaaagtttattttggtaaatagattagttttattataatttatttttaataaaaatagggtttggagagaaaaattatgttttaaaagaaaatatataatatatttattgttagttttgtttgagtttttttttatagtttggattaaattttaaattttttgtggattagaagtttttaaattaatgttttttaatttttgtttttaaaattgagaattgtattttttattttaggatttgttatttattttataggaggttgttggtttaaatattatagtaaaattatagaggagagtattaatgtttttgtattgtaagtattggaagtttagttagttttgtatgagtatgtttagatagttgtaaagtggttatattttttttattttggggtttattttaatttttattatgttttttgttagtaggaagaagttagagtgatcgatagtttttttttatttttatagtttatattttaagattaagttattagaaaatttaaatagagggattgaaattgtttttgtaatattataattgaggtaattacgatagtgaaagaaataagatttaattaattttattttgtttttattttttaagttgtttttatttatttttgggtataggtcgaattgattttgggaaggaatttagtttatggtttgattgaaataaaatcggtaatagttttttttcgaaaagattttttttttgtttggggtttagtttttttttgtaggattaataaattagttataagattaaaaattataatgtaagggatatgtagtttttggtttttagaattggaatgtttttattgtgtttttagggataatattattttataaaatttaatattagtatttaagatattttttagacgttgtatttaatggattagttgatattatttaaattagtaatttaatttaattagttttgttattatatttaggaagagaatatagtaagaaaattttattttgatattttatgattttattttttatttgagtaattagtattttttattttttaagtttttagttgttaaattatttttaaacgtttttatttttgaatgttcggggagattgatttaagtaataataatattattttttttagaatagtcggatttgcgtgaattatttttacgttattgtaatttttttgttttgataaattggttttgtttaagtagtgggtaaggtgaatttatttggtgattataaatttttaatagtaaattaggtaagtttgattttatttaatagatgatagttgtatgttggatattttaatagaaggaaggtatgtttatttttttatttatttaggtatatttaatgagtataaatttttgaaatttattttgttgttattgggggtattattttggtagtatgtttgtatattttgaagtttgtagttaagtggaaaaatatatatgtaaataagtaaaatgaaaaatattataagaatgtaaataattagtagaagtttaagaaaagtataagtaaagtgtgttttaggtatagttgtttagagaagggagggtttggtattgagatttgaaggattggtaggaatttgttttttggaaaattaggagttggttttttggtagagagtagtaaggaaaaaagtataaaggtttgagggtgtttcgtgtaattagaaaattgggagagttgggttttagaaggaatagaaatgtgaggttaggattgaagtggtagtgattagagatagggtaagtatttgaagatgtttgtagaaagttagattaatggtagagtttgagagttatgttaatttgagattattttttttaatagatttttgatttaaagtatattttggaggtattttttaagtattttttttaattataatatggaaataatagtataattgtattgattgatgttaaatattaaattagagagagtgtatgaattagttattatatggtaagtattttttaaagaaatggttattatagattattttttgttattataataattattgaatgaaagttgtagtgataataaaaatggtaggaattaattagaggaaaaaatttattaggattatagttttggttttaggtaaagtgatgtaatgtttaaatatattataggatataattttttaagagtttaaggtaataatagttgtttatatttggttgtttataattattaaattacgatttgtttttgattagtggtttttaatttattttatttttatttaatgattttttgattttagagtttaagttaaatgttgtgaagttagatataaatttcggagagaattgttttatagggagaattaaaggagtaaagaaataataataaggtaatatgagtgaagtaaatatagtatttttttatgaagttgaaattatgttttataaagattaatggaaaaattggatatatatgttttaaaaggtagaaaaaattgtttgaaagtttagatagtaaaaaaaagaaaaggtaatagggagttattgtatgtttttgagtaaagttaattatattaatagattattagtagataagtagagagtgttaattaattggttaatttttttaatagaataaatttatgttaagttagttttataagaattatgtgacgatttttaaaggtaataaatgtttgtagggtatttaagattgagttattcgcggtgaggaagggggtagttatttgattttttttatatgattatagattgttgcgatatgttataaggtttagaatttattgatttagtttaatttttttttttttttgtgaggagaatgaagttaaagaagcgttatgatttgttggaatattagttgtttaagtaattttattttttaggtttttttagtttttgtgtataacgataggtgattataaaagttgtgtgtagaatggattggagagttaagttttggagggaaggatattagttaaaaataataataacggtaaaataaaataattgtgatattaatttatgaaatattatattaaagtagttagtattaggattaacgagaaagaggaaaaaattgaattattttaaatagattaagaatgtaatttataataagagatgtcgaagaagataataatttagaggtttttagatttgattttgcgaaaaaggtttgtgatttgggtaattaatttggaattaaaagaaagattttagagtgtatttcgaaatttttagaattgttttatataaataattttttttggttttttttattttttttttgattattagaagttgaaagaaaggaattaatttttttttggtttaaagatatttggaaaatatatgattttcgttaatatttttaatattaggttttatgatttaaattatatataattagtaagaaaaggaatttaatatgtgtgttatcggtttatttttttttttgtgtttattttagagtaataaattaagtgttttttaagtttttatttttaagtttttagttagaaaaggatttatttgttatagggaatagtttttgtttttttttatagcgttggaaagagttttagagttaaaaatgaaagtaaattatgtatttttttattgtaaagggcggaaacgtgtaattatagattgtgaaattgttgtttagaattttagatttattattaggaagtgttttgttattagtaaattggtatttaattattggaatttagtttttgatttgggggaaaaaaatgaaaatgataaaatattattttgtgggttgatattttagtttgtttttttttttgttttttgtggttatttaaattttttttatttatttgttttttttttttttgattttttagtttttttttttttgattataaagaacgataatgattgaagaagtttaatttaataatttttttttattttttgataagaattaatttaatagtttatatttttagttttttgggtaggtattgagttgtaggagtttttatatagtttagtagttttcggaattttagtgaggtaggagtttcgtttatttttatggaaagggggttgaagttagggagtaaaatggttttgtagtaggtttatttttatagaagtttgtaagtttagattcgttggattagaatttttattagttagtatagtagtttggagtacgttagagatgatcgagttttttaggggaggggcgattgttattattgtagttttagttagcggtttttttttattagtgttagggaggttgggtagattggattgggtagtagtttttatagtgtagtatagtcgttgtggtagattatggttagattgtttttttaggtgggatcgggatttattttttttttttcggtaagaaatgtttgtaggaattttagtaattttatttagagtttatagatagagtttttatttttttggtatagagtatttgcggagaggggtagttgcggttttaggtttagttaatttaattttttttgtttgttggttttgaagagtattagcgatttagataagggggatttttttagtttagtgtattatttttgttaagggatagttagattttttttttaagtgagtttttgattttgggttttttgattgggttagattatttaataggggttgttagatattttatataggagagttttaataggcgttaggttagtgattttttgggaagaagttttcggaggaaggaggaggtagtattttttgttgttttgtagtttttattggtgatatataggtgaatagtgtttggagtagatttttagtatattgtagtagatttgtagaggaagggtttgaatgttggaagaaaaataaaaaaaaataaaataataataatatagtattaataaaaaagattttataaaaattttatttaaaggttaatagttttaaagattaaaggtagataaatttataaagatgacgaaaaattaacgtaaaatcgttgaaaattttaaaagttggaatgttttttttttttaaatgattttaatatttttttagtaagggtataaaatagggttgaagttgagatggatgaattgatagaagtaggtattagaaagtgtgtaatgataaattttgttgagttaaaggattatattttaatttaaggtaaagaagttaagaatcgtgataaaagattataggaattgttaattagaataattagtttagagaggaatataaatgatatgatggagttgagaaatatagcgtgagatttttatgatttaaatataagtattaatagttaaattaattaggtagaagaaagagtattagagtttgaagattattttgttaaaataaggtaggtagaaaagattatagaaaaaaataaaaagtaatgaataatattttttagaattatgggattatgtaaaaagattaaatttatgattgattgaagtatttgaaagagatgtggagaatggagttaagttaaaaaatatattttaggatattatttaggagaatatttttaatttagtaagataggttaatatttaaatttaggaaatttagatagttttagtaagatattttataagaagattaattttaagatatataattattagattttttaaggttgaaatgaaaggaaaaaatgttaagggtagttagagagagaggttaggttatttatagagggaagtttattagattagtagtggaatttttagtagaaattttataagttagaaaagattggagattaatatttaatattaataaagaaaataatttttaatttagaatttaatgtttggttaaattaagttttataagtgaaggagaaataaaattttttttagataagtaaatgttgagggattttgttattattaggtttgttttgaaagatattttgtaggaaatagtagttatggaaaggaaaatttgttagtagttattataaaaatatattaaaatatataggtttatgatattatgaagtaattatattaataagtttgtaaaattaattaggtaatattatgatgatagaattaaatttatatatattaatattaattttaaaataaatgggttaaattttttaattaaaagatatataatggtaagttggataaaaagataggatttattagtgtgttgtatttaagagatattgttggtgagaatgtaaattaggttaatgattgtggaagagtgtgtggtgagttatttagaatagaaatattatttgattaagaaatattattattgggtatatatttagaagaatataaattattttattataaagatatattatatatatgtatatgtttattgtagtattatttataatagtaaagatatgaaattaattaaaatgtttattaatggtaggttggatagagaaaatgtgatatatatatattatggaatataatgtagttataaaaatgaatgagattatgttttttgtaaggataagaatgaagttggaagatgttattcgtagtagattaatgtaggaatagaaaattaaatattgtatgtttttatttataagtgggagttgaataataagaatatatggatttagggaagggaataatatatatggaggttagataagaggatgggggatgtgagagagtattaaggaaaagagataatgtatgtttggtttaataattaggtgatgggttgatttgtgtagtaaattattatggtatacgtttatttatgtaataaattgcgtattttgtatatgtattttagaatttaaaaaaatattaaaataaaatggtagtatgaagtttaatattgaaggattgtaagaggttagaaattcgtttttatttttaatgagtttgggattagaaaaggtttatgattgtaattgaatttgtagtttttttagttttttaaaatttttatattattgagtgattgatttaattttaaattattttttttgtataatataagtgtataattttgtatttagtgtattgtagtgtttttttagtattttatattttgtttgttattttttttatgtttgttgattgttatatatttttaaggaggttgtgaaatattagggatatatggttgaattatttatttttttaaagttgtgaaaatataataaagaatatattttggttattttattaaatgatattaaatagtttaagtttaaattattaaatagtatttttaatggtgaaaatataggtagtatattgttatatttgaatgtttttttttagaaatataattttagtttttatatatattataagatagttttaaaggaagaagtgatattttttttatagtatttaagatatttaatatagaaatgaaaagcggtttaatagaaataaagataaagagtggtttttattttagaagaaaagtaatggtagatttaaagtaggtagaaaagataataggatttaggaattttatagtttgtggtttaatttttgggttttttttttttaatgtaaatgtgtataaagatgatttatttttattttatataaattttggtgttgtgggaagttagggatttcgaatagagggatcggttaaagttatggtagaagaatataaattgtgaagattttatggatatttattagttttttaaattaatatttttataattttttatgtttgtttttattgtaatttttgaatataaattgtggagattttatggatatttattatttttttaattaatatttttgtgattttttatgtttgtttttattttaatttttttattttattatttttgtaagttgagggtgtatgtcgttttaggattttgtgataattgcgttaattgtataaattgtttaaataatatgaaatttgggtattttgaaaaaagaataagataagagcgacgtttagggaataagggagataattattaggtttggttgtttgagagttgggcggaatagagtcgtatttttttttttttaaaagtaaataggagaaatattgttgaatttttttttttagtaaggaatagaatgcgtttttagggggaggtttttaaaatggttgttttagggatgtttgttttttacggttgttataaggaatgaaataagtttcggttttttatagtgtttttaggtttattaggatgaggaaatttttatttaataaattttggttagattggttgtttgtttttaaattttgttttatgataagatgttattaatgataatgcgtgtttaaagttttattagtaattttaattttattttggttttgtgattttattttgtttttatttgttttgtgatattttattattttgtgaagtacgtgatttttgtgatttatattttattcgtatattttttttttttttgaaaattattaataaaaatttgttggttttgtggtttagggggtattatggaatttgtcgatatgtgatgtttatttcggatatttagttttaaaattttttttttttgtattttttttttttattttttagattggtcgatatttaggga

SEQ ID NO: 287 - DNA, 6641 bp, Artificial Sequence
  chemically treated genomic DNA (Homo sapiens)
taaaattaagagtagtggttagattttgaaaatgtttagtaaataaaattaatgtagtgtgaattgagttggggaataagatatatagaaggtagaagaagtttaatattattaggttttgttgttttttcgtatttggaagttaggtattattttttattatatggaggaggaaatgaaggatggaaatagaagaaaattagtagtttaattttaaaagtttaattgaatgaggttgtgggagtattttaagtgacgttttatttttggacgtatgggtttttatacgggatttatatttgggttgatttataaatttgagttatttatttattattttaaatttataattgatgttatgagaatttatagattatgaaaagaggtttttaagttaaatgttttgaattgttttttataaatattattttatttatttaattggtaaataaatattttatgtatttatgtataaaatgatgtttgaaatatatattgtagaatgtttaaagagttaaataatatatgtattattttatatgtttatttttttttgtgattatagtatttaaaatttatattgttaaataatttttaagaatttattattgattatagttattatgtggtgtaatagattttttaaatttattttttcgatttaattgaaatgttgttttttttgattaatatttttttaaattttttgtttttttttaattattattattttattttttgtttttatgtgtttaatttttgtgagtttatatattagtgagattatatagtatttgttttttggtgtttagtttggtttattttatttaatgtaatgttatttatgttaattaatgttgttataaatgataagattttttttttttttttaaagttgaatattgttgtattatgatattttttttatttatttatttatttatagatatttaggttgattttatattttgtttattgtgaataatgttgtaattataatggaagtgtatatgtttttttaatatattgatttaatgtttaaaatatatattaaatatttgggttgttatattatttttaatatttttaatttattttaatttttaattttttgaggagttttttattgttttttattatgattgtattaatttatatttttattaatagtatataagagtttttttttttttatattttttttaatatttgttatttttttttttataatatttattttaattattttaataggtgtgaggtattattttattgtggttttaatgtttttggtgattagagatgttgagtattttgtatagatttgttgtttatttatgtatttttttttgaaaaatgtttattttggtttttggtttattttgtaatatttgttttttttttattgaattgtgttttttatatattttgaatattaatattttattagatatatggatttaaatatttatttttattttgttggttatttttttatattgttgtttttttggttttgtaaaagttttttagtttgatgtaattttatattttaattttgttttttttttttatatttttagtgttatatttaaaaattattgtttatattagtgttattaagtttttttacgtttttgtgtagtagttttaaagttttagttattaggtttatgtttttaatttattttgagttgatttttgtatatggtggtagataagggttcgtttttatttttttgtttttggatatttaatttttttaatattatttatcgaagaaagtgtttttagtttattgtttgtttttgaaattttgttaaaaataaatttattgtaaataattgggtttatttttggtttttttgttttattttattgatttttgtgtttgtttttatgttagtattatgtttgattattataattttgtagtatgttttaaagttaggttgtgtgttgtttttagttttgttttttatttaaggatgttttggttatttgaatttttaaataattttatatgaattttaaggttgatttttttatttttgtaaaaaatgttattggaggtttaataggaattgtattgaatttatagattttttgggtagtatagatataataatgtaatattttttaatttatgaatacgggatattttttgatttttgtgaattttaggtatttttttttgttaatgttttatagttatgagtatatatatttttaattttttggttatatttattttttattattttatgaaatttttttatagttattataaatgagatttttattatttaattttttagtttgttgttataaaaatgatattaatttttgtatgttgtttttgtattttttaattttattgtatttgtgtattagttttaatagattttttatggagtatttagggtttttttaatatatgtaagattatgttatttataaataggatatattaattttttttttttttattttgatgtttttaaattttttttgttgtttaatttttttggttaggatttttagaatagaagcggtgaaagtgggtgtgtttgttttttttttaatttttgaagaaaagtttttatttttttattattgagtatgatgttaattgtgtgttttttataagtggtatttattgtgttgtaaatttttttaggttaattgttttttatatgtttttatatatttatttagttaaaattatatttatttattaagtatgtaagtaagttaaatagaattttagaatttaggtagagtagatattttattaattaatttgtgtattttttgtaaatttttatattttttgttttaatatttatattgtatttaaaattaacgtttttgttttgttttttaagaagtttttgtaaattttttttttggaatttttttattttttttgagttttttaagtattttatttgtgtttttttaagaagttttttaataattattatgtaatgtagttttatgatttaagagttggggttttggattttgattatttgtatttttatttttgtttcggagttattgtatattttattttttttttataggattatatttaattttttaagtaatttatttgtatatgtttttttttttatataaaagaggttaatatatattttgtatggagtttttgtgaaattttagtaaagtatttgattttatgggggtttaatatatattattattattgaaagtttgttatggttaattttatggaatgtggtgtaaaaataggatttgaattttaatttatgtgatttagggtagtttattatttaaatgatttataaaattgataaaataataaatattttattggtttattgtgagagtttagtatattattatttgtaaagtatttagaagagagatttgtaaataataatgattattattgatatgatataataataataatgataattattgatttattatattagtataatgataattattgatttattatattagtataataatgataattattgatttattatatgagtataataatgataattattgattaaattattataataatgataattattgatattgttaataataatgataattatttatgatataatgatgattgttattgttttatgtgaatttattttttaattataaaaaatatataggagatgttatatttattaaatgtaattttttgttttgttttgtaatttttatgtgtttttttaataatggttggtttattattggtatatgaatttaagataatttggaaaatgagtttggtgtttttaggttaaaattttgtttaatgttttgatatgttttttttagaaaatgtattttgtgtgaaagttatttttatatttagataaattagataatgatttttatagagttaatagaagagaggagatatttggtttttttatatataatttgtttaaattatattttttgtattgaaataagtgatttattattttgatatatatatgtgtgtgtgtgtgtgtatgtgtgtatatatatatgtgtatatatatgtatatatgtgtatatatatgtgtgtatatatatgtatatatatgtgtatatatatgtgtatatatatatgtgtatatatatatgtgtgtgtatatatatatacgtgtgtgtatatatatatatatacgtgtgtgtgtatatatatatatatatatatatatatatatatatatgtgtgtgtgtgtatatatatattttttggtaaaaatttgaattatattaaggagtaatatattaatttagtattatattaatttattataatatttgttaaatatttttaattttaaattttggtttgagaaaaggcgttgaagaattaggtatttagatgtatttatttatttaatgattaagttggatgtttatttatgtatttagtaagtagattaagtatttttaagtattttgagtagaaaattgttaattagtataattgggtatagtttgtgtgttaaaaaatataaatttaaagatatagttaatttattaaggaagttaaatatagagaaaaggaaagattttgtagtttagtaggaataatttatagtttagataagagaatggattgttttgggtgtatatattttaggtaggttattatgagtttgagtaagagagagaaatttgaatataatggatgattaggaatttagtattaggtttaatgttgtagaaaggaaaaagataagttataaaaaataaatttaagtggtaatgaattgttaaatatagtttggtaggaatttgatgggtgagagaatgttataggtataaagaaataatgagtatttgttgaagatatggtaagatagaatgtatttttaagggtgttttatattatagagttttgtttaaagtaagggtaaaattttttaagttgtgtttagagttgaaggagtttttatatttttgatagaagatagtggtaaaaaaaaaaggcgtaagaatttggaagttatgtttaaaggtattttttagaagtggatgggataatttcgtgataaattatatgttaaagaataacgtggttggataaatatttatttagattttagtatttaatacggattaaaagtcgattagtgtaaaaagtaagattggatattttataatggatatttttaattttttagaatttgtttaattataagttttatgtagtgatttttgtgatttttttatttttttttttttatgaaattattatttttattaaatttataattttttttttagggattattttgttttttgtggggtgggatttagtttttaatcggttaaaaggttgagtttttgggtttagattgtgtatggaaataattaatagtagaggtttgtagtaagatatatttaaatttaaatttagattttgttattaataatttgtgtggttttttgtatgtattttaattttttttgttttttaattattagttttattatttatgaaatggggataattttagtatttttttataagattgtggaaggttagaaatattgtgttggttggtattaatatgttaataatttttaagatattagttgttatttagaatttttttttttgagttttagatttatttagttttagatgtatttttaataattttgttttagtgttttattggttttattaaattaatgattatttaaaaattaaatatttttttttttaaataaatttgttttaattttaatttttttttattttagtaaaagaaattaatatatattaaattttttttattagaatgtaattggttgttttattaatgattggtagtaattagaagagggttaggtaaaaaaatttattattttgatatttatattttttaataaaaatttaaattatgttaaggtgtagtgattaatttgatgttatataaatttattatgttagagtagttatgatattatttttaattttaaattttgattgaggaaaagatgttaaaaaattaggattttgggtgtagttatttatttgtttattaagttatgtatttagtaagtatgttaagtatttttaagtattttgggtataaagatgttaatgagtataaagatgtgggtataggatgtgtgttaaaaatgtaaatttaaagatatagtgttttttttaaggaaattaaatatagtaaagaggtaagattgtatagtttagtagtatttatagtttagataagagtatggattgttttgggagtgtttattttaggtaaattattattattatgagttgtgagtaagagaaagagaaatatgaaagtagtaggtgattaggaaattagtattatttttaatgttatagaaggaagaagaaaagttataaaaataaatttaagaggaaatgaattgttaagtatagtttggtatgaatttgataggtgagagaattttgtagttgtaaaaaaagatgtgtgttattcgttggagatatggtaaaatagaatgtatttttagaggagttttatattatagagttatgttttaggtgaaggtagaattttttaagttgtgtttatagttaaaggagtttttttatttttgataga

SEQ ID NO: 288 - DNA, 6641 bp, Artificial Sequence
  chemically treated genomic DNA (Homo sapiens)
tttgttagaaatagaaagatttttttaattatgggtatagtttaaagagttttgtttttatttaagatataattttgtaatatgaaatttttttaaaaatatattttattttattatgtttttagcgaataatatatatttttttttgtaattgtagaatttttttatttattaaatttatattagattgtgtttagtaatttatttttttttaaatttgtttttatagtttttttttttttttttgtggtattgggaataatgttaattttttggttatttgttgtttttatattttttttttttttgtttatagtttatgatgatgataatttatttgaaatggatatttttaggatagtttatgtttttgtttagattgtaaatattattagattatataattttgtttttttgttgtatttagtttttttggggaaagtattatatttttgaatttgtatttttagtatatattttatatttatatttttgtgtttattaatatttttgtgtttaaaatgtttaaaagtatttagtatgtttgttaaatatatgatttaatgaataaatggatgattgtatttagagttttaattttttagtattttttttttaattaaaatttgaaattgaaaataatattataattattttagtatggtgaatttatgtgatattaggttaattattatattttagtataatttgaatttttattggaaaatatagatattaaagtgataaatttttttgtttggtttttttttaattattgttagttattggtaaagtaattagttgtattttggtgggagaaatttgatatatattagttttttttattaaaatggaaaggggttaaagttggaataaatttgtttagaagaaaaagtgtttaatttttaggtaattattagtttaatgaagttaatgaaatattggagtagaattgttgaaaatatatttagagttaaatgagtttggagtttagaggagagagttttggatgatagttaatattttgggagttattggtatgttgatgttagttaatataatgtttttaattttttatagttttgtgagaaagtattgaaattgtttttattttatagatggtaagattgatgattagggagtaagagaggttaagatatatgtaggaagttatatagattattagtaatagaatttagatttaggtttgaatatgttttattataagtttttattattaattatttttatgtataatttgaatttaaggatttagttttttagtcgattggaaattggattttattttataaaagataaggtagtttttgaaggaaaaattataggtttggtgaaaatgatagttttataaaggaaggaggatagggggattatagaagttattgtatgggatttataattgaatagattttaaaaaattggaaatatttattgtaaaatatttagttttattttttatattggtcgatttttgattcgtattaggtattagggtttggatagatgtttgtttagttacgttgttttttagtatgtggtttattacgaagttattttatttatttttgaaggatatttttggatatagtttttaaatttttacgttttttttttttgttattgttttttattagaaatataaagatttttttaattttgggtatagtttaaagagttttgtttttgttttagataaagttttgtaatgtgaaatatttttgaaaatatattttgttttattatgtttttaataaatatttattatttttttgtatttgtagtatttttttatttattaaatttttattaggttgtgtttaataatttattgttatttaagtttgttttttatagtttgttttttttttttttgtagtattgggtttaatgttaaatttttggttatttattgtatttagattttttttttttgtttaaatttatgatgatttatttgaagtgtgtgtatttaggatagtttatttttttgtttagattgtaaattatttttattagattgtaggatttttttttttttttgtatttagtttttttggtgaattaattatatttttgaatttgtgttttttaatatataagttatatttaattgtgttaattaataattttttgtttaaaatgtttaaaagtgtttaatttgtttgttgaatatataagtaaatatttaatttaattattaagtggataaatgtatttagatatttaattttttagcgtttttttttaaattaaaatttagaattgaaaatatttaataaatattatggtagattaatataatattgagttaatgtattattttttggtataatttagatttttattaggagatatatatatatatatatatatatatatatatatatatatatatatatatatatatatatatatatacgtatatatatatatatatatatacgtatatatatatatatatatatatatatatatatatatatatatatatatatatatatatatatatatatatatatatatatatatatatatatatatatatatatatatatatatatatatatatatatatatatatatatatatatatatatatatattaaagtaataaattatttattttaatataagagatatgatttaagtaggttgtatgtggaaaagttagatatttttttttttttgttaattttataaagattattatttagtttatttaaatataaggatagtttttatataaaatatattttttaaagaaaatatgttaggatattgaataaaattttggtttagaagtattagatttattttttaggttattttgagtttatatgttaataatgaattaattattattagaaagatatatggaagttataaaataggataaaaagttatatttaataaatgtaatattttttatgtattttttgtgattaaaaaatgaatttatataaagtaatgataattattattatattatgagtaattattattattattaataatattagtaattattattattataatgatttaattagtaattattattattatatttatataataaattagtaattattattattatattgatataataaattagtaattattattatattgatataataaattagtaattattattattattattatattatattagtaataattattattatttataagttttttttttaagtattttataaatagtagtatattggatttttataataaattagtagaatatttattattttattaattttataagttatttaaataataggttgttttaaattatatgaattagggtttaaattttatttttatattatattttatagagttaattatgataggtttttagtaataataatatatgttgaatttttatgaggttaagtgttttattgaaattttataaaaattttatgtaaaatgtatattaattttttttatatggaaaaggaaatatatatagataagttatttaagaaattgagtgtaattttgtgaaaagaaaatgaagtatatagtaatttcggagtaggaatagaagtataagtgattagaatttagagttttaatttttaagttatgaaattatattatatgatagttgttgaagagttttttaagagaatatagataagatgtttaaggaatttagaaaagatgagaaaattttaggaggagagtttatagaggttttttagaagataagataaaaacgttggttttaaatgtaatgtagatgttggaatagggaatgtgaagatttgtaaagagtatatagattagttaatggaatgtttattttgtttgagttttgaagttttatttaatttatttgtatgtttagtaaatgaatatagttttgattgaatgaatatgtggagatatgtgaaaagtaattaatttaaagaggtttataatataataaatgttatttatagaaaatatatagttaatattatatttaatggtgaaaagataaaagtttttttttaaagattaggaagaggataaatatatttatttttatcgtttttattttagaaattttaattagaggaattagataatagaaagaatttaaaggtattaaaataggagaggaagaagttaatgtgttttgtttatgaatgatatgattttatatatattaagaaaattttaaatgttttatgaaaaatttgttggaattaatatataaatgtagtaaagttgaaggatataaaaataatatgtaaaaattagtattatttttataataataaattaaaaaattggatgataaaaattttatttataatggttataaaaaaattttatgaaataataaggaataaatgtaattaaaaagttaaagatgtatatatttataattataaaatattgatagaagaaaatgtttgagatttataaaaattaaaagatatttcgtgtttatgaattggaaaatattatattattatgtttatattatttaagaaatttatgaatttaatataatttttattaagtttttaatggtattttttatagaaataggaaaattaattttaaaatttatatggaattatttaaaaatttaaatagttaaagtatttttgagtaaagaataaaattggaggtagtatataatttgattttaaaatatattgtaaagttataataattaaatatagtattggtataaaagtaaatatagagattaatggaataaaataaaaaggttagaaataaatttagttatttatagtaaatttatttttgataaagttttaagaatagataataggttaaggatatttttttcgataaatgatgttgggaaaattaaatatttaagagtagaagaatgaaaacgggtttttatttgttattatatataaaaattaatttaaaatggattaaaaatataagtttaataattgaaattttgaaattattatataaaaacgtggaaaagtttaatgatattggtatagataatgatttttggatataatattaaaaatatgggaaaagaaagtaaaattaagatatgagattatattaaattaaaaagtttttgtaaagttaaggaaataatagtgtgaagagataattaatagaataggagtaaatatttgaatttatatgtttgataagatattaatatttaaaatatatgagaaatataatttaataggaagaaaataaatattataaaatgagttaaggattaaaatagatattttttaaaggaagatgtataaatggataataggtttatataaaatgtttaatatttttgattattagggatattaaaattataatgagataatgttttatatttgttagaatgattagaatgggtattataaaaaaaaagataataagtgttggaaaggatgtagagaaaaaggaatttttgtatattgttggtgaaaatataaattagtatagttataatgaaaaataataggaaattttttaaaaagttaaaaattaaaatgaattaaaaatgttaaaaatgatgtagtagtttaaatatttagtatgtattttaaatattaagttagtgtgttgaaaagatatatatatttttattgtgattgtagtattatttataataggtaagatataaaattaatttaagtatttgtagatggatgaatggatggagaaagtattataatgtaatagtatttagttttagaaaaaagaaagaaattttgttatttgtgataatattgattaatatggataatattatattaaataaaataagttaagttgggtattaaaaaataaatattatatgattttattgatgtgtagatttataaaagttaaatatataaaagtagagggtagaatggtggtgattaggaggaggtaggaagtttggggagatgttgattaaaggaaataatattttaattagatcggagaagtaagtttaagaaatttattgtattatatagtgattatagttaatgatgaatttttgaaaattgtttgatagtgtaaattttaagtgttgtaattataaaaaaagatgagtatatgaggtaatgtatatgttatttagttttttaggtattttataatatatattttaaatattattttgtatataagtatataaaatatttatttgttaattaaataaataaaataatatttataaaaaataatttaagatatttggtttgagagtttttttttataatttataaatttttatagtattaattataagtttaaaataataaataaatgatttaaatttatggattagtttagatgtggatttcgtatggaaatttatacgtttaaaaatgagacgttatttaaaatatttttataattttatttaattgaatttttaaaattgaattgttaatttttttttatttttattttttatttttttttttatatagtaaaaaataatatttaatttttaagtgcgggaaggtagtaaaatttggtgatattaaattttttttgttttttgtatgttttattttttaatttaatttatattgtattgattttatttattaaatatttttagaatttgattattatttttaatttta

SEQ ID NO: 289 - DNA, 5527 bp, Artificial Sequence
  chemically treated genomic DNA (Homo sapiens)
ggttttttgttgttgttaaattaataattttagtttttgggtttagttatttgttgttgttaaaaatgttgttgagagtgatggagaggtgttttagtttttattttatagattagaaaattaaggtttagagaaattaagtagttttggagataggagttatggtttttttatttgagttattattttgaaatattaaggataagttaattttattaatagttttaggtttgtgagaaatgggtttggtttattttgaagattgtaaataaataaaaaaatagattgttttattattgatgagaaatatgagttattttgttaggaattgaaagtatagttgtttataaaaaagttatgtcggggtttagtttttttaggtttttgtgtgtgaaaaattatttagttaaagttttttttttatttttttttgtgtttagtaggatgttgaaatttttggaaaagataatggaaattaggggtaggaagagaatagtgtggggtgttaaatagattttagtaatttttttgtttacggttatttttgcgtagatatttcgattttttatgcgtaggtggagtagcgttttttagttttttttagaggtttttttttgtttgttttttagttatatcgtttgagattgataacgttttatagtaagacggaaatttttttttatagtattattttgcgattttgtagttataaagttgagatttttgaacgtggtatttttttgtttttttattgttttacgtgtatttgtgttattttttttgttttatcgtaaatatatttttaaaatttttattttttttatttagaaatagaattataagcggatggttaaataatttaaataaatggtttatggggaaaagtgaattttatattgttttttaaatttttagtgttttttatggagataattattgtttttaatgttttgaatatttttttagagatattttatttttatataagtatatgtgtatttgtgttttttttttattttttttttataaatattagtagattgttttgtattttggttagtttatttaatatattttggagttaggtgcggtggtttatgtttgtaattttagtattttgggaggtcgaggtgggcggattatttgaggtcgggagttcgagattagtttgattaacgtggagaaatttcgtttttattaaaaatataaaattagttaggcgtggtggtatatgtttgtaattttagttattagggaggttgaggtaggagaatcgtttgaatttgggaggcggaggttgcggtgagtcgagatcgtgttattgtattttagtttgggtaatagaatatatagatttgtttgattttttttatgattgttatagttttattgaatgtatggattattagtgttttagttagtattttagtgatgggtatttagggattataaattttataagggtagaaataatattttatttattttttgtttttgatatggtttggatgtgtgtttttgtttaaattatacgttaaggtaattttttatgttagaggtggggtttggtggaggtgattggattatggggatggattttttatgaatgggttagtattatttttttggtgttgtttttgtgatagagtttttatgagatttggttgtttaaatgtgtgtggtatttttttatttttttggttaagtttttgttatgtaagatgtttgtttttgttttgttttttgttatgaataaaagttttttgaggtttttttagaagtagatgttattatgttttttgtatagtttgtggaattgtgagttaattaagttttttttttttatgaattatttagttttaggtatttttttgtaatagtgtgaggatgagttaatatagttttttatattgtaatttaaggtaatgttttgtataaagggatgaattagattgtttagtaattaaaatataaatataaattataagtatatttatttatgaattgggggatagtttttatttgattttgagttttgatatttgttgttttgttttgttaaaaatgtgttagtttttatttagttttttattagttatattattaattaatatgtataatatgtataatttgttaggttaggaggaaatttatggatataagaaatgttttttttttttaggaaatgataatttgttttgggagagaaggtaggtattttttggtaaaagtgatataataaaataattaaaaaaagatggattttttttttttttttgagatggagttacgttttgttatttaggttggagtgtagtggcgcgatttcggtttattgtaatattcgttttttaggtttaagcgatttttttgttttaggttttcgagtagttgggattataggtatttattattacgttcggttaatattttgtatttttagtagagacggggttttattgtgttagttaggatggtttcgattttttgattttgtgattcgtttgtttcggttttttaaagtgttgggattataaatatgagttattgtattaggcgaaaagatggattttttaaaaaaggtgttaggataattaggtttttatttgtaagaaagtaaagttagaagtttattttagattatgtatattagtataaaaatgttaaatggtttaaagataaaatgttaaaataagtttagaaaggtattaaaagaaaatatagaaaatatagtattagtaaaaatttttttatataagatgtaaaagttagaagttataaaggaaaaggttgataaattagaatagataaaaatgtaaaatttttgtataatataagatataaagaatgaatttaaagatatataatgaaggttaggaagatgaagatgttttggcgatgagtggtggttatatattagtattaatgtatttaatgttattgaattgtatatttaaaatgatgaaaatggtaatttttatgttatgtgtattttattatataaaaaaagatatgaaatgaatcggggaaaatatttgttatataattaagaatgaaggtttttaataaaatttgtaaaattatatatatttttaggaatgaattaataaataatttttatgaattagaaaaaagtgataatttaattaaaaaatgaataagggatataagtaatgtgttttatagaaaaaataaaaattgataatgaagttatgaaaaaatgtttagtttttttagtaattgtataaaataaattaaaataatgagatattatttttaagattagtaaatgttaaagaaaaataataattggtgagggtgtggggaagtgggtatttatatttatgtttggaaatataaattggtgtaattttatagggagagtaattttataatattttttaaagatttatatgtataattttatggtagagaaatttattttttttttaggatttttttttttttaaaaatagtgatgtggatgaaaaatatatgtttattattgtatagggtataatagttgaaaattggaaacgataatatttatattttttttagtaggggaatggttaaataaattttataagttatttggtagatattaggtatgagttaaaagttagggtttagttagagatggaaagtatattagtaatttgaaagggaaaatgtaatatgaagaattattaattagtaaaagaaggttaattgttaaaggtataagagtatttaagttgtttgtagttagtaggtttcggttggtgagtaggaagttgttcgttgggaggttgttaaagttttttgaaggtgagtattattggttttataagttgttggtagttatggcgttaagagtaggaagagaagtattagaattcggaagagaaatttagttttttgttaggttttgtatcgtttttttggcgttttttattgataaagttagtaaaattgtgtcgttagtaaaggagatttttttatgggatgtagtttggtgttattaaagagaatagagtggatttggagtttagatgtaatataatgattgatattggtatagtatatttattttgtttttgtaaataaaatggtatatgtgatgtttttttttgtttttttgtatataaaataatatttgtttttatttattatgtatttatgtttttattttgtatgttaggagttaagtattttgtatgtattaatttattttgtttttataataatttttatatgtaggaattattatagttattttatgaatgagtcgaggaaggtattgagacgttaagtaatttgtttaaggttacgtagttagtaagtggtagagtaagaattattatggttttataagtttaggaaaaagtttgaaagaattaaaatgttaatagcggggattttaaggaagtattgaagaggttatgggagaagtttttattttgttaaaaaattagttttttaaataaataaatatagtgaggtttttttagaagtagatgttattatgttttttgtatagtttgtggaattgtgagttagttaaattttttttttttataaattatttagttttaggtatttttttataatagtgttaggatgagttgatatagttttttatattgtaatttaaggtaatgttttgtataaagggatgagttagattgtttagtaattaaaacgtaaatataaattataagtatatttatttatgaattggggggttgttttgtgtgtatagataaggtatattttttaaaaaaattatttttttaagaagaaaataaattagttaataaacgataatttatagtgttaggaagtgagaaataagtgtgtgataaacggtggagaatgggagtatttttcgtagtgggcgggaggagacgaggagggcgttttttggggagtggtagtggttggagtaaaggtttggaggaggtaagttatgtgttttgagtttttggtttttgttttattttgtgtttgagttggtttgaaggttggttgtttagattgagttttttgtttgtttgtatttcgttaatagttttagaagaaggtgattggtggttgtttgaggaatattagtgggtaagagaattagtatttttggagtatttgttgtttgtgagattaagtattatgtatattgttttatttattttttatagtaattttattaagtagtttttttttacgtgaaaagatggaggttgggtggagtaaaaggaggtatttagagtttttagtaagtgagaggtagagttgggatttgaatttagatttgtttgatattgaagtttaggttggttttattttttcggattgttttttagggagtagaagatagatattttattttagttggttgtttttagaagtttgattttgttggtttaaaacgattttagttttttgtttagaggttgcgggttgcgggttaagatattagtagaaggagggtttagttagagaggttgatatgggtttttatttatcgttatttttttttttttttagg

SEQ ID NO: 290 - DNA, 5527 bp, Artificial Sequence
  chemically treated genomic DNA (Homo sapiens)
tttggaaggaaggagagatgacggtgagtagaagtttatgttagtttttttggttgggttttttttttattgatgttttgattcgtagttcgtagtttttgggtaaggaattaaagtcgttttgagttagtagggttagatttttagaagtagttagttaaggtaaaatatttgttttttattttttggaaagtagttcggagaggtggaattagtttagattttagtattaggtagatttggatttaaattttagttttgttttttatttgttgaggattttaaatatttttttttgttttatttagtttttatttttttacgtggaaaagaattgtttggtaaggttgttgtggggagtgaataaagtaatatatatagtgtttaattttatagatagtagatgttttagaaatgttaatttttttgtttattggtattttttaggtagttattagttatttttttttgaagttgttggcggggtataggtaggtaggaagtttagtttgaataattagtttttagattagtttagatataaggtgaaatagaaattaaaaatttagagtatatgatttattttttttaaatttttgttttaattattgttattttttagggaacgtttttttcgttttttttcgtttattgcggagagtgtttttattttttatcgtttattatatatttgttttttattttttggtattgtgagttgtcgtttattaattggtttattttttttttggaaaaataatttttttaaaaaatatattttatttatgtatataaagtagttttttaatttatgaatggatatgtttgtggtttgtatttgcgttttaattattaagtaatttggtttatttttttgtgtaaagtattgttttaggttatagtgtaggaaattgtattagtttattttagtattgttataaagaaatatttaagattggataatttataaagaaaagaggtttaattggtttatagttttataggttgtataggaagtatagtgatatttgtttttggggaagttttattgtatttatttatttgaaggattgattttttaataaagtgaaaattttttttatggtttttttaatgtttttttgaggttttcgttgttaatattttgatttttttagatttttttttaggtttataaagttatagtaatttttgttttgttatttattagttgcgtgattttgggtaagttatttaacgttttagtgtttttttcggtttatttataaagtagttataatgatttttgtatgtgaaggttattatgagaataaaatgagttaatatatgtaaaatatttagtttttggtatgtagagtaaagatataaatatataataagtagaaataaatattgttttatatatagagagataaagagagatattatatatattattttgtttataaaagtagggtaagtatattgtgttagtattaattattgtgttgtatttgagttttaagtttattttgttttttttggtgatattaagttatattttataaaaagattttttttgttagcggtataattttattggttttgttagtagagggcgttagagggacggtgtaaggtttagtagaggattggatttttttttcgggttttggtgtttttttttttgtttttaacgttatgattgttagtagtttgtagaattagtggtgtttatttttagggaattttggtagttttttagcgggtagttttttgtttattagtcggggtttgttgattgtagatagtttgagtgtttttgtatttttagtagttagtttttttttattagttaataattttttatattatatttttttttttaaattattggtgtgttttttatttttaattggattttaatttttagtttatgtttggtatttattagatggtttgtaaaatttatttaattatttttttattgaagggaatgtgagtattatcgtttttagtttttagttgttatattttgtgtagtagtgaatatgtgttttttatttatattattgtttttgaaggaaaaaaaattttggaagaggaataaatttttttgttatagggttgtgtatgtaagtttttggaaaatgttgtgagattgttttttttataaggttgtattaatttatatttttaaatataggtgtaagtgtttatttttttatatttttattaattattatttttttttaatatttattaattttaggggtaatgttttattgttttagtttgttttgtgtaattattaaggagattgaatatttttttataattttattgttaatttttattttttttgtgaaatatattgtttatattttttatttattttttagttggattgttatttttttttaatttatagaaattatttgttgatttatttttaaaagtgtgtatagttttatagattttattaagggtttttatttttagttatgtagtaaatatttttttcgatttattttatgtttttttttatgtgatgaaatatatataatataaaaattattatttttattattttaagtgtatagtttagtaatattaagtatattaatattgatgtgtaattattatttatcgttaaaatatttttatttttttaatttttattgtatgtttttaaatttattttttgtgttttatattatataaaagttttatatttttatttattttaatttattaatttttttttttatgatttttggtttttatattttgtgtagggaaatttttgttggtgttgtattttttatatttttttttaatatttttttagatttgttttaatattttatttttaagttatttgatatttttgtgttggtatgtatggtttgaggtgggtttttaattttatttttttgtaggtggggatttgattattttaatattttttttaaaaaatttattttttcgtttggtgtagtggtttatgtttgtaattttagtattttgggaggtcgaagtaggcggattataaggttaggagatcgagattattttggttaatatagtgaaatttcgtttttattaaaaatataaaatattagtcgggcgtggtggtgggtgtttgtagttttagttattcgggagtttgagataggagaatcgtttgaatttgggaggcggatgttgtagtgagtcgagatcgcgttattgtattttagtttgggtgatagagcgtgattttattttaaaaaagaaaaaaagatttatttttttttgattattttattatgttatttttgttaaaaagtatttgtttttttttttaaagtagattattattttttagaagggagggatattttttgtatttataagtttttttttgatttggtagattgtatatgttatatatgttggttggtgatatgattgataggaagttgaatgagaattagtatatttttaataaagtaaagtagtaggtattagaatttagaattaaataaaagttgttttttaatttatgaatggatatgtttgtggtttgtatttgtgttttaattattaagtaatttggtttatttttttgtgtaaagtattgttttaggttatagtgtaggaaattgtattagtttatttttatattgttataaagaaatatttaagattggataatttataaggaaaagaggtttaattggtttatagttttataggttgtataggaagtatagtggtatttgtttttggggaagttttagagagtttttatttatggtagaaggtaaagtaagggtaagtattttatatggtaggaatttgattaagagagtggggaggtgttatatatatttaaataattagattttatgagagttttattataagaatagtattaaagggatggtgttaatttatttatgaaggatttatttttatgatttaattatttttattaggttttatttttgatatgggggattattttgacgtgtgatttgggtagggatatatatttaaattatattagaaatagaggatgggtaagatattgtttttgtttttatgaagtttgtgatttttaaatgtttattattaaggtgttagttggagtattgatgatttatatatttaatggagttgtagtagttatgaaaaggattaagtagatttatatgttttgttgtttaggttggagtgtaatggtacgatttcggtttatcgtaattttcgttttttaggtttaagcgatttttttgttttagtttttttagtagttgagattataggtatgtgttattacgtttggttaattttgtatttttagtagagacggggtttttttacgttggttaggttggtttcgaattttcgattttaggtgattcgtttatttcggttttttaaagtgttgggattataggtatgagttatcgtatttggttttaagatatgttaaatgagttaattaaggtgtaaaatagtttgttagtgtttgtggggggaaaatgagggaaggatataaatatatatatgtttatataagaataaaatatttttgaaagaatatttaaaatattagaaataataattatttttataaaaggtattgaaagtttgggggatagtgtgaaatttatttttttttatggattatttgtttaaattgtttaattattcgtttgtagttttatttttaaataaagaaaatgggaattttagaagtatgtttacgatgaaataagaaagatgatataggtatacgtgaaatagtaagggaatagaagagtgttacgtttagaagttttaattttgtggttgtagaatcgtaaggtggtgttgtaaagggaggttttcgttttgttgtagggcgttgttaattttaggcgatgtggttggaaggtaggtagaaggaagtttttggaaagaattaggaaacgttgttttatttgcgtatggggggtcgaggtgtttgcgtagagatggtcgtgggtagggaggttgttgagatttgtttagtattttatattgttttttttttgtttttgatttttattgttttttttagaaattttagtattttattgagtataaagagaaataaaaggggaattttgattgagtggttttttatatataaggatttggagaggttggatttcggtatagtttttttatgggtagttgtatttttaatttttggtagaatgatttatattttttattagtaatggagtagtttatttttttatttgtttataatttttaagataaattaagtttattttttataggtttaaaattgttgataaagttggtttgtttttgatgttttaagatgataatttaagtggagaggttatggtttttatttttaagattatttagtttttttgggttttgattttttgatttgtaaaatgggaattaaaatatttttttattatttttagtaatatttttagtagtagtaggtggttaaatttaagggttggagttgttaatttggtagtagtaagaagtt

SEQ ID NO: 291 - DNA, 10696 bp, Artificial Sequence
  chemically treated genomic DNA (Homo sapiens)
ttaaaagggagttttagagtaaatataggttttggattttatcgttaataattatagaatatgaatattagtttttttgcgtaaaatattttagatagatatatatattgaatatagaaatagagataaataaaagttagttataatttagattttatttttgttaagattgtttagtttatgttaaatttttatttttttgttttatttattattttcgggcgagttttttataagtttttttaatattagtttgattggttgttcggttgatttttaggattttgtatgggttaaaatttaacgtagatagaatttgtaggattagaattagaattattaagaattgttaggaaatgtttaatttttttatttttatttttttttttttttagagttgaaatgattgaagaggtaatgagttttagtggtagaaatttggatagttttgttttttaggtaaaggtataagatatatagatgaaaaataaaattaataaaaggtattttgtaggaaaagtgttaagttgttgaattgtattttaaaataaaaatttcgttattgtttttgaatattataaatgagaattattatagatgaaaagatgagtaataagaatagtaattttttagaatattttgattagaaaagttttagaaatgaatgaaaatgaatgggatgtagaaataatatataaatgagagaaaatttaaataggataattaggacgattattttttaaatatatgattttatttattttgataagaataaataaaataaatggtttaagaatattttattgagtatatgttaaataaatttatgaaattgtaagatttattatgtataaaattataaaatgagatagttgtggtatttttgggtattaaataagtataaatatggacgtgaaatatttttaaaaaattgtgtagttaagacgtagtatgttttaattttatttttttttattatattatttaaataagaaaatgagaagttgttttttaattattagtaatatggtgtttttttgttttttttttttgagacggagttttattcgttgtttaggttggagtgtaatgatgggattttagtttattgtaattttttttttttaggtttaagtaagttttttgttttagtttttttagtagttgggattataggtatgcgttattttgtttagttaattttttgtatttttagtagagatagggttttattatgttggttaggttggttttgaatttttgattttaggtgatttattcgtttcggttttttaaagtgttgggattataggcgtgagttatcgcgtcggttaatatggttattattaatggaaattttagatgagaaaaagcggtaagaaaaaatttagttttatatgtgaagaagaattaacggtaaagattaaatagtaggcgtggtttttaaaagttttaagttttatttttggtgagtatagtgatttaatttattgtgaattttggaaataattttggttggttaatgaatagggtagtgttggaattgtagatatttatattttataattatgattgttgttatattttataatgtttttttttaaggaatatatttattttgattttttataagttaatatagttttaaggtttaagtgttttttgtgatattttattgaagaagggtaaagttataatagtggtggattttcgtaagtgtaagtttaatgtcgtttgggagtttttataaaattgattaatttgatgattaacgtttaaaattgtatacgtgttgaataaaattttaaaataaattagttttttttttgttaaggtaatttattatattttagaaaatacgtgaaggtaatgtagttattggttaagtatatgggttgaagattaggatttattttttattattttattatttgggtaaattatttaaatttattaagtattagcgtttttatttataaaatgggaatgaatattattattttgaaggattattatgtggggattaaatgtatgtaaagggtttattgagtttagagttaatagttaataaatggtcgttagtgttattatttttattatgtagtacgatcgttgttttatttaattatgttagttttttttagttagagggtcgaagtggcggtggtttgggaagttttttagttgatatgcgagatagacggcgtcgatttcggagtagtaaatatttgtttaataggtaggttgttagttttttgggtagtatatttaggattaggaagaagtttttagagataagttttaggtttaagtttcgtttcgcgtttttgtcggaggtcgtaattttgtaggagatagttttttttttcgtcgtttttcgagagtttagggttcggttttgttggttttcggtttttttcggggttagtagtgattggaaacgagaaggaattgaggggaaatttttgagtcggtttggtttcgtcgcgttcgcggtttcgcgcgttacgtcgggaaggagttatcgggaaagtatatcggtttaatcggttgtagtttcgtgttttagttagttcgtcgggtcgggagtttttcgtttatattagcgttcgtttgggtttggggaggggaaagaggaggggataagttcgaggggagttacgtgacgtttaaaggtttatcgtattgaaggcgaggatcgaataggtcgagggcgtttattgggcgaatttattttgatttttgttattcgtcgtttaggcgtggatttggggtggttgttatagaaacgaggcgcgttttttggttgtagttaaaaggttgatcgtgattaaagaggttaaaacgtgttttttagcgaggcgaagtcgttatgtatgatgggatattagaaggattttttcgatttaggaaggtgttttcgtttttatcgggagatggttttcgtttagtaatagttgttaggatggggacgtattttttggtttttattttttttaattttattcgtagaattttagagcgttagattggaagtgattttagggattttttaattttttaatttttgtaatattgatagggagatcgaggtttagagaggggtagagatttgtttaaggtttagaatttagtattttttttatttttgtttatttattttttttttttttgagagaatttaggatttttaatttcgtttatcgaaaatcgagttttatttaagaatgtattagtttgtgttttaagtacggggaaagggcggtgggggtggagagagggataaggtataggtaagtgaaggaaattttttttgagttaatgagatagattttttgcggatataaagagtttttatatttttttgttttgtttttatttttttttttttgtatttattattatttaatatagtatgttttatttattgatatagtttattatttgatttttttattggaatgtaaattttaaaagtagggtattttgttttgtttatttttatgtttttagtgtttgattataggtttaataaatattcgtagaagtgaacgaatggggttgaggttttggtgtttaagagattatattttaaggtggatttttaagagtgtggtttatagagttaggttcgggttttaattttgtttgtttcggttatttagtatttaagtgattttaaatattcgtttttttgaattttagggtttatatttgtaaaatcggcggggggtgggaatatttttttggtaggattgtagttaaggataagtgaaataagtatgaaaagtggttagtacgatgtttgggatttagtaaatgtttagtaaatagaaacgattatttttgaaatgtgaaaatgaatcgtttagaacgatgggagtttataggattagatttttgtcgtttttttttttttttgtgtgggaggtgttagggtgggagggagggaagagggaatggaagattgtgtaaggtgggtttggttggattagatattcgagtttggaatagttaattgcgatttgggtataagggcggtgaggggagtttatggttttatttggggtggaggagggggttaaggggaagttatgtttcggaggaggttgaatgggcgggatagattacggttttatttatggttttttttttgttggaagtgtgacgatttttttcggatttttgtaaaagcggggttatagtgaattttggcgaagggttcgcggtggattaggaattggtgttagaattgtaaaagggtatttgcgttcggagtggggaggtgatgcgggggcggggcggggttttgggggcggggcgagtcgcggaggtgtcgttttggggcggggcggtgatagaaggatggattttgggggtgaggattgattttgggggcggggcgagagtgcgaattggagtttgaggttgagcggtgacgtaaggacgattttgagggtggagcgaggggaggggattggtttttggaggcggggcggtggtacgaggttagtttttgggggcggggcggtggcgtaagattgattttgggggcggggtgggggcgtgggttgaattttgggggcggggcggtggcgcggaatggattttggggtcggcgcgaggcgttgaggtgcgttttgagggcggggcgatgacgtagagcgaattttgggggcggggcgagattttttagatgcgtttcggggagtgggcggtgacgcggtggtaggttttggggataggcggtgattttagaattgattttggggatagggcgaggcgcggaggcgttttgaaggcgaggcggtgacgtaagagcgtcgggttttggggattggggcgggcggtcgaggttcggaagcggattgaggcggtttggagttttagttggttattcgttatggacgaagcggatcggcggtttttgcggcggtgtcggttgcggttggtggaagagttgtaggtggattagttttgggacgttttgttgagtcgcgagttgtttaggttttatatgatcgaggatatttaggtgcgttttcggttttttgttttcgcgttgtacggtcgggtttttacgtttttcgaggaggcgttgtgcgggagtttagttttttttgtggttttaaattttttagcggagttaaagaattttaaatattttttagtcgggtgttcgttaaagcgattttatgttatatttagttagcgtatattgttagtgtttgtgttttttgtgtaaaggaaaaatgtgagatatattttgagaattttgaataagaaataatttatgaattggagaatattagattgaaagagttttagtgttgtaatgataaaacgttagaggtaagtatttattgggaaaatgtggaagtaaaataaagaaattatttgattggtttgtagttataaaattgttttttttttttaaggtttgttaattgattgtttttggttggttttaagttttatttttttttaatataagtatttattagatatgatttaagttaaattttgtttatgtttgtagtttaagtaagatttaggttatttaggatatttgattggttttgtttgtttaggaattttttatggttggtttttattttaatttacgttaatatttgcgaggaaggaggcgtgtgcgtttttatttttttagtatagaggtttcgggaatttattttggtattaggttgtttggtagcgtgtttttgggttagttatttattttttttgagttatagtttttgggttgtgaaatgggaataagaataatattgttataaggattaaatgaaataacggatgtgaaattgtagtgttaggtatagagcgggggattagcgtattttgttttttttggttagttttttttgtgtttagtttatgttttgttaagaggttttggaaatgaggggatttgatgtagaatggagaataatgaagttaaatatttgaggttttgtttaaaagtatttttttatttttgttttatttgatttttattataggtttgtgaggatgtaggagatattttttattatgaggtgtagtaggtgtgagtggttggttggatatttttggttagtgttttggtttagggaaagagtttttaaataattgagtattatatgagtaattatttattaataataaaataagttttgtgttttttgtgtggtttttattggggaatagtaatggtttgaggttatagtttttgtttttaggaatgtttacggggattataaatttaaatgtttatggaggattaatggatgggcgttatagtggatagtttttgtattgtttttcgtttttagttgagtatggttatattaataaatggtttagtattgttatattttatatttattttgaggtagggttttatttttgtttagtttggagtgtagggatgagattatggtttattgcgattttgattttttgggtttaagtggtttttttgttttagtttttagagtagttgggattttaggtatatgttattatgtttggttaattaaaaaaaattttttttttgtatagataggagttttgttatgttgtttagatgagttttaaatttttggttttaagtgatttttttgttttagtgttgggattataggtgtgagttattgtattcggtttagtttttatattttaaaaaagaagttgaaaattttgatttttttgttaaattttttggtttaaaatgttagtaataaatttagaaattttttaagaatttggtgggaattataggttgttatttgttatttagtatggttgaaaaataggtaggtttggaattagtggatttgggtttttattttggtttgttatatattagtaagtgtaaaaaattataattaatgagttaaataaatagaaaaattttatgatttagtttttttgaaattttttattttaaaaagtgggaagttttaatttaattttataaagttatgagggagaaaaagatgaaataatgtatttaatataggttgattttttggagtgtttagtaaatgtggagagaaatttaaatattattatttatttgtatgtagttaattgttttgttagtgagatttatttttttagggtattgtaggtttgtgttgtttttaatagtagttattagttatatgtcgttaaaggtaaattgaagtaattaaaattaaataaaattaaaaatggtagggttaagttttatagggtttgtgggttttttttttcgtgtgcggagatgagagatcgtagaaataaagatataggagaaagagatagaaaaaaagatagttgggttcgggggattattattatttagacgtggagatagggtagtggtttcgaatgtttggttgcgttgttattggatataaggtaaggggatagggtaaggagggtgaattttttaagtgatgataaggtgaagtaagttacgtgattataggataggggttttttttttttaggtagttgaagtagagagagaaggtagtatatgttagcgtttttttttatgtatttataagaaagattaaagattttaagatttttattattttttttatcgttatttatgaattttaaataggaattaggagtacgggaggaatatgaaagtgggtaaggagcgtgattatggaagtatagtattatagggaggggtttaggttttcggatgattgcgggtaggtatggataatatttagttttttataagaagttggtggagtagagtgttttttgacgtttttaaggaaaggagatttttttttttttttttttttttttgaggtggtgttttattttttcgtttaggttggagtgtaatggtacgattttagtttattgtaatttttatttttcgggtttaagttattttttttttttttttttttttttttgagacggagtttcgttttgtcgtttaggttggagtgtagtgtcgtaatttcggtttattgtaagtttcgtttttcgggtttatgttattttttttttttagtttttcgagtagttgggtttataggtattcgttattacgttcggttaattttttgtatttttagtagagatggggttttatcgtgttagttaggatggtttcgattttttgatttcgtgatttgtttattttggttttttaaagtgttgggattataggtttgagttatcgcgtttagttagggtttaagttgttttgttttagttttttgagtagttggaattataggtgcgtattattacgtttagttaatttttttgtatttttagtagagacgggttttatcgtgttggttaggttggttttgaatttttaattttgtgatttgtttgttttggttttttaaagtgttgggattataggcgtgagttatcgcgtttggtaggagattttttttcgcggtttgttaagtaatgggtgtttttttagatattggtattatcgtttgattaaggagtttttaagcggtttttatgcgggtttgatagagggtttattttttgttttttaggttattttttataatgtttttttagtatttgattttatattcgtcggttatttttaagttatattagtaatgtaataaagagtaatattaaaagttaatgattaataatgtttataataatgattgataattgtttatgattatttttatatttaatttgtattatgattatttttattttaattattttttttattatattgaaatagtttgtggttttagttttttgtttcggtatttgggtaatttttcgtttataaaaatttagttttttagttgtattatttaagtgtttaatggttatgtgatatatggttattaaataggataatatagattaagaatatttttattattacggaaggtttttatagatagtgttgttgtaggatagttgaggatacggtgttattttatttttgtggattttgagaatttgtttagtgttgggtatttgaggataggtggtagataattagattttttttttttagtgattgattttattattttgatattttttaatttttttttttgagatagggttttgttttgttatttaggttgaagtgtagtggtgttattatagtttattgtagttttattttttgggttcgagttatttttttgggagttttagttttttgagtagttgggattataggtgcgtgatattatatttggttttttttttgttattttttgtagagatagggttttattgtgttgtttaggttggtttcgaattgggtttaagttatttttttattttagttttttaaagtgttggaattgtaagtatgagttattgtgtttggtttgtttgttaattttgatttttgttttgtttttatagtttttttagttagtgtttatgttttatggattttttttttttgtatttttgttttgtttttttatttttttttattttagttgtattatttttgttgttttttgatttggttatggtttatttttttttattttttattttgatttttggatgattttttgaaaggttatatttgtttttgttattttatttttaaaattttttggtggtcgggtatggtagtttacgtttgtaattttagtattttgagaggttgaggttggtggatcgtttgaggttaggagttttgagattagtttggttaatatggtgaaattttgttttaattaaaaaatataaatattagttaggtatggtggtgggtgtttgtagttttagttatttgggaggttgatgtgggagaattatttgtatttaaaaggtggaggttgtagtgagttgagatggtgttattgtattttagtttgggtgatagagtaagattttttaaaaaataaataaaaaaataatcgatggttggttacggtggtttatgtttataattttagtattttgggaggttaaggttggaggattatttgaggttagtttaagattagtttgggtaatatggtgaaattttgtttttattaaaaataaaaaaaaaattagttaggtatggtggtgtgtgtttgtaattttaattatttcggaggttgaggtaggataatcgtttgaattttggagttggaggttgtagtgagttgagattgtattagtatattttagtttgggtgatagagtgagatttcgttttaagaaaaaaaaaaaaaaataaaaataaaattaaaaaattttttggtggtatttgataggttttaggatgaattttttggtttggttatataaaggttttgttttttgttattatttattttttattttataagattttgaattcgttatttattttatgatatttttagttttatgtgtttttttttgggtatttgttttttgttgtgttattgttgatttgtttgattgtattttttattagaaatttgttttttaaggattgagattgtttatggtagtatttttagtatttagtatagtgttgggtattttttgttttgtaaaataatgaatagattagtaaaggttggtaaatggtatatagtgtatttgtagttttattgttgtttacgtgtttgattgtttagatttatagtagttgggaaatggggagataaggtgagagttatataaaagtacgtggataattagtattttgtttttttttttaaatagt

SEQ ID NO: 292 - DNA, 10696 bp, Artificial Sequence
  chemically treated genomic DNA (Homo sapiens)
gttgtttggaaagaaaggtaggatattaattatttacgtatttttatatggtttttattttgtttttttattttttagttattgtaagtttaaataattaggtacgtgggtagtaatggagttgtaggtgtattgtgtgttatttattagtttttgttgatttgtttattattttgtagggtaaaagatgtttagtattatgttaagtgttgaaaatgttgttatggatagttttagtttttaaggagtaaatttttaatggggaatgtaattagataaattagtaatgatataataagagataagtgtttagagggaagtatatggggttgaggatattatgaagtgaatagcgaatttagagttttatgaggtgggaggtagatagtggtaagggataaggtttttgtgtggttaggttaagaaatttattttgagatttgttaggtgttattaaagagttttttggttttgtttttgttttttttttttttttttgagacggagttttattttgttatttaggttagagtgtattggtgtaattttagtttattgtaatttttaattttaaggtttaagcgattattttgttttagttttcggagtagttggggttataggtatatattattatatttgattaattttttttttatttttagtagaaatagggttttattatgttgtttaggttggttttgaattgattttaagtgattttttagttttggttttttaaagtgttgggattataggtatgagttatcgtggttagttatcggttgtttttttgtttgttttttgaggagttttgttttgttatttaggttggaatgtagtggtattattttagtttattgtaatttttattttttgggtataaatgatttttttatattagttttttaggtagttgggattataggtatttattattatgtttggttaatgtttgtattttttggttaagatagggttttattatgttggttaggttggttttaaaatttttgattttaagcgatttattaattttagttttttaaagtgttaggattataggcgtgagttattatgttcggttattaaagagttttaagaatggagtgatagagatagatatggttttttaaaaagttatttaggggttagggtgaaaaatggaaaggagtgagttatagttagattaggaggtagtaaagatggtgtagttagaatagagagaagtgaaaggataaagtagagatataaagagagagggtttataggatatgggtattgattggggggattgtgaagatagagtaagggttaaggttgataggtaggttaggtatagtggtttatgtttgtaattttagtattttgggaggttgaagtgggaggatagtttgagtttagttcgagattagtttggataatatagtgagattttgtttttataaaaaataataaaaaaaaagttaggtatggtgttacgtatttgtagttttagttatttaggaggttgaggtttttaagaggatggttcgagtttaggagataaggttgtagtgagttgtgatagtattattgtattttagtttgggtgatagagtaagattttgttttaaaaaaaaaaattgagaggtgttaggatggtggggttagttattaagaaggaagagtttggttatttgttatttgtttttagatatttagtattggataggtttttaggatttatagggataagatggtatcgtgtttttaattattttatagtagtattgtttatgagaatttttcgtgatgatggaaatatttttggtttgtattgttttatttagtaattatatattatatgattattaagtatttgggtagtataattgaggaattgaatttttgtgggcgaaagattatttaggtgtcgaggtaagagattgaagttataaattgttttagtataataaagaaaatagttagaataagaatagttataatataaattaggtatagagatgattatggataattattaattattattataaatattattaattattagtttttaatattattttttgttgtattgttaatataatttaggaataatcggcgggtatagggttaggtgttgaagggatattgtgagaagtgatttagaaggtaagaggtgagttttttgttaggttcgtataagggtcgtttgagggttttttggttaagcggtaatgttagtgtttggggagatatttattatttagtagatcgcgaaggggagttttttgttaggcgcggtggtttacgtttgtaattttagtattttgggaggttaaggtaggtagattataaggttaggagtttaagattagtttgattaatacggtgaaattcgtttttattaaaaatataaaaaaattagttgggcgtggtagtgcgtatttgtaattttagttatttaggaggttgaggtagaatagtttgaattttggttgggcgcggtggtttaagtttgtaattttagtattttgggaggttaaggtgggtagattacgaggttaggagatcgagattattttggttaatacggtgaaattttatttttattaaaaatataaaaaattagtcgggcgtggtggcgggtgtttgtagatttagttattcgggaggttgagggaggagaatggtatgaattcgggaggcggagtttgtagtgagtcgagattgcggtattgtattttagtttgggcgatagagcgagatttcgttttaaaaaaaaaaaaaaaaaaaaggaaaatagtttgaattcggaaggtggaggttgtagtgagttgagatcgtattattgtattttagtttgggcgaaaaagtgggatattattttaaaaaaaaaaaaaaaagaaagggagttttttttttttggaggcgttagggagtattttgttttattagttttttgtgggaggttggatattatttatgtttgttcgtagttattcggagatttaaatttttttttgtggtgttgtgtttttatggttacgttttttgtttatttttatgtttttttcgtatttttggtttttgtttgaagtttatagatagcggtagaagaaatagtgaaagttttaaagtttttgattttttttataagtgtatagaagaaaacgttgatatatgttgttttttttttttgttttagttatttaaaagggaagggtttttgttttatgattacgtgatttgttttattttattattatttagaagatttattttttttattttgtttttttgttttatatttaataatagcgtagttaggtattcggggttattattttgtttttacgtttaggtggtagtggtttttcgggtttagttgtttttttttttattttttttttttgtgtttttatttttacgattttttattttcgtatacgaggagaaaaatttataggttttgtaaggtttgattttattatttttagttttatttaattttaattattttaatttatttttaacgatatgtggttaatggttattgttgggaatagtatagatttatagtgttttgagaaggtaagttttattagtagaatagttggttatatgtaaatagatggtggtgtttaggtttttttttatatttgttgaatattttaggaggttaatttgtgttaaatgtattgttttattttttttttttttataattttatagagttaaattagaattttttattttttagggtaaaaaattttagggaaattgagttatagggtttttttgtttgtttggtttattggttgtggttttttatatttgttaatatgtaataggttaggatgagagtttagatttattggttttaaatttgtttgttttttagttatattgaatggtaaatggtaatttgtggtttttattaggtttttaaaaaatttttgaatttgttgttaatattttaagttagggaatttgatagaggaattaagatttttagttttttttttaagatgtgaaagttgggtcgggtatagtggtttatatttgtaattttaatattgaggtaggagaattatttgaggttaagagtttgagatttatttaggtaatatagtaagatttttatttgtataaaaaaaaaattttttttaattagttaggtatggtggtatgtgtttaaagttttagttgttttaaaggttgaggtaggaagattatttaagtttaggaggttaaggtcgtagtgagttatgattttatttttgtattttaggttgggtaagagtgagattttgttttaaaataagtgtaagatgtggtaatattgggttatttgttgatatggttatatttagttggagacggagggtagtgtaaaggttatttattatgacgtttatttattggttttttatgggtatttgagtttgtgattttcgtgaatatttttgaaggtaaggattgtggttttaaattattattgttttttagtaggggttatatagaaggtataaaatttattttattattaatgaataattatttatatgatatttaattatttaaagattttttttttgggttagggtattggttagggatatttagttagttatttatatttattgtattttatggtaggaaatattttttgtatttttataggtttgtgatgagggttaaatgagataaagatgggaaagtgtttttaaataaaattttaaatgtttgattttattattttttattttgtattaggtttttttatttttaaaattttttaataaaatataaattgaatatagaaggggttggttaaagagggtagggtacgttgatttttcgttttgtgtttagtattatagttttatattcgttattttatttagtttttatgatagtattatttttatttttattttatagtttagaaattgtggtttaaagagggtaagtgattggtttaagaatacgttgttaggtagtttgatgttaaagtgggttttcgaaatttttatgttagaaaagtaaaaacgtatacgttttttttttcgtaagtattaacgtaaattaaaatggagattaattatgaagaatttttgagtagataaaattaattaggtattttaagtgatttaaattttgtttaaattgtaaatataagtaaaatttaatttgggttatatttgataaatgtttatgttagagagaaataaaatttaagattagttaaaagtagttaattaatagattttaaaaaaaaaaggtaattttgtaattgtaaattaattaaataatttttttattttgtttttatatttttttaataaatatttgtttttgacgttttgttattgtaatattaaagtttttttagtttgatgttttttaatttatgaattgttttttatttaaagtttttaagatgtgttttatattttttttttatataagaaatataagtattaatagtgtacgttgattgagtatggtatggaatcgttttagcgaatattcgattaagaggtgtttgggattttttggtttcgttgaggggtttgaagttatagggaaggttaggttttcgtataacgttttttcgaggggcgtggggattcggtcgtgtagcgcggggatagggggtcgggggcgtatttggatgttttcgattatatggggtttgaatagttcgcggtttagtagggcgttttagagttggtttatttgtagtttttttattagtcgtagtcggtatcgtcgtaggagtcgtcgattcgtttcgtttatggcgagtagttaattaagattttaggtcgttttagttcgttttcgggtttcggtcgttcgttttagtttttaggattcggcgtttttgcgttatcgtttcgtttttaggacgttttcgcgtttcgttttgtttttagggttaattttggggttatcgtttgtttttagaatttgttatcgcgttatcgtttatttttcgggacgtatttagaaggtttcgtttcgtttttaggattcgttttgcgttatcgtttcgtttttaggacgtattttagcgtttcgcgtcgattttagaatttatttcgcgttatcgtttcgtttttaggatttaatttacgtttttatttcgtttttaaggttaattttgcgttatcgtttcgtttttaagggttagtttcgtgttatcgtttcgtttttaagagttaatttttttttttcgttttatttttagaatcgtttttgcgttatcgtttagttttagattttagttcgtattttcgtttcgtttttaaagttaatttttatttttaggatttatttttttgttatcgtttcgttttaaggcggtattttcgcgattcgtttcgtttttagggtttcgtttcgttttcgtattatttttttatttcgggcgtaggtgtttttttgtaattttggtattagtttttggtttatcgcgggtttttcgttagaatttattatagtttcgtttttatagagattcggagggagtcgttatatttttagtaagagggaaattatgagtggagtcgtgatttgtttcgtttatttaatttttttcggggtatggtttttttttagtttttttttttattttaagtaaaattataagttttttttatcgtttttgtgtttagatcgtagttgattgttttaaattcgagtgtttgatttaattaagtttattttatatagttttttattttttttttttttttttttattttaatattttttatatagaaaaaaaaaaaaacggtagaaatttagttttgtaaatttttatcgttttgaacggtttatttttatattttaaaaataatcgtttttgtttattgagtatttgttaagttttaggtatcgtgttagttattttttatgtttattttatttatttttaattataattttgttaggaaagtatttttatttttcgtcggttttatagatgtagattttagggtttagggaaacgaatgtttaaggttatttgggtattaagtggtcgaggtaggtaggattgaaattcgaatttgattttgtaagttatatttttaagaatttattttagaatataattttttgagtattaaaattttagttttattcgtttatttttacgaatatttattgagtttgtagttaaatattaagaatatgaaggtgaataaaataaaatgttttgtttttagagtttatattttagtggaaggattaggtgataaattatattaataaataagatatattatgttagatagtgataaatgtaaagagaaaaaaataaaaataagatagggagatatgaaagttttttatattcgtaagggatttattttattggtttaaagaaagttttttttatttatttgtgttttatttttttttttatttttatcgtttttttttcgtgtttaaggtatagattggtatatttttgggtggagttcggttttcggtaaacgggattaaaagttttggatttttttaaaaaaaaaaaagataagtaaataaaaataaaaggaatgttggattttaggttttgggtaaatttttgtttttttttggatttcggtttttttattaatattgtaggagttggagagttaaagaatttttaaggttatttttaatttgacgttttaaggttttacgaatagggttaaagagaatagggattagagagtgcgtttttattttagtaattgttgttagacgagggttatttttcggtaggagcggaaatatttttttggatcgaggaggtttttttggtattttattatgtatagcgatttcgtttcgttaggaggtacgttttggtttttttggttacgattagttttttggttgtaattaaagagcgcgtttcgtttttatagtaattattttaggtttacgtttagacggcgagtggtaagggttaaaatagattcgtttagtagacgttttcgatttgttcggttttcgtttttagtgcgatagatttttaagcgttacgtgatttttttcgggtttgttttttttttttttttttttttaggtttaggcgagcgttggtgtggacgggaagttttcggttcggcgaattaattggagtacggagttgtagtcggttgggtcggtgtattttttcggtaattttttttcggcgtgacgcgcggaatcgcggacgcggcggggttaggtcgatttagggatttttttttagttttttttcgtttttagttattgttggtttcggggggagtcgggagttaatagggtcgggttttgggttttcggagggcggcgggggagggggttgttttttgtagggttgcgattttcggtaggagcgcgaggcggggtttagatttggagtttgtttttgggagtttttttttggttttggatatgttgtttagagagttggtagtttatttgttgggtaggtgtttgttgtttcgaggtcggcgtcgtttatttcgtatgttagttaaagaattttttagattatcgttatttcggttttttagttggaaggaattgatatggttaaataaggtagcgatcgtattgtatggtagaaataatagtattaacgattatttgttgattgttgattttgggtttagtaaattttttatatgtatttagtttttatatgatgattttttaaggtggtagtatttatttttattttatgaataaggacgttgatgtttagtaagtttaaataatttgtttaggtaataaagtagtggagaatagattttagtttttaatttatatgtttaattagtagttatattgtttttacgtgttttttaggatataataggttgttttaataaagaagaaattggtttgttttaggattttatttagtacgtatgtaattttaaacgttggttattagattagttaattttgtgaggatttttaggcggtattaaatttgtatttacggaaatttattattgttatagttttgtttttttttagtaaggtgttatagaagatatttgaattttaaaattgtattaatttgtgagaaattaagataaatgtgttttttgaaaaaaaatattgtagggtataatagtaattataattgtggagtataaatatttgtagttttagtattattttgtttattaattagttaggattatttttaaaatttataatgaattaagttattgtatttattagagatggagtttgaaatttttaaagattacgtttgttatttggtttttgtcgttaatttttttttatatgtaaaattaaatttttttttgtcgtttttttttatttgaggtttttattaataatgattatattggtcggcgcgatggtttacgtttgtaattttaatattttgggaggtcgaggcgggtggattatttgaggttaggagtttaaaattagtttggttaatatggtgaaattttgtttttattaaaaatataaaaaattagttaggtagggtggcgtatgtttgtaattttagttattggggaggttgagataggagatttgtttgaatttgggagggggaggttgtagtgagttgagattttattattgtattttagtttgggtaacgagtgaaatttcgttttaaaaaaaaaaaataaaaaaatattatattattaatgattaaagagtagttttttatttttttgtttgaatggtgtggtgagaaagaatagaattgaggtatattgcgttttaattatatagttttttgagagtgttttacgtttatgtttgtatttatttaatgtttaagaatgttataattattttattttgtagttttgtatatggtaaattttatagttttatgagtttgtttaatatgtatttaatgaagtatttttaaattatttattttatttatttttattagaataaatgaaattatgtatttgagaggtagtcgttttgattattttatttaggtttttttttatttatgtattatttttgtattttatttatttttatttatttttaaagtttttttagttaaagtgttttggagagttgttatttttattatttatttttttatttgtaatagtttttatttgtgatatttaaaagtagtagcgagatttttattttaagatatagtttaatagtttgatattttttttgtaaaatattttttgttggttttgttttttatttatatattttatatttttatttaaaaagtaagattgtttaggtttttgttattgaaatttattgtttttttaattattttagttttggaaaggaagagaaatggaagtgagaaagttgagtattttttggtagtttttgatagttttggttttgattttgtaaattttgtttgcgttggattttgatttatatagagttttaggggttagtcgaatagttagttaggttgatattaaaaaggtttataagaagttcgttcgggaatggtaggtgaaataaagaaatagaggtttaatataagttaaatagttttagtagggatgaagtttaaattatgattagtttttatttgtttttgtttttatgtttaatatatatatttgtttaaaatattttacgtaggagagttaatgtttatgttttataattgttagcgataagatttaaagtttatgtttattttgaaatttttttttag

SEQ ID NO: 293 - DNA, 16688 bp, Artificial Sequence
  chemically treated genomic DNA (Homo sapiens)
tgagttaaaatcgtgtttttataatttggttgttatttatttttgtaaataaagttttattgagatataattatagtttttttatttacgtattttttatagtagtttttgagttataagggtagaggtgagtagtcgcgatagagattatatggtttacgaaatttgaaattagggtagtgtaatttatagggttttatgtttgggagatgttatagtttgattttattatgtttaaatttttaattatttttaaataagagttgaatttttgtttttttttggattttttaatttatatagttagttttgtttgaaagatttattatatggttttatagtttgttttgtttttttttttttttagtttttggtttttttttatttttttattttaatgtttttggatttaggaagttagtttttttcggaagtagtttattatatttttgggaaattttgaggtagttttttttggtatttttatcgagaattatattagttattattattagtggggttaacgatgatttaggttttgggttgagttaagcgaaagtttgttatttatttattagtttttgggattttttagaataaattttattttttatgtttttagagatttgaggaaagttttttcgtttttttttttgagttttttttttagaatttaaaattgtttgttttttataagatatgttttaagtttttttttaaaggagttttttttttttatagagatgatttagttttttaatatttttttttaagtatggagttttattagatttttaagcgtagtttgattagtgtatagttgagtaggatagttatttttattattttagagtgtttatttttattgatgtattttaagattattttgtttattttggaatttattttaaaaattttttagattttttatggtaggaaaagatggttcgttatgtttattatataggtgagtaaattaaagtttgggagggagtggtttgtttatggatatatagtagttttgtttttaaattttaagttttttagtttattaattgagatttttgggttttcggtttttatatttgtaaaatggaaaagttgggttttttcgagttcgagtatattgtgatttgttttttaaatgtagattttaaaagttaagttatgaagaaaatagaagtttttaatttagatttaaaatttgtaggaaaaataaaaaaaagtttttttttttgttgattattttagagttattagttttggaaatatttgtatgagtgattaattttgtttgttaatagtagttttagatttgttagtttattgagtttttagtttatggtattattatttttttagtgatttagtttatgtaaattttttttttttttattattttttttttggattttttataaatgtgtttttttgtatattttatttttaaaattttttttttttttttttttttggtaagttaaataataataataacgataaaaattttttgaaataagaacgttgtgttttttataaaattttagatataaaatgggtttcggaaagttattttttttttttaattgtttttttttgttagttgtattattttagggttgatttgaaagttttatttgttagtacgtttttttcgtaatattttttttgtgagtatatagtttttttggtgttttattaggtttttttattgagtgcgggggtatagatttatgcgtggggaatataggtaggttttattatttaaatttgataaggattttaggttttagagagggggtttagagttgttttacgatagggttaagaaataattaatggttttcggttttagtgttttttttattagtgaggtttttagaaatataattgttataagaaagtgagagatgattttttttttgtttttggtatttggtttttttttttttgtttttttgagtttatttatttttttggtttagttgaagtatattttttttttgtgaaatttataatgtgtgttagttgttttatttttttggtttttagtatcgattattagttaggggtattgatttttttagataataaatgagtttttttatatatattaaggatgtttaggaaggaagttaagtatataatgatttttaataaatagtagttgttattgttattagcgtttattgatttagtgattatggttgtgaaataagtttttttaaattttagtgatataaaaaaatgattatgattatgaattgtgtggtttagatatttaaataggatatagagaagatagtttttttgttttatggtgtttgaggttttagttggaagataggaaggttggggatgatttgaagattggcgattgggaatatttaaaattttgtttatttttatgtttgatgttgatgttggttgatagttggagttttagtttttttttatgtggtttttttatataggttggtgtggatttttttttagcgtggtgattgaggtttaagagtaagaattttgagaggagagagttaggaagttagttagggagggaatatagatttttttttttggtggaaggagtgttaattttattatttttggaaaagatggttttttataattattattattatgtcgttattattattttttttttaggatgatgagtttttttaggtggtttttttatttttggcgataagattgttattagttggtttattttttattagatatatttggttttacggtgtataaagtttaagtttaggtttagatttttgttacgttttttgtgaatataagtagtaatgttttttttttttgttataatttttttgtagaatatttatgtatttgggattagggggatttggggatttaggtaagggaatggaaaagtaataaaaaaagttattttttaattttaagcgatttagggatagttttttggttgtttattatttatttttagtaatattgtgggggtgtcgaaaatgtgtttaagttaaaaaatttatagttttattatcgtttgttaagataggagtgattaatgagatataaatagaagtagttgggttggatttttaataaagttttataatagagtcgatttagttcgtagatgtcgttttttgtttttgtttttttttttttttttttatttagatttagagatgatgattggaggagtagtagatattttgtgtttatgaggtggttttcgggttagtagaatagaaggatgggagtttagatgtttgaagatattatggagttattataatatttttgaattatttgtgttaagtgagaaaaaaagtttttattttatttaagttattattatttttgtattttttgtgttattagttaggtgtaattattgataaagtttaaattatttttggtttttttttttttattttaaattttatttagttttaatttattttttatttggttattagggagtttttttatatataaatttgatatcgattttgttttgttttgaagtttttaatggttttttagtatttttagataaaatttatattttttagtatgatatttgggatgttgtatatttaggtttgagttgagttgtattttttgttttaattttagatattttgtgttttagttattttatattttttaatatttttgtttatattattttttaatatttataattttgtaatttgaagtgttttaggtgttgagtttttgtttgttattcgatatttatttgtaaagttattttttataggaagtttttttcggtgtttttagagtaagttattgatttttatggatttttaagattagttttttgtaaaatatttttgatttgtggtatttatcgtatagtattataattatttattgttttaattagtttttttattttgattgggagtattttaaggcggatagagttttgttggtttgtttatttttagttattagtaaattttgaatgaaggagtgaatagataggtaaatggaagtatagattttgatttttgaggatttagagttgttattttttatgttgttggagtttaggggaaggttgagttagaagagggtatagaaaaatcgagtaggtatttaagagaggtgtattttattgatgtatgtggagtgtttgggatttaagaaaattttggaagttgttattagggtagggtgaagggtagtacgaatatggattttatgttttttttatcgggtatattttagtgtaggttttagacggtagacgaggggtagttttatagtagttttttttttttgttttatttttagtttggttttatattatagtttattaatttttgttttaggtggaaattttagaaatttataaagttcggatttgttttaggttattaagtagtagggttaggtattggtaatttaacgagaagttttattatatcgtattttagtttttgaagttattttttgggtaggagagttttgattgttattattatttttttattttatagatggggatagagtggtttagagaggtgaagtgtgttaaaggttatatagttagttagaggtagaggagggattaattttatttttttttacgggtagtgtattttaaaggagttaaaatgttgatagtagtggggtaaattttaggggtttcggagcgatcgtcgagttggttatagttatacgatgtataggaaacgttaggttttttgtatttttttttgaggtttagtgttttgaggtagttttttttaaggagcgatcggttttttagaagagttttagttttaattttagtttggaggtttgttataggaggttttagagagaggtaggttgaagttatgtgggatagttgttagtcggtatgttgggtggggtttatttagttggtagggatataagtttggggatattgaattggtttttttgttttaagtatttttagttttagtcggttatatagttcggatttttttttgtggatttttttagttttgcgatgatggtagaagagtatatagatttcgaggtttagatcgttaaggatatttattgtaaggagattgatttggtgaatcgagattttaagaatattaacgaggatatagttaaggtaggttttgtaggtttgtttcggcgggcggagagtgttaggtttgcgagacgtgggcgtttggtaggggagggtatttgttgtagatatagtttttttgaaaagagatttgttgttttgttgtttttgtattatttttttaattttattttatttttaaaaaaaggtttttaaattatcgaaggatttttagtaaaattaagagtaaaaaattagttttatttttatgatttaagtgttaattagggtaggaggagcgagttataaagaaaatttttttttattattgtgacgtttttgttatttatttttggtttttattttgggaggaataggaacgggcggttaagttgggtttttttttgtgttaaggggtatttttgcggtttttttagtgggtgtagggttaatttttagagggtagtttttagtagggtcggtagtttttcgaggtatatttatttttttagagtattgtttaatatttgtttttaaggtcgagggttatgtttagtttttttttagttatttttttattttaggtttagtggttaggatagggtagacggtattcgggattttcgaagagaaagttcggggttgtttagtttttagggagttttttagcgtttgaagttgggttttttttttcgttttttggtgatattagcggttttgttgtttttaggtttatatttttaatttaatttttagttagtatttagagggattttttttttttttttttgagatagtttttttttgtttttaaggttggagtgtagtcgtatatttacgttttattgtagttttaattttttaggtttaagtgatttttttttttttattttttgattagttgggattataggcgagtgttattatgtttagttaatttttgtatttttagtagagattgggttttattatgttgattaagttggtattaaatttttgggtttaagtgatttttttgttttttaaagtgttgggattataggtgtaagattttataattggtttagaggtatttttttaaagtagaatttttttaagaagggtttttagttattagtatttgagttattggaggggttgttaagaggttagtgtttgaggttttttagattttattgaaagtattggaattttaggttagtgttgtttaatagggatattgttattataaggaatttaaaattttttagtagttatattttaaaatgcgaaagtaaataggtgaaattaatgtttttgatattttttatttaattttatatatttaaaatagtattattttaatatgtaagtaatataaaataattattaatgagttattgtatagtttttaagtttgaaatttagtgtgttttttatatttatagtatattttagtttagattttatatttttattcgaaatgtttgttttgtatttagattttataaaatgtatatgtgaaaatcgattcgtatgtttgtattgttttaaatattttgtaaaaattttttaataatgaaatcggggtttatattttaattaaagttaaataaaatttagaattttttagttttattagttatattttaagcgtttaaagtttttggttattggattagataggtttgtattgcggttttttagtggggtattttttatgttggagaagtttagtttttttacgtggttgtttaaatttaatataatttggttttaatttgttttttttgtttggttggtttttatttgttagtttatttattagagtatatttttgtgttattgttagaagtgtttgtttttttttttttaggtggtgaatgttttatttagtttttaaggtttaatttaaatgtaattttttttagaaagttttttttgatttttttaggtaattagttgtttttatttttgtttttttgttttatttagggtatttttttattatagttttttttatattggatattatatttttatatatcgttagtgatggagatagagtatatagtatagtatagtgtgaaagttgaaatgaggaaaattaggaaataaattttataaattgtaaagtattatatatatgtaaataaaattgtatttgtaaaatattattagttatggtttttattagtgttatttagtaggaatagttttggatttgattttaatagatttgattttaaatttagtttattttatttaaaaatgataatattggataaattaattaggttttttgagatttagttttttttgtaaagtgggaataatattattttttaatttatttttattaggtaaacgaattttaaagtagtattgtgcgttagaaatatagtatgaggattgaatgagatgaagggtttgaaagtgtttattatagtttttggtatttagtaaggatgagatagtgtgagttaaagaagggttttaaagagtttgtagtttagagggtaagagagttaagttaggagtttgcgttatgtttaggtagttatttggtatatttaggtgggttgtagggagatgggaaagaggattttacgggagaatatggtttttaaagggtatttataatggttggtaagtatagagggagtttttggatttttttgagttaggagggagttagttttaagtcgtaggtttggattatgacgtagagggagcggcgggggcggcggtataggtgtagcggttttacgtagtttttttggggttgagagttgtttttttttggaggttttgagttttagtaaaaatagtaaaggttaagaaaggatgtcgtaaataattttgtttagaggaggtggttatttggtatgttttggatattttttgttttagggatttgtttgatttttttttttttttatttttagtgagtgagaaatgaaaaaagttaatgtagaataaggattataaagtagatttagatatagattataaataggtttaggtagattttaggtttttgttatagtttgttaaagaataaagaaaagaaagaaggagagaggggattgtggttaggagggatgaagttagattgtttagttttttaattgttcgggttttgttatcgatggaggaaaagagagatgggaaggaaaagggaatgagggagatagagagagatggagaaattggatagagattgagaggaaggtgtaggaggttttggtagtgttttaggtggtaggtggtagggtggttttataggtggtagtaggttttttatgggttaggatgagtgatacggaaagaatgttggaataggatttggttatagatttaagttttggtttaagatttgatagtaatttgttgtgtgattttgaggaaattttttgttttttttggttttaagtttttggtgttattagttacggtcgttttatatttaaaaaagttaaggatgaagagtaggagataggtatattatatttatggatttgatttttagtagaggggaggtatttttttttggttttgtttttaaatttaggtagttaagaatagaggaagagttttgtatattttaatagattttagttgtggtttttaaggttcgggattgggtttagggtagtgtagaaggttatggagattgtagttgaggaattggggggagtatatttttatttttgttgttatttgttttttttattaatattgattttataaatcgtaattgaatgtttgtttagtataggtaatgtgttgttttagaggacgtagtgatgagtaggatagttttattgtatgtaaattttttaggttgtaggggtgggaatgtttgttaaaggtttttagggtttttagtttattagtaggtatatttaaggttgttttaatttttagatttaggttggaaaggttttagttttattataggtatattttagtattttagagttattttatagtgtttttaagttatttttaagagggtttagggttattttattgatagtatgttttttttttttgttttttttttttttttttttttttttttttttttttttttttttttttgttttttttttttttttttttttttttttttttttttttttttattttttttttttgatttatatataggtttttagggttttaaagtagtgatgtttgaatttgagagttatgtaggtattttagtttttgtagttaattttttttttttgagttttttttaagttgttttttaagtaggggaaggagatagataggattttagtttttttataattatattttttaattttttttatttatatttgttatagaacgtttgttttttttagaaaaataaatatttatttgtttttcggtttaggttatataatatttagaggaattagatgtttattagttttataaatatttgttttaggtttgtgtttattagggatattttgttgtataaagaagaaattgatttggtattttttttggcggggaatttatttttggggagaagatgagaggagaataatgagaatatataggagaaggagttgaatatcgtaaatgagtgttaggttaggtgttatgggaggttaggagaggaagaattatttttatttggaaaaattagaagttagttatatggataggtggtatttatggtgtattataaaaatgagaaaaattaaaaatgtgaaatggaggaataaagttttttaagaagaaatggaataagtaaaggtttttttaatattgggaagaatgttgggtagagttggtaaacgtaagaggttgttattattattgttttttttagtgtttatggtagatatgataatggattatagtattgttttatgattaatggattatagtattgttttatggaagttatgtattattagttagttatagtgggtataatagataatatttcgttgttttgtttgtagaagaataatgaattatcgaagaggattaggatagaggatttgaaagggaatttgtgggagagaaggtaggaagggtaggttgaaattaaataatagagggttatttaatttatttgttattttatattggtaattttttttttttggaaatgttttgttttttgttaatgatttttaagaagagttgtattagattaatttatattgaggtattataatttagtgttatgaggatttttgggtattaattgatttagagttttttaaaatgtagtttatttttttagggtttagtggtgggggtatttattaaattgtagattttttggttttgtttttagaagtttttatttagttgagttggtgaatgtttatattttaatgtttgagtataaaagttttatgtttaggttaggtacggtggtttatatttgtaattttagtattttaggaggttaaggtaggtggattatttgaggttaggagtttaaaatttgattaggttaatatgatgaaaatttgtttttattaaaaatataaaaaaaaaaaagagttaggtgtagtggtgggtgtttgtaattttagttatttaggaggttgaggtaggagaattgtttgaatttaggaggtagaggttgttatgagtcgagatcgtattattgtattttagtttggataataagagtaaaattttttttttaaaaaaaaaaaaaaagagttttacgtttaaatttgttagtttgttagtaattaagttttatttattttatagaagatatttggagtttagagttattttttgttttttttaaagatagattgtattagttattaattgtgagtaataaattattttaaaatttaatggtttaaggaaataattatttttttattttttatagttttgtgggtgggtagggtttagtttggtagttttgttggttttattgggggttttttatgtagttatagttagatggtggttgaggttgtaattatttgggggttttatcgagttagaatatttaagatggtttatttatagttttggaggattggtagagatggttgggaggtatagttgagttgtggtgttggggtggttggttttttatttttatgtagttttaggtttttttatttatatggtttttttattagtttttcgagtagtatttagtagtgtatttttaattttgttagtttttagagtagagtataaaagtggatttttaatatgggggtttagtgtttttaaaagtagaaggtgttaggttttttgaaggtttagttttagaattggtataatattttttttgttatatttttgtggttaaagtgagttatagggtaagtttagatttaagatgggatgagattatttgaggataaatatcgagaagtatgattaatggagggttatttttggagattagtaaattatttattgaaagttcgtgtatagttaagtttagagttttatttagggtatttttatttttttttattttaatatgtattaaattttttgaaggtagagattgagagagtagaagagcggatgggaagggataggtagtgaggtaaagattagggtttagtggattgttgaggagttttttttggtaggtttttttttttttgtttttttttttgtagttttttgttattttagtttttttttagtttttttatataaaattaagttttgttatgttttagtttaggtgttttaggttttttaaggtagatttggagttgaaaagagaggttggagggaattaggatgggggtagatatatggttttatttaggatgtttttaatttttagagtatttttttgaaggaggagttatagatgtttttaattttaagttttagatgatgtttggttattttttttatttattagagttagtttatgttgtgttttggttttaggttttgttggggtatttggtttttttaattattttgttgttaggttgatttgagcgttattttgttagttttttacgtgttatgtgaaataatatatgtaagatatatggttttaaattgatatgtataaagggttatatatatcgtgggtgttattatggttattttagattgtatatagttgtatttttttgttgttattttttataataaaagatgtagagttttgttatttttatagtttttgtagttattattttattttattttttattttgtaggttagtgtttttaaaattgagtgaaggattagttttaatattattattttaatttattgtatagttatatttttgtaaaacgtaataaaaattaattattggaaaaatgaaatgaaaatagtcgtatagttataagtattaatgtttattgttagatttaataaatataaaattattgtattaaatttttatgaatatttttaagtatttttaatttttataattattttgttgggagataggatatattgattgtgaattgttttttaagtagtaaggtaataggggaggaagttgggatttggtaaaagttaagttttttatttgggttttttgattttgaagttaatttcgtgttattatagattttggtttaatcgtttttgtgtagagttgaaaaaagaaaataaataaataaaaaatttaggattttagagagggaaagtattatgttttaaattatatagtaatttaatggttagtggatattgggattatatatttttttattttgttaagagttatttttttatttatagatattttatttgaattgtttaaggttttggatgtttacggattgagttatgtaggattttgggggaggtattttcgatttcgggtgattgttgttttttttcgtatttttaagtaatttttcgttttgttattttatatttttttcgtttttttagagattgcggggattgcgttggttggttttaattaattaattgggttttttgttgttttaaaaataaatatgttatagaaggggatatcgatagaatgtgtattatcgtttttttttttttattttttagtttttttttttaattgtatatagtgttttgagttttagtacgtagatgtaggtttttagtttattattttttaagaaaaagttatttttttttttttggaaaggaattaagaaatgaagttatcgtatgtttgtgttgtatggtatagttgtttagagttgtttgagtcgggttttataaatatttttttaaattagtatgttgtggttaaagtttttttaatgtttaaatttgagttaggggaatagttgttttttttaagtttagtttagttttttgagagtatgttttttgagatttatagaaaatagagtatttgttttatatatagtatttaaaggtaatttttggaaataatttaaatgttagtattaatggtttttgtaaatattaaaaaaaaaaaaaagaagaagaagaagaagaaagataattaaaagatatatatagaagttattggcggtaggattattattgtaagtattgtatttattattgtaaggaaaggaggattttattcgttttattagtatagattgagatatacgtagatttatttataattaagtaggttggagaataattcgggatgttaaaagaattttttagatgtattttcgaggaatttttagagtatttgaaggaataattattattattgagtaatattattattataatagttaggtattgtgttaagtattgtttaagaggtagtgtgtttgggtaaagtgggtaattaattagtatttatttggatgtgtgggtgggtggatggatggatggatgaaaggatggatggatagatggatgatagatgagtaggtagataggtggatagatggatagatgaatgagtggatagatggtgagtgttagtttgttttttattgttataaaggaatatttgagattgggtaatttataaagaaaagagatttattttggtttatggttttataggttgtataagaagtatggtgtaggtatttgtagttggtgaggtttaaggaagtttttaattatagtagaaggtaaagggggagttggtatattatatggcgagagagggagtaagagagttgtcgggtttttttaaataattaggttttatgtgaattaacgagtaagaatttatttatgattatagggagggtattaagttatggtgaagggttcgtttttatgatttaaatattttttattaggttttatttttaatattggggattatattttaatatgagatttggacgggataaatattttaattattttagtgggttgtggatgtatggatgaatatatgaaagaaaaatgattttagttagtaggatttaggttttgggggtttgattagaatttttataaatatggggagtgaatatgatttttttatttttgttttaatttcgaagttttttaaatttttagttagttattattttttggaagttttttaagaagaagtaatattttttttgagaagatgaggtttattttttttttttttttttatttatagggttgtataagagattaagttatttttgatgaaatttgtagtagagaaagttgggggttaagattatataaggaaggttttgggaggttagtttttttattttttttgtagtttagagttttattttgtaaattgtgttgtttgttgatatattatttcgagtgaggttttatttttagggatttttagttttagagtatagggggattagggatttgaggtggggtgtaggagtttagaagttaaagttatatgagaaaagagggtttaatattgtttgagtaatatggttttagttatttttttttttagaaaatattgtattggaaagaaatgtattaaaataattatatttttagtaatagagaagtataaatttaagattttttttttttttttattttgttaattttttgtgatatggttattttttttataatgaaagtaattttaatattggtgatgtaatagaggagaggattttttttttataattaaggcgggaaagggattaattaattaggaagattgaagttggagttttagttttgtaggttattatataggttttttttgttgatttgattagtttgtatttgtatttatttttttttaatttgaatggtttaggagtattgttagaaagaaaatattttagaatagttttaggtattagtaaatagttttgtaattttttatttggcgggttgtattggtaataattatggggagattagttatgaagtagttaatttggtttattgttgtttaattgattagtggaatttttttttttttttttttttgagatggagtttcgttttgttatttaggttggagtgtagtggtataatttcggtttattgtaagtttcgtttttcgggtttatgtcgttttttttttttagttttttaagtagttgggattatagatattcgttgttatattcggttaattttttttttttttttttttttttggatttttagtagagatagggttttattgtggattagtggattttatagttttttatttttttatttttatgatattattggaagacgtttattgattttattttatagataagatagttgaggtttagtgatgttaagtgatattatttatgtgtaggtagttaggaaggtgttttatgtatagtagggttcgagagagtttaggtaagcgatgtgaggaatttttgtttgtttattatttaatttataggtgtttagtaaattgttgtaggatgtatacgatcgtttaatattttttagattataaaataatagaatttgagagttgcgattatagtattgttattaagttattgttggttttaagtaagtcgtttattttgagggggttgaacgagcgtgttgtgttggttagcggtgtttaggaatagtagtagtttgggtttaatagggagtttgttagaaatatagagttttaggttttattttagatttggggagtcggaatttttggggcgatgatatggtttggatttgtgttttttttaaattttatggtgaaatataatttttaatattggaggtggggtcgggtgggaggtgatcggattatagaggtagatttttcgtggtttagtgttgtttttataatagtgggagagtttttataagatttggttgttgtaaagtgtggtattttattttttgtttagtttttttttttgtttttatttttattaggggagacgtttgtttttttttttttagttatggttgaaagttttttgcggttttatttgaagttaagtagatgttagtattatgatttttgtatagattatagatttatgggttaattaaattttttttttttattaattatttagttttaggtatgtttttaaagtaatgtaagaatagtttaatataggtagggtttagttattaaggttaatttgatttttaggggattttgatatatgtacgtatatatttaaaagtttgagaagcgggtggtttttgtgagttgaggtttttttttgttatttttgtagg

SEQ ID NO: 294 - DNA, 16688 bp, Artificial Sequence
  chemically treated genomic DNA (Homo sapiens)
tttgtaggggtggtaaggggaagttttaatttatagaagttattcgttttttaagtttttgggtgtgtgcgtgtatgtgttagaattttttagaggttaggttaattttggtggttggattttatttgtattaggttatttttgtattgttttaaagatatatttgaggttgggtaattgataaagaaaggaggtttaattggtttatgggtttgtgatttgtgtaggaattatggtgttggtatttgtttggttttaggtgaggtcgtagggagtttttaattatggttagagaagggagagtaggcgttttttttggtgagagtgggagtaagagagagagttgggtagggggtggagtgttatattttataataattagattttatgagaatttttttattattgtgaggatagtattaagttacgagggatttgtttttgtgattcgattattttttattcggttttatttttaatattggagattatgttttattatgaggtttagaggggatatagatttagattatattatcgttttagggatttcgattttttaagtttggagtggggtttaaggttttgtatttttaataagttttttgttgagtttaagttgttgttgtttttaggtatcgttgattaatataatacgttcgtttaatttttttaaggtgagcgatttgtttaaagttaatagtgatttagtggtagtgttatagtcgtagtttttaaattttattgttttatgatttgaagggtgttggacggtcgtatgtattttatagtaatttattgagtatttgtggattggatggtgaataggtagaggttttttatatcgtttatttaagttttttcgagttttgttatgtatgaagtatttttttagttgtttatatatgggtgatgttatttagtattattaagttttagttgttttgtttgtaagatggagttaatgaacgttttttagtggtattatgaggatgaaaggatgggaggttgtaaaatttattggtttatagtgaaattttgtttttattaaaaatttaaaaaaaaaaaaaaaaaaaaaaaattagtcgggtatggtagcgggtgtttgtagttttagttatttgggaggttgaggaaggagaacggtataaattcgggaggcggggtttgtagtgagtcgagattgtgttattgtattttagtttgggtgatagagcgagattttattttaaaaaaaaaaaaaaaaaaaaattttattggttaattaaatagtagtgaattaaattagttgttttatgattggtttttttatggttgttattagtatagttcgttaagtgggaggttgtagagttgtttgttaatgtttgaaattgttttgagatgttttttttttagtagtgtttttgggttatttaaattaaaagggggtggatgtaggtatagattaattagattaataggaggggtttgtgtggtggtttgtagggttgaggttttaattttaatttttttggttagttagtttttttttcgttttggttatggggaggggatttttttttttattgtattattaatattaaaattatttttattataaaaaaaatggttatattatagagaattaatagaatagaaaaaagaaaagagttttgggtttgtatttttttattattaaagatatgattgttttggtgtatttttttttagtataatattttttggggaaagaagtgattagaattatgttgtttagatagtgttgggttttttttttttatgtgattttagtttttgagtttttgtattttattttaggtttttgatttttttgtgttttgaggttggggatttttgaggatgaggttttattcggggtggtgtgttagtaggtagtatagtttatagggtgagattttgggttgtaggagaaatggaaaagttgattttttaggattttttttgtataattttggtttttagttttttttgttgtaggttttattagagatgatttaattttttatgtaattttgtggatgggaggagaggaagaaaatgggttttatttttttaggaaggatgttatttttttttggagggtttttaggaggtggtggttggttgggaatttaggggatttcgggattggaatagggatggaaaagttatatttattttttatgtttatggaggttttagttaaatttttagggtttggattttgttgattgagattattttttttttatgtatttatttatatatttataatttattgagatggttaggatgtttgtttcgtttaaattttatgttgaaatgtgatttttagtgttgaagatggggtttggtgggaggtgtttgggttatgggggcggattttttattatggtttggtgttttttttgtggttatgagtgagtttttgttcgttagtttatatgagatttggttgtttaaaagaattcggtagtttttttgttttttttttcgttatgtgatatgttagttttttttttgttttttgttatgattggaagtttttttaggttttattagttgtagatgtttgtattatgttttttatatagtttgtagaattatgaattaaaataaattttttttttttataaattatttagttttaggtatttttttatagtaatgaaaaatagattgatatttattatttatttatttatttatttatttatttatttatttatttgtttgtttatttattatttatttatttatttatttttttatttatttatttatttatttatttatatatttaaataaatattgattgattatttattttgtttaggtatattattttttgagtagtgtttagtataatgtttggttattgtgatggtaatattgtttagtgatggtaattatttttttaggtgttttgaagatttttcgaaaatatatttgagaaatttttttgatatttcggattattttttagtttatttagttataaatgagtttgcgtgtgttttagtttgtgttgataagacggatggagtttttttttttttatagtagtaagtatagtatttatagtaataattttatcgttaatggtttttgtatgtgttttttaattatttttttttttttttttttttttttttttttttttggtgtttgtagaagttattggtgttaatatttgaattatttttagggattgtttttgggtgttgtgtgtggggtaagtgttttattttttgtgaattttagaaaatatgtttttagagggttgggttgggtttggaggaggtagttgtttttttagtttagatttgagtattgagagagttttggttatagtatgttagtttggggagatatttataaggttcggtttaggtagttttaggtagttgtattatgtagtataagtatacggtgattttattttttaatttttttttagaagagaggagatggtttttttttggagggtggtgggttgaaagtttgtatttgcgtgttgaggtttaggatattgtgtgtagttggagagaggggttggagggtgaggaagggggaacgatggtgtatattttgtcggtgtttttttttgtggtatatttatttttggaatagtaagagatttagttgattaattgaaattagttagcgtagttttcgtagtttttgagagggcggggaaggtgtaggatagtagggcgggggattgtttgaggatgcgggggaggataatagttattcggggtcgaaaatattttttttagagttttgtatgatttagttcgtaggtatttaggattttggataatttaaataggatatttgtgggtggggaaatagtttttagtagggtggggaggtatatggttttagtatttattggttattgagttattgtatgatttggggtatggtattttttttttttgagattttaggttttttgtttgtttgttttttttttttaattttatatagagacgattgggttaagatttgtaatgatacggagttagttttagagttagaaaatttaagtgagaggtttagtttttgttagattttagtttttttttttattattttgttatttaaaaggtagtttataattagtgtgttttgttttttaataaggtaattatagaagttgagagtgtttagaaatatttatagaaatttgatgtagtaattttatgtttattgaatttaataataaatattggtgtttgtaattgtacggttgtttttattttatttttttagtgattaatttttgttgcgttttgtaaaagtatagttgtgtagtggattagaataataatattaaaattggttttttatttagttttagaggtattggtttataaagtaggaagtaaaatgaggtgatagttgtaaaaattgtaaaaatgataaagttttgtattttttgttataaaaggtagtaataaaagaatataattgtgtataatttgggataattatggtaatatttacgatgtatatggttttttatgtatgttagtttggggttatgtattttatatgtgttattttatatggtacgtaagggattggtagagtgacgtttaggttagtttgatagtagggtgattgaaggggttagatattttagtagggtttgaggttagaatatagtataggttggttttgatgggtggaggaggtggttaggtattatttggagtttggagttgagaatatttgtgattttttttttaggagggtgttttaggagttgagagtattttaggtaggattatatatttatttttattttagttttttttagtttttttttttagttttaggtttattttaagggatttaggatatttgggttggggtataataggatttggttttatgtaaaggagttgggaagagattgagataatagagggttgtaaggagagagatagagagagaagaatttgttagaagaagttttttagtaatttattaagttttgatttttgttttattgtttgtttttttttattcgtttttttgtttttttaatttttgtttttaagaaatttggtgtatattggaatagggaggaatagaagtattttgggtggagttttgggtttggttgtgtacgagtttttagtgggtggtttgttggtttttaaagatgattttttattagttatgtttttcggtgtttgtttttaggtagttttattttattttgagtttgggtttgttttgtgatttattttaattataagaatgtggtagaaaggatgttgtgttagttttagaattaagtttttagaaagtttagtattttttgtttttaggagtattgagtttttatgttagaagtttatttttatattttgttttggagattagtagaattagaaatgtattgttgaatgttgttcgagagattaatggagaggttatgtgaataaggaggtttgaaattatatggagatagagggttagttattttagtattatagtttagttgtgttttttagttatttttgttagttttttagggttatgagtgaattattttggatgttttagttcggtggagtttttaggtgattgtagttttagttattatttgattgtagttgtatgagaggtttttagtgggattagtaggattgttaagttgagttttgtttatttatagaattgtgagaaataaaaaaatggttgtttttttaagttattaagttttggaatgatttgttatttataattgataattgatatagtttgtttttagggaaaataagggataattttgggttttaggtgttttttataggatgaatgggatttggttgttgataagttgataagtttgagcgtgaaattttttttttttttttttggagaaggaattttgtttttgttatttaggttggaatatagtggtgcgatttcggtttatggtaatttttgttttttgggtttaagtaatttttttgttttagttttttgagtagttgggattataggtatttattattatatttggtttttttttttttttgtatttttagtagagataggtttttattatgttggtttggttaggttttgaatttttgattttaggtgatttatttgttttggttttttaaaatgttgggattataggtgtgagttatcgtgtttggtttgagtatgaaatttttatgtttaaatattaaagtgtaaatatttattagtttagttgaataagaatttttgggggtaaggttaaggaatttgtagtttagtaagtgtttttattattggattttgggaaagtggattgtattttgaaaaattttagattagttgatatttaggagtttttataatattaagttgtaatattttagtgtgaattagtttgatgtagttttttttagaggttattgatagagggtaagatatttttaaaaggaaggaattgttaatatggaatgataggtggattggatgattttttattatttagttttaatttgttttttttgtttttttttttataaatttttttttagattttttgttttaatttttttcgatagtttattatttttttgtagatagagtagcgaagtgttatttgttgtatttattatgattagttgatggtgtatggtttttatggagtagtgttgtgatttattagttatggagtagtgttgtgatttattgttatgtttgttatgaatattggaaggggtagtggtaatgatagttttttacgtttgttaattttgtttaatattttttttagtgttgggaaagtttttgtttattttatttttttttggaaagttttgtttttttattttatatttttaattttttttatttttatgatgtattatggatattatttgtttatatagttggtttttgatttttttagatgaaagtaatttttttttttttaattttttatgatatttaatttggtatttatttacggtgtttagtttttttttttgtatgtttttattgttttttttttattttttttttaggaatggatttttcgttaagggaggtattaggttagttttttttttgtgtaatagggtgtttttgatgagtataaatttggaataagtgtttgtagggttggtgggtatttggtttttttgggtgttgtgtagtttgagtcggggggtaaatgggtgtttgtttttttgaagaaggtaggcgttttgtggtagatgtgggtggagggggttggggagtatgattatggagaggttgggattttatttattttttttttttgtttgaagggtaatttgggagaagtttaagagggaggagttgattgtagaagttgggatatttgtataatttttaggtttaagtattattgttttagggttttgggggtttatgtgtgagttaagaaagggagatagagagagaagagagagagaggagagagagagagagagaagatagaggagagagagagagagaagaaagaggagagagagagaagagagagtagagagagagagtatgttgttagtgaggtggttttaagtttttttggaaataatttggaggtattgtggggtggttttgaggtgttgaggtatatttgtagtggggttaggatttttttaatttgggtttgaaggttgaggtaattttgggtgtatttgttggtgagttgagagttttggggatttttggtagatatttttatttttgtagtttggagggtttgtatgtagtgaggttgttttgtttattattacgttttttgggatagtatattgtttgtgttgaataggtatttagttgcgatttgtggaattagtgttggtgaggagggtaagtggtaatagaaatgggggtgtgttttttttagttttttagttataatttttatgattttttatattgttttgggtttagtttcgagttttggagattatagttgaagtttgttggagtatatagggttttttttttgtttttggttgtttgggtttaaaggtagggttaaaaaggggtgttttttttttattgggggttaaatttatggatgtagtatgtttattttttattttttatttttggtttttttaaatgtgaaacggtcgtgattggtggtattagggatttgggattagagagggtaaaggatttttttagagttatatagtaagttattgttaggttttggattagaatttgagtttgtagttaggttttattttagtatttttttcgtgttatttattttagtttatgagaaatttgttattatttgtgaggttattttgttatttgttatttggggtattgttagggttttttgtattttttttttagtttttgtttagtttttttatttttttttgttttttttattttttttttttttttatttttttttttttttatcgatggtaaaattcgggtagttgagaggttgaatagtttggttttattttttttagttatagtttttttttttttttttttttttttttattttttaatagattgtaatagagatttgaaatttatttaaatttgtttgtgatttatatttgagtttgttttatgatttttgttttgtattaattttttttattttttatttattaaaaataaaagaaagaaaaagttaaataaatttttaaagtagagaatgtttaaaatatattaaataattattttttttggataaaattatttgcggtatttttttttagtttttgttatttttgttagggtttagggtttttaggagaggatagtttttagttttaggagggttgcgtaaagtcgttgtatttgtgtcgtcgttttcgtcgttttttttgcgttataatttaggtttgcggtttggagttggtttttttttggtttagagggatttaagggttttttttgtatttattagttattgtgggtgttttttagaaattatgttttttcgtgggatttttttttttatttttttgtagtttatttgggtgtattagatggttatttgggtatgacgtaggtttttggtttagtttttttgttttttagattgtaagttttttgagatttttttttgatttatattgttttatttttgttgggtgttagggattgtgatagatatttttaaattttttattttatttaatttttatgttatatttttaacgtatagtgttgttttgagattcgtttatttggtggaggtaaattgggaaatgatattatttttattttataggggaaattgagttttagaaaatttagttggtttgtttagtgttattatttttaggtaaaatggattggatttgaaattaagtttattaaagttaagtttaggattatttttgttagatgatattgatggaaattataattaataatattttataggtataattttatttatatgtatatagtgttttatagtttgtgaaatttgttttttaattttttttattttagtttttatattgtgttatattgtatattttatttttattattaacgatgtatagaaatataatatttagtataagaagagttgtggtggaggaatgttttgagtgaagtagggggatagaagtgggagtaattaattgtttggaggagttagggaaggttttttggaggaggttgtatttgagttgggttttgaaggttgagtgaggtatttattatttggagaagagaggataggtatttttggtaatggtataggaatgtattttggtgggtgggttggtaggtgggagttaattaggtagaagaagtaggttggggttagattgtgttgggtttggatagttacgtggagaggttaggtttttttagtatgggaggtgttttattgaaagatcgtaatataggtttgtttgatttagtggttaggagttttgagcgtttgaaatgtggttagtgaaattgaagaattttagattttgtttaattttaattaaaatgtaaatttcgattttattattgaaaaatttttgtagaatgtttgaaatagtataggtatgcgaatcgatttttatatgtatattttatgaaatttaaatgtagaataagtatttcggatgaaaatgtggggtttgaattgaaatatattgtgggtataggaagtatattggattttaaatttgaagattgtataatagtttattgataattgttttatattgtttatatgttgaaataatattattttagatatatagggttaagtaagaaatattaggaatattaattttatttgtttgttttcgtattttaaaatgtggttgttagaaaattttaaattttttgtggtaatagtatttttattggatagtattggtttgagattttaatgtttttagtaggatttgagaggttttagatattggttttttaatagtttttttagtgatttagatgttggtggttggggattttttttggaggaattttgttttagaaaggtatttttgagttagttgtggagttttgtatttgtaattttagtattttgggaggtaggaggattatttgagtttaagagtttgatattagtttggttaatataatgaaatttagtttttattaaaaatataaaaattagttgggtatggtggtattcgtttgtggttttagttaattaggaggtggaggagggagaattatttgagtttgggaggttgaggttgtagtgaggcgtgagtgtgcgattgtattttagttttggggatagagagagattgttttaaaaagaaaaaagaaagatttttttgggtattggttggaagttggattgaaggtgtgggtttggaggtagtagggtcgttagtgttattaggaggcgagggaagaggtttaattttagacgttgagagattttttgagggttagataatttcgagtttttttttcgagggtttcgggtgtcgtttgttttgttttggttattagatttggggtgagggggtagttaggggagggttgggtatggttttcggttttggggatagatattgggtagtgttttgggggagtgagtgtatttcgaggggttgtcggttttgttggaagttgttttttggggattaattttgtatttattggagagatcgtagaaatgttttttggtatagaaaggagtttaatttggtcgttcgtttttgttttttttagggtgagagttaggagtgagtggtaggagcgttatagtagtaaggagggattttttttgtgattcgttttttttgttttgattagtatttaggttatggagatgaggttaattttttgtttttgattttgttaaagatttttcggtgatttagaagtttttttttgggggtggggtggggttgggggggtgatatagagataatagagtaataagtttttttttagggaaattgtgtttgtagtagatatttttttttgttaagcgtttacgtttcgtaaatttgatatttttcgttcgtcgaggtaggtttgtagagtttattttgattatgttttcgttaatgtttttggggtttcggtttattaggttaatttttttgtagtggatatttttgacgatttgggtttcgagatttgtgtgtttttttgttattatcgtagagttggggggatttataggaggagattcgagttgtgtggtcggttggggttgaaaatatttggggtagagagattaatttagtgtttttagatttatgtttttgttagttaaataggttttatttagtatgtcggttgatagttgttttatataattttagtttgtttttttttaaagttttttgtggtaggtttttaagttaaaattaagattggagtttttttggaaggtcgatcgttttttaaagggggttgttttagggtattgggttttaggagagggtgtagagggtttagcgttttttatgtatcgtgtggttgtggttaattcggcggtcgtttcggggtttttggaatttgttttattgttgttagtattttggtttttttggggtgtattgttcgtggagggaagtggggttagttttttttttgtttttggttggttgtgtgatttttggtatattttatttttttaggttattttgtttttatttgtaaaatggagagatgataataataattagggtttttttatttagggaatggttttaggagttggaatgcgatgtagtggggtttttcgttggattgttagtgtttggttttgttgtttggtgatttggagtaggttcgagttttgtgggtttttgaggtttttatttggagtaggagttgatggattgtggtgtggggttaggttggggatgaaatagggagaggaagttgttgtggggttgtttttcgtttgtcgtttggagtttgtattgggatatgttcggtggggggaatatgaagtttatgttcgtgttattttttattttgttttagtgatagtttttaggatttttttgggttttagatattttatatgtattagtggggtgtattttttttagatatttgttcggtttttttgtgtttttttttaatttagtttttttttgggttttagtagtatgaaggatggtaattttgaatttttaggggttagggtttgtgtttttatttatttgtttatttatttttttatttaggatttgttaatagttggggataaatagattaataaggttttgttcgttttgaagtgtttttagttaaggtggggagattaattaaaataataagtgattataatattgtgcggtaagtgttatagattagagatattttataaagagttggttttagaagtttataggagttagtaatttattttgaggatatcggggaagattttttgtgggaggtggttttgtagataggtatcgaatgataagtaggagtttagtatttagaatattttaagttataggattgtggatattgaggagtggtatagataggaatgttgaaaagtgtggagtggttggagtatagggtgtttggggttgaggtaggagatatagtttagtttaggtttgggtgtgtagtattttaaatgttatattaaagaatgtggattttgtttaggggtgttggaaagttattgaaggttttaaagtaggatagggtcggtattagatttgtgtgtgaggaagttttttggtggttaggtggagggtggattggagttgggtgaagtttgaggtaggagggggaaaattagaggtgatttaggttttattaataattatatttggttagtaatataaaggatgtaaaagtaatagtgatttgaataaggtaggaatttttttttttatttaatataagtagtttagaaatattatagtggttttatgatgtttttagatatttggatttttatttttttgttttgttagttcgaaagttattttataggtataagatgtttattgtttttttaattattatttttgagtttggataagaagaaagaggaaggggtagggataagaaacgatatttgcgaattgagtcggttttgttataaagttttgttagaagtttaatttaattatttttgtttatattttattggttatttttgttttggtaaacgatgatggaattgtaggttttttagtttgagtatattttcggtatttttatagtgttattagggataaatggtgggtaattagaaaattgtttttaagtcgtttaggattaagaggtaattttttttgttgtttttttatttttttgtttgggtttttaggtttttttggttttaggtatatgaatattttgtaaagagattgtaataaaaaaaaagaatattgttgtttgtatttataagggacgtggtagggatttaagtttgagtttaagttttgtgtatcgtagaattagatatgtttggtgaaaggtgggttagttaatggtagttttgtcgttagggatggaagagttatttagaagaatttattattttaaaggggaagtaataataacgatatagtaataatgattatggaaggttattttttttaaagatgatgagattgatattttttttattaagagggagggtttgtgttttttttttggttggttttttggttttttttttttaggatttttgtttttggattttagttattacgttgggaggaagtttatattagtttatgtgggaaaattatatagagaggagttgaggttttagttgttaattaatattagtattaggtatgagggtgaataaagttttggatgtttttagtcgttagtttttaagttatttttaatttttttgttttttagttgaagttttagatattatgaaatagagaaattgttttttttgtgttttgtttgaatatttaaattatatagtttatgattataattatttttttatgttattggaatttgggggagtttgttttataattatagttattggattaatgagcgttaatggtaatagtaattattgtttgttgagaattattatgtgtttggttttttttttaggtatttttggtgtgtgtaaggaggtttatttgttatttgaaagggttagtgtttttagttggtgatcggtgttgagggttaagggagtggagtaattaatatatattgtggattttataggaaggaagtgtattttagttgggttagaaggatgagtggatttagagaggtagagaggaaagggttagatgttagaggtagagaaagggttattttttatttttttatgataattgtatttttaaaaattttattggtgaaaagagtattgaagtcgggaattattagttgttttttggttttatcgtgaagtaattttgagttttttttttgaggtttggggtttttgttaagtttggatggtaaaatttgtttgtattttttacgtatgagtttgtgttttcgtatttagtgggaaaatttaatggggtattagaggggttgtgtatttatagaaaaaatgttacgaagagaacgtattgatagatgaaatttttaagttaattttggggtgatgtagttaataagagaaagtaattaaggagagagagtggtttttcggagtttattttgtatttggggttttatagaggatatagcgtttttattttaaaggatttttgtcgttgttgttgttatttggtttgttagggaaaagagagagaaaagaattttgaaaatgggatgtgtaggaagatatatttgtggagggtttaaaggggaagtaatgggaaagggaaagatttatatgagttgagttattaagaaagtaatggtattatggattgaaaatttagtgagttaataagtttagggttattgttaataagtaagattgattatttatgtaaatgtttttaaggttagtaattttagaatgattagtaggaaaggaagtttttttttgttttttttataagttttagatttggattgagagtttttgttttttttatgatttggtttttggggtttgtatttagaaaataaattatagtatgttcgagttcgaagagatttagtttttttattttatagatgtagaaatcgagggtttaaaaattttagttggtggattggagagtttgggatttggagatagaattgttatatgtttatgagtaggttatttttttttaaattttggtttatttatttatataatgagtataacggattatttttttttattatgagggatttgggagatttttggaatgggttttaaaatagatagagtgattttaggatgtattaatagagatgaatattttagaataatggaggtgattgttttatttaattgtgtattggttagattacgtttggaggtttagtggggttttatgtttgaagaggggtgttgggaaattagattatttttatagaggaaggaagtttttttaagaaagagtttgaaatatgttttgtgagaaatagataattttgggttttaaagagaagatttagagagagggacggaagaattttttttaaatttttgaaggtataagggatgagatttattttgggaggttttaaggattggtgagtaagtggtagattttcgtttgatttaatttagggtttgggttatcgttggttttattgataatgatagttgatatagttttcggtaagggtattaggaaggattgttttaaagttttttagagatataatagattgttttcgaaaggggttggttttttgggtttagaaatattaaggtagaagagtgaaagggaattaagagttaaaaaaggagaagaatagggtaaattgtaggattatatagtaaattttttaggtaggattggttatataagttgaggggtttagagaaaaataaaaatttagtttttgtttaaaaatgattaaaaatttgaatatggtgaaattaagttgtggtattttttaagtatggggttttatgggttgtattgttttggttttagatttcgtgggttatgtggtttttgtcgcgattatttatttttgtttttgtagtttaaaagttgttgtagaaaatgcgtaaatgaaggggttatggttgtgttttagtaaaattttatttataaaaataagtggtagttagattgtaaaaatacgattttggttta

SEQ ID NO: 295 - DNA, 6418 bp, Artificial Sequence
  chemically treated genomic DNA (Homo sapiens)
gtgtttaaatagtataaaatttaattagtgtaagtgttaaaagttgttatagtattttaaaaaattttaaaatattagacgttgaaaataagttggtggaaatgaattataatatattgttatattttaaaggtattggtattattagaaataatttgtaataattatagatatagattttgtttatttttagtgtgatattttgttttaaatagattttatttttgtatatatatatataaatgtatatataatttaaatatattaatatatatttttttatttatgtataagaggatattgtattttaattagagttaaaagttaaatatattgtttgaaaaattgttagaatgatattattaatattttattttgtagatattgaagatggaaaaaagaatattatagagattatttggtttattagtttaggaagttattatttaaaatattttaatattggaatttttaaagtatagtcgtagagtttattattaatttattttaattgatggagatgtaaaaattaaagtgatttgagattatgagttttatataagttataggtgaaggttaggggttgtgatttttagtttttagtttgttatttgttttggtagatgaggatttttaaatagatttatagtatgttttttatgggttattgtgttttatagtgttttgtttgattagttgtatgtgattgaggtagtaaagttttttcgcgtttgtaatgtttgtataattatttattaagataggttttttttatttagtatgtttttttttatttgattttattttattgttagtatttaggtttttttggatagttttaaataaatttttaattttatgatgtttatatattttttaaatttttaagatggtaataatgttttttgtttttttgttatttaagtaaagtttttgtgagttttgcgggttggttgaaagttgaggaggtgtaaatgtttgttaattattttttttaaaggaaatatttgagggaatagcgtaaatgtgtttagttgtttataatagatatttatgtaagggagttaaaatgatagataattttttaattttgatggaatattttaatgaatttttttatttagttttttttttttttttttattttatttattttttgtggttagttgtattttatattgtagtttaattaaaatataaattatttgtgtttttttgtagataaagtataattggatttatttttgttaggggataatttattatggtttttatttaatatagttttagatggtttttagtggtagaaataaattaatgtatatttttattaggtgttgtatttatttaattgattgttaaagtgatgagaagttaggaaattatttaaaagagaggtttattttttttagtttaataatttatatattaggtaggtttgttttattagtgggatgtttttagaaaatattaatagtttttagttgggtggaaaattaaaatttttggggtttgataaaattagtagatttgaatttgaaagtagagttaatgtttttattttattttttattattcgtttataaaatattattttttaatatgttagttttatttggtggttagtggtttgaaattgaaagtgggataagtaagcggagaaatttggatatgagtgagtttgtttttttaagttggtgtgttattttgtggaagggttttttttaagagtaggggggttttaatgattatttattaatgttcgttgggtgattattgagtgtttttttatttagtttattaagttttgtatataaaaagttagaataagttttatttagttttgttaaagttaattaggagtaaaatgttttatttgaatttattttgtttttgtttttttattttgttaatgtagttttgtttaaatgagtgtttttattgggtcggttagaatatttgaaattattaatttttttgtattgaatagttggtggtaggttagagtagatggggtaggaaagtatttggttgggtgtattgtttttaattaggattaatgaggttttagtttttttgaattaatttatttaatatttattgtgtgaagttatagtgtattataatagtttgttagaagtcgagaggaaagttgagaagatttgtggaaaggttttaatttaaattttttttttattaatgtagagagtttttttgaattgtagtttatgttagtagattgttggtttttgttgttaagttaggtttgaatagaggaaaaatttgtattttatgaaaggtttgtggtggatataagtgaaaaatattttggaattatataatattataatgtttttttaatgaatgatttaaagttgttagaaaataatttatgtatttgtttttgtgggagtttagtattttgttgttgattaaatttattggtttggaaagtgttgatttagatgattttttttaaaaaattgttttaaaaatggattgtgtttttaatttagtgatatatattaatcgatgaggtttttttgaggaagtatttaattggtgagtaatgtattttttgttattgggatatattttagttttataaaatatgtttttttatgatagtgttttgtattggagaaaatttttgtaatatgtattgtttttttttatttatttgtataaatgtatttattatgttattgattgtttatttttattatataatttggatgttagagattttggttttatattttttttttatttatttatttatttatttttatgaacgaaaagttattttgtttgagtaattgtgtagaattatatatttaggtttttttatttagggagaattgttaaatggggttttgttttttttgtttttatggattaaagaataagaggaggaaattggttttttgagaaaatgttgaattagttttagatgtatatatatttagttaggtttcgttgtagttagatttttaggtgagaatttttagggatttaggttttgttgatgtggattaatttaaagtggtaattattgtagttagataatagtttaaaaagtttttttatatatagaaaagatatataattatatagtatatggaagtttaattgtttgagttgcggtttagggatttgtagtgtatcgatattaagattttattttaaagtcggatattatttagtttttttaaaagtgtattgtattttgttatatgattttttattttagaagtgatttattatgtatattgatgaaaggttgggttttttattgtgaaaatgttttttttttaatataagtatagtattaaaaaaaaaattagtggtatgtagtattaagtggttttttaaaaatattttttttaaaaatgaaagtttattaatttaggatgttggattttataaaggtttttatagtaggatttaattgattattatatttatgtttgttataaagttttttattataagaatgtttgagtttggtgtttaattgtattgaaatttattatagagaattttattataagtgatatttaattaagatgaataaaaagattggttttataaatagggtgtagtatattattagtgatagaatagagtaatcgttatgaattgtggtttttttataagttgtttttgataatgatggatttttgaggggttcgttggataaagtagttttttttgggtatagtatttaggggttgtagaagtttttattgattgatattgtttattaagagaatatatttttagtttgtgcggagagtgtgtgtgggtatgttttgaaataggttgtgtgtatttttgggaagaggtgtaggaagattgagtaggtagaagttagagttattgtttttgtttttagaaatttttggagatagtaagtagtgtggaaatttatttgataagggttaaaagtatatggaaagtgtagagtaagtaaaggatatgttgaggattgaaggaatagtaagagttaacgggaatgtttttgtttattatgtttattgagtttgtaggttgattagaggattttgagtggaattgtttttgtgttgatagtggattgtgtatacgatggaaaggtaaagtttgaggtagttattttattatgtgttttgttgttgaaataaatatagatttaggaaagatttgtaagtgtaaaattgagaaagagttttaggagagaatagtattttttttttgtttggtattgttgtgtgtttagaaaaggtatgtaaggtaggtaggcgtgtgttttttttatgaggtagggatgttttataaaggattaaagagggattgttgagaagaaaatagttagttttagataaagtattataataaaggtttttagttttatatattatggtgtttattaaagtttaatagggaagagtttattgaatttggttgggtatgtgttatttatgggaaggataaatatttaggggtgtgtaaagaaattaggaattaggaggatatgattgtttagtttttgaaaaggttttataatgaagattttgtttttattttttatggatttttatgtaaggtagaggaaagtaagttgaaaatgtttggagtatattaattcggggattttagggggttaaaagtattcgagtaaaataaaagtggtcggtttagtttttaaaaagtgttttattttatatatattattgagaagttgataaaaggaatgattttgatattttgtgtaggatgataaattggtataatatataaagttttataaaaatgtttgtaggttgtttgggatttttagttgaataaataggttttgagttttgtatttttttttttttaatatagtttttaattatggttatgaaaatgagaagatgaagggaagttttttattgtgaggggtggtagggggttaggtttatatttttattttttggtaaaataagggttaattttgaataggatgggggtggtggtgaataaattattcggtatttagtttattattttgaattttattttttgttttttggtgttttgaaatttgtagagagaggtggagtgttaaggggagggtaggggttgtgatattttgtatatatatttttgttattgttttgtttaaagagatagggttgggtttaaggttatatgtgtttttgttattttttatatttttgttttaagtgtaattcggagtgttagttttttatttgtttttgtttggtaggcgtacgcgtttagtattttgttttcggcgatgtcgttttagtttttttgatggtttttttttttgttgttatttattttagaataggaggtatgagttcggaacgcgtttgtttttaggagatagttattttttgtgtggtacgttggatttaaggatgtttggtgagttagttttgttttgtgttttttttgtttttttaatgaagaaagtttattttttattatgtatggaaaatattttttgttttatagcgtgttgtatttgatgtgggtaggaagaggttgggggtgatagaggtgtgattggaaggtagtataaagagaattataaagattttgatatatggaggggtatagggtgtggagtttttgtttttaaaatttgggagatgtattttaaaggttgagggggtcgtatagttacggatgtttgtcggagtaatttatttgagggttttagtttaagtaagaagtattgtttttgtttagaattttgtgattattatttgtatttggtgttttggaaattttatttgtggagagagtttttagattatggtagaattttggaataagatttttttaaaaagttgtttatgttagagaaagtgaaggaagttttggaattataaggaattttagttttgttttaaattatagtttttagatgttattagataaataattgaaattagttaattaaaataaaaagtttgttgaattagtgaagtttttgttttggaaatttagtgtatgttagttttttttgaaaaatattatttttggagtttggagtgtttttgtgatcgttgttagtgaaggttttgtttgtggagaaggttggtcggggaaagggttgtttcggttgtttttaagaattgtttaaattgttttgtgtttaatttggagttttttatttttagataaaaaagatagggtagatagagattttttagttggtcgatttatgtggattatttgggtaggataggtagaagaggttgtgtttggttatagagtttgtatattttatagatggtgttttgaaatattatttgttagttttttgtaattatagttgtgtgtaggtattgttagttgtttgaagaatgtttttttttttaggatgtgtttcgtttattttaattattattgatatata

SEQ ID NO: 296 - DNA, 6418 bp, Artificial Sequence
  chemically treated genomic DNA (Homo sapiens)
tatatattaataatgattaggatggacgagatatattttaaagggaaaaatattttttaaataattggtaatatttatatataattgtggttgtagaaaattggtagataatgttttaaaatattatttgtgaggtgtataaattttgtgattaagtatagttttttttgtttgttttatttaaataatttatataaatcggttagttggaggatttttatttgttttgttttttttatttgaagataggaagttttaaattaggtatagggtaatttagatagtttttgagaatagtcgaaataatttttttttcggttagttttttttataagtagagtttttattggtaacgattatagaaatattttaggttttaaaaataatattttttagaggaaattgatatgtattaaatttttaggataagagttttattaatttagtaggttttttattttaattaattgattttaattatttgtttgatgatatttaagggttgtgatttaggataagattgaaattttttgtagttttaaagttttttttattttttttgatataaatagttttttaaagagattttattttaggattttgttataatttgaaaattttttttatagatgaaatttttaggatattaagtatagatgatagttataaaattttgaatagaaataatattttttatttgagttaaaatttttaagtaaattatttcgataaatattcgtggttgtacgatttttttaatttttaaaatatattttttaaattttaaaagtaagggttttatattttgtatttttttatgtattaagatttttgtggttttttttatgttattttttaattatatttttgttatttttagtttttttttgtttatattagatataatacgttgtggggtagaaggtattttttatgtataatagaaagtaagttttttttattggaaaaatagagagaatatagaatagggttaatttattaggtatttttgaatttagcgtattatatagaaagtggttgttttttaaaagtaagcgcgtttcgggtttatgttttttgttttggaatgagtggtagtagagaggagggttattagaggggttggggcggtatcgtcggaggtagggtgttgggcgcgtgcgtttgttaggtagagatagatggagagttgatatttcggattgtatttggagtagaaatgtggaggatgataggagtatatgtggttttgaatttagttttgtttttttaggtagaataatgatagggatgtgtgtgtaaagtattataatttttattttttttttagtattttatttttttttgtaagttttagagtattaaaaagtaaaaagtgaaatttagaatgataagttaaatgtcgaataatttatttattattatttttattttgtttaaggttaatttttattttgttaaaagatagaaatgtagatttggttttttattattttttataataaaaggtttttttttatttttttatttttatagttataattgggaattgtattaaaaaaaaaaaggtatagaatttaaagtttgtttatttaattggaaattttaaatagtttataaatatttttataagattttgtatattgtgttagtttattattttgtataaagtattagaattattttttttgttagttttttagtagtatgtgtaaaatagaatattttttagaagttgagtcgattatttttattttattcgagtgtttttaattttttgggattttcgggttgatatgttttaaatatttttagtttatttttttttattttgtatagagatttatgggagataaaaataaaatttttattgtaaagtttttttaaaagttgaataattatgtttttttgatttttgatttttttgtatatttttaaatgtttattttttttatgaataatatatatttagttaggtttaatggatttttttttattaagttttaatggatattatgatatataaaattagaagtttttgttatagtgttttatttaaagttggttattttttttttagtagtttttttttagttttttgtaaaatatttttgttttataggagaaatatacgtttgtttgttttgtatgttttttttaaatatataataatgttaggtagaaggaaaatattgtttttttttaaaatttttttttagttttatatttgtaaattttttttaggtttgtgtttgttttaataatagggtatatgatgaggtagttgttttaggttttatttttttatcgtatgtataatttattattaatatagaaataattttatttagggttttttgattagtttgtaagtttaatgaatatgatagataggagtattttcgttaatttttgttatttttttagtttttaatatgttttttatttattttatattttttatatgtttttagtttttgttagatggatttttatattatttgttatttttaaaaatttttgaaaatagaggtaataattttgatttttatttatttaatttttttatatttttttttaagagtgtatataatttgttttaaagtatatttatatatatttttcgtataaattaaaaatatatttttttgataaatagtgttaattaataagaatttttatagtttttaaatattgtatttaagaagggttgttttatttagcgaattttttaaaaatttattattgttagagataatttgtaaaaagattataatttataacgattattttgttttgttattaatagtatattgtattttatttatgaggttaatttttttgtttattttagttagatgttatttgtaatgaggttttttgtaatggattttagtatagttaagtattaagtttaaatatttttatgatagaaagttttatagtaggtatgagtgtgataattaattaagttttgttataagggtttttatggaatttagtattttaaattagtagatttttatttttaaagagagtatttttgaaaagttatttaatgttatatgttattgattttttttttagtattatatttatgttagaaagaaaatatttttatagtgggaaatttaattttttattaatatgtatggtgaattatttttaaaatagaaaattatatgataaaatgtaatatatttttgagaaaattggatgatattcggttttaaaatggggttttaatatcggtatattgtaagtttttaaatcgtagtttagataattgaatttttatatgttgtgtgattatgtattttttttatgtgtaaaaaggttttttaagttgttatttgattatagtaattgttattttaaattgatttatattaataaaatttggatttttggagatttttatttaaaagtttgattgtagcggggtttagttgaatgtgtgtgtatttgagattagtttagtatttttttaagaaattagttttttttttttattttttaatttatggaggtaagaaaagtagaattttatttggtagttttttttgaatagggaaatttggatatgtagttttatatagttatttagatagaataatttttcgtttataaaaataaataaataaataaataaaaggaggatatggagttaagatttttaatatttaaattgtataataaaaatagataattaataatatgatgaatgtatttatgtaagtgaatggagaaaaataatatatattgtaaaagttttttttagtataaaatattgttataaggaaatatattttataaaattaaaatatattttaataataaagaatatattatttattaattaagtatttttttaggagaattttatcggttaatgtatgttattgaattaagaatatagtttatttttaaggtaattttttagagagagttatttaaattaatattttttaaattagtaagtttagttaataataaaatgttgggtttttataaaagtaaatatataagttgttttttgataattttagattatttattagaaaggtattatggtattgtatgattttaaggtattttttatttatgtttattataaattttttatgaaatataaattttttttttgtttaaatttgatttagtaatagggattagtagtttattgatatgggttgtagtttaggaaagttttttatattggtgaagggagaatttgagttaaagtttttttataggtttttttaatttttttttcggtttttagtaggttgttgtgatatattgtgattttatatagtgggtattaagtgagttaatttaaaggagttgaaattttattgattttaattgaaagtaatatatttaattaaatatttttttattttatttgttttggtttgttattaattatttaatataagagaattaatagttttagatattttaatcgatttaataaaggtatttatttaagtagggttgtattaataaagtgaaaaaataagggtaaaatgggtttaaatggagtattttatttttagttggttttaataaagttgaataaggtttattttgattttttatgtgtaagatttgataaattgaatgagaaggtatttaatgattatttaacgagtattgatgaatggttattaagatttttttgtttttagaggagatttttttataaagtggtatattagtttgaaagggtagatttatttatgtttagattttttcgtttgtttgttttatttttaattttagattattggttattaaatgaggttgatatattggaaaataatgttttatgggcgagtggtaaaaaataaaatggaggtattagttttgtttttaaatttaaatttgttagttttgttagattttaaaggttttgattttttatttagttggaagttattagtgttttttaaaggtattttattgataaggtaaatttatttaatgtgtgagttgttgggttaagggagatggattttttttttggatgattttttaattttttattattttgatagttaattaaatagatataatatttaataaaaatgtatattaatttgtttttgttattgaaagttatttgaaattgtattaaataaaagttataatagattgttttttgataaagataaatttaattatattttgtttgtaaaaaaatataaatggtttatgttttagttaggttataatgtaagatatagttaattataagaaataagtgggatagagggggaaagaaaaaattaagtgaaaaagtttattgaagtattttattaaggttaagaggttatttgttattttagtttttttatataaatgtttgttgtaaataattaaatatatttacgttatttttttaaatattttttttgggggaaatgattggtaagtatttgtatttttttaatttttagttagttcgtagaatttataagaattttgtttagatgataaaagaataggagatattattgttattttaagaatttgaagggtgtataaatattatgaggttaaaggtttatttagggttgtttaaaagagtttaagtgttagtaatgagatggagttaagtaaaagaaaatatgttggatagaggaaatttattttaataggtgattatatagatattatagacgcggaaaagttttattgttttaattatatgtaattagttagataaagtattatagaatatagtggtttatggaggatatgttgtaggtttgtttagaaatttttatttattagggtaagtggtaggttgaaagttagaagttataatttttagtttttatttatgatttatgtaaaatttatggttttaggttattttgatttttgtatttttattagttaaagtaagttaataatggattttacgattgtattttgaagattttaatgttaaaatattttaaataatgattttttaaattgataaattaaatagtttttatgatatttttttttttatttttaatgtttatagaataaaatattagtgatattattttgatagttttttaagtaatatatttgatttttaattttggttgaagtataatgtttttttatatatgaataaaaagatgtgtattagtatatttaagttgtgtgtgtatttatgtgtatgtgtataaaaatgaagtttgtttaagataaaatattatattgaaagtaaataaaatttatatttgtaattattataaattgtttttgatagtgttaatgtttttaaaatatgataatatattgtagtttatttttattaatttatttttaacgtttaatattttaaaattttttgaaatgttataatagtttttaatatttgtattgattaaattttatgttatttaaatat

SEQ ID NO: 297 - DNA, 6071 bp, Artificial Sequence
  chemically treated genomic DNA (Homo sapiens)
tattatttgttttttggtttgttaaatttaatttagtgggtagtatgttaggaaaggggtttagtttaaaaggataatatgttttgtgggagaaaataatatgtagttattgttaaatgttttaattttgtattattttgttgtttgttttttgtgtttatataaataattgttttagtttatttattagaataaatattataatgagaaggtcgatgttttagatttttttttttttttattagtaaataaatttaagtgttttattttggttattgttttaaattaagattgtaattttaaataggtaataagtttttagttttaaattttagatagaattttaaggataatttaaagttgttattgatttttgatgaattgtattgtgattttgataaagttattgttttgttagtgaagggtattttggtagtttttataagttaatagtttaggaaattaagggggaggttattgatttttgtttgttgagagtttagtagtgtaatttagttttaaagtaaaattttgagtttatagtattttaaattaaattatttaataatttggaaaatttaaagtaataattttaatgttttaagtttagttgtatagagtttttattataaggaatatagggttatttttgttggaagaaatgtttttttggttttttttttttatattttatttattttggagtttaaaaaggtattaaagttaggttttatggtgtgtgttttttgttttaggtatttagaagtttgaggtaagaggattatttgagtttagttatttaagataagtttgggtaatatggttagatttgtaattttagtagtttgggaggttaaggcgggcgattatttgaagttaggagttggagattagtttatttaaaatggtgaagttttatttttattaaaaatataaagaaattagttaggtgtggtggtatatgtttgtaattttagttattggggaggttgaggtaggagaattatttgaatttaggaggtagagtttgtagggagtcgagattatgttattgtattttagtttgggtgataagagcgagattttattttaaaaataaataaataaaaaaagatattagaatttgaaaagtttttggtagttaatattttacgtgatagtttttatgaaggtaagtttttaggtagagtaatgtgattatatttagaataggttaggagttgtagtatttgaagagttttttttagagttttttaatttgttttttcgttttaagtagtggagaaattgaaaggtagggaagttagtaaaggggaagagttgagatttgaaatagagttttttttgattttaaattaagtgtattttgatttgaagtttggagttagtatatgttgggaatgttgattagtattgttatagatattgtcgttttgaggtgagtatatgtgttgttaatttttttttttggtatttaggaagaatgggggtttttttttgtggttttattgatttttttattttgttattgtatatattgagaaataaagttaaatagtaaaaggagtttgtagtttaatgtgagatttattttttttttatttgttttaattttattaagttgtttttttttatttttagggttaatgttataatgaaattggaaataagtttttttgtattgtgaatgtgaattgaggtttttataagtaaattgtgtttttgtttttttaagtagagaagtatggtaaataattataagtgttttgtcggggttttaggttttttatttatttttttttagttttggttttgttttttatgtttaaagtaagggaggataatagatttggtgtgtgtgtgattgattttttagaaatgttaatttttatttttattttggagaatgaattgaagtgtttttttgtttttttatttaagggaattatttttaataataaatttttttaagtgggtttggaggggggatagagaattggtgatttgttttggtaattatgttgttttttggagttagttttaaatattttagtaaaaatgtttaaggttttttaatttttttggtttgttttattttaatgtattattttattttatttttttatattttgtacgtataaattaatagatatttttaattgaataagtgaaaatagtgggtgagtttaaagatagatgtttcgttttttttattttgatgattatttttaaaattttaatgtgtatttgatataaaatttaatgttaatttatatatttatttttttttttaagtatagaagttttagaatattttaaatttagtaatttttttaatatattatcgttgtttaggattttgtttttattttgtttgttatatttttagttaaaataatagttattattatttttaaagttattaatttcgatttattaatatatttattgaattatttggttattttgtatatttattataattttttttttaggttaataatttatttttgttaagtgtatttgttaataatttttggagaatttgtaagtagtatattttttttgttgatttgaagatatttttattttatttttatttgaatgatagttaaatgtggttagagtgtaaaggttgatagttattttttattagtatttgggagtggtgatttttttttttgtgttttgtttgtttgtttggtttgtttggtttttgagatggagtttcgttttgtcgtttaggttggagtgtagtggtataatttcggtttattataattttcgttttttaggtttaaacgattttgttgttttagtttttagagtagttgggattataggcgtttgttattacgggtttggttaatttttgtattgttattagagacggggttttgttatgttggttaggttggttttgaatttttgattttaggtgatttgttaattttgtttatatgaggaagttttttataaattttagaataatatttgtaaagatggtggtagggtattaatgttaataattttggtaattatattgggtttataagtaaatattttaatttttagtatttatatattgaaatatttaagtataagggagtgtaatgtttttagtttgtttttaagtggtttagataaaaatataggtagatagagaaaaagaaagtgatttttataaatggatgaattaattggtgaatttagttaaatgatattaatagaattatttgaatagttttgtaaataaaaatgtttttaaatttgaataaaagaaagtattgagtttattaataaaaaaatatgtatatgaaattaagtgttaatttaggattttttgaagaagtaaattgagttgtgtgttgaataataataatgaaatagtcggtggatgttagtgataagaatattttagtgtaaaggtttaatgatgggaatgaatttagtatgtttaaagaatagaaaaatggtcgatgtagatataatgtagtggacgaagagaagagggtagagagataggagatagaagtttatgtagagtttttaaagttagtataaagttttgtaatttaatgaatttggattttattttgagtgatgggtaattattgaatagttggggtagtaatgtgatttgatttatattgtataaagattattttttttgttatatagagaaagaattttatagggtatggttggaagtagtaagattagaagtgaaaagtgataagtttggtttagttttatggtagtgaatatagtagaggatagatgatttgttatattttagaggaagttaagttttttgaatttgttgatagattgaatgttgagagggagaggggtgtttttaaataattgttaaatttgttttttttattatttatttatttatttgaatatttaggtgtttattgtgtgttaggtattattttaggtattggagttatattaatgagtaaagtaaagtttttgtttttatggagattaaattttagtagaagagataggtagtaaagatgattaataagtaatatatatgtagtttaaaatgtatgtttatgtatatttaggatgttttttaatgttataaaaaatgaaagcgttaaggagaaagggaaagggtttaaggagatttaggttagtttgaggagggtagttaaggaggatttttattgaaaggtgattattttaagaatgtaaagagatgatggatgtaagtgtttagtattgtatgtgatatattgttttttagtttttgagtattattttttttttttttttttttttttttttttttgagatggagtttcgttttatcgtttaggttgaagtgtagtggcgtgattttagtttattgtaatttttgttttttgggtttaagtaattttattgttttagttttttaagtggttgggattataggcgtgtattattatgtttggttaatttttatatttttaatagagatagggttttattatatttgttaggttggtttcgaatttttgatttcgtgattcgtttattttagttttttaaagtgttaggattataggtttgagttattatattcggttttattattattattattttgatatagggttttaattttttatttaggttggagtgtagtggtgttattatggtttattgtagttttgattttatgggtttaggtagttgttttattttagtttttcgaatagttaggattagaggtatttgttattatatttggttaattttttttatttttttttttttgtagaggtggggttttgttatgttgtttaggtgggttttaaatttttgggttaaagcgatttttttatgttggttgtttaaagtgttgggattataggtaagagttattatattagtttttgtttagatattatgatgaagattgaggatggtagtttttgtggagtataattttgattgtatttgtgatgttgtatttattttttggaatataagtagattattaggtgaatggttaaagaatttggaataagtttgaaagaaatataggttttggtaaggtaatggaaaggtatgtgtgaaatatttatttttaatagaggattaatttaataatagaaatatatttttttttagaaataatttgttttaaaggttaggtatggtggtttacgtttgtaattttagtattttgggaggttaaggcgggtggattatttgaggttgggagttttagattagtttgattaatatggagaaatttcgtttttattaaaaatatagaattagttaggcgtggtggtatatgtttgtaattttagttattcgggtggttgaggtaggagaatggtttgaattcgggaggtagaggttgtagtgagtcgagattgtgttattgtattttagtttgggaaacgagtgaaattttattttaaaaaaataaataaataaaaatttttataaaaagttgttttttttttaagtagggaagtttgattttattggtattttgagatggaggtttttgggtaaaagaagaattttatgggggtattttgagatgagtatgattaatttagttaagagatggggaaggtttaagttttgttttttgtaggtggaatggagaagggtaaagggtttgaattttggttgtgtggtgtgaagaatgattggttttaaaatagatttaaaatgaaaagattaaattgattaatgttttttatgtttttaaaaaatgtggttgataaagcgtttttgtgtttttaaagggagtttggatgaataggttttggtattgtatgtattgtattaaatatttggagtggtaaaataatttttaaaatatttttagtaattttatttttattttatttgtaggatgaaaaagtaaatttggggattgttgattaaattagtaaattatatggttgtttgcgtagattgattgttatgcgaggtagttgtgttattttttttttaggatatgttgttgtatttgatgttagtgttttgaaatatttattttttagttaatagtaggtgaagtaattatttttagttattatggt

SEQ ID NO: 298 - DNA, 6071 bp, Artificial Sequence
  chemically treated genomic DNA (Homo sapiens)
attataatgattagaaataattgttttatttattgttgattagaaaataagtgttttagaatattggtattagatataatagtatattttgaaagaaaaataatatagttatttcgtatagtagttagtttgcgtaaataattatatggtttgttaatttaattaataatttttaaatttatttttttattttgtagataaaatgaaaatgaagttgttagaaatattttagaaattattttgttattttaaatgtttaatataatatatatagtattaaagtttatttatttaggttttttttaaaagtataaaaacgttttattagttatattttttaaaagtataaaaaatattgattagtttaatttttttattttaaatttgttttaagattaattattttttatattatataattaaaatttaaattttttgtttttttttattttatttataagagataaagtttagattttttttattttttgattagattgattatatttattttaaaatatttttatgaaattttttttttgtttagaagtttttattttaaaatgttaatgaagttaggtttttttgtttaaaaagaaaataattttttataagagtttttgtttgtttgtttttttgagatggagttttattcgttttttaggttggagtgtaatggtataatttcggtttattgtaatttttgtttttcgggtttaagttatttttttgttttagttattcgagtagttgggattataggtatgtgttattacgtttggttaattttgtatttttagtagagacggggtttttttatgttggttaggttggtttggaatttttaattttaggtgatttattcgttttggttttttaaagtgttgggattataggcgtgagttattatgtttggtttttaaagtaaattgtttttagggaagagtatatttttgttattaaattagttttttattagaaatgaatgttttatatatatttttttattgttttgttaggatttgtattttttttaagtttattttagattttttagttatttatttggtgatttgtttatgttttaaaagatgaatgtaatattataggtatagttaggattgtgttttataaaaattattatttttaatttttattataatatttagataggaattggtatggtggtttttgtttgtaattttagtattttgggtagttaatatgggaagatcgttttagtttaggagtttgagatttatttgggtaatatggtaaaattttatttttataaaaaaaaaaaaataagaaaaattagttaggtatggtggtaaatgtttttagttttagttattcgggaggttgaggtgggataattatttgagtttatgaagttaaggttgtagtgagttatgatggtattattgtattttagtttgggtgaagagttaagattttgtgttaaaataataataataatagggtcgggtgtggtggtttaagtttgtaattttagtattttgggaggttgaggtgggcggattacgaggttaggagttcgaggttagtttggtaaatatggtaaaattttatttttattaaaaatataaaaattagttaggtatggtagtgtacgtttgtagttttagttatttgggaggttgaggtagtagaattgtttgaatttaggaggtagaggttgtagtgagttaagattacgttattgtattttagtttgggcgatagagcgagattttattttaaaagaaaaaaaaaaagaagaagaagaagaagtagtatttaaaaattgagaaataatgtgttatatatagtattgaatatttatatttattatttttttgtatttttaaaataattattttttagtgaggattttttttgattattttttttaaattaatttggatttttttaaattttttttttttttttttagcgtttttattttttgtaatattaaaaaatattttaaatatatataaatatatattttaggttatatatatattatttattaattatttttattgtttgttttttttattagaatttaatttttatgagggtaggggttttgttttatttattgatgtaattttaatatttagaataatgtttagtatatagtaggtatttaaatatttaaatgaatggatgaataataaggaagatagatttgataattatttgaaaatattttttttttttttaatatttaatttattaataagtttagaaaatttaattttttttaaaatataataaattatttgttttttattatatttattgttataaagttgggttaaatttgttattttttatttttggttttgttgtttttagttatgttttataaaattttttttttatatgataggaagaatgatttttatataatataaattagattatattattgttttaattatttaatggttatttattatttagaatgaaatttaaatttattggattataaagttttatgttggttttaaaagttttatatgaatttttgttttttgtttttttattttttttttttcgtttattatattatatttatatcggttatttttttattttttgaatatattgagtttatttttattattgagtttttgtattggaatatttttattattgatatttatcgattattttattattgttatttagtatatagtttaatttatttttttagagagttttaaattaatatttaattttatatatatatttttttgttaatgggtttagtatttttttttatttaaatttagaaatatttttatttgtaagattatttaaataattttgttaatattatttagttaaatttattaattaatttatttatttataaaaattattttttttttttttatttatttatatttttatttaaattatttgagagtaagttggaaatattatatttttttatgtttaaatattttagtgtgtaaatgttaagagttaggatgtttatttataagtttagtataattattaaaattattaatattaatattttattattatttttatagatattattttaaaatttatgagggatttttttatataaataaggttggtagattatttgaagttaggagtttaagattagtttggttaatatggtaaaatttcgtttttagtaataatgtaaaaattagttaggttcgtggtggtaggcgtttgtagttttagttattttggaggttgaggtagtagaatcgtttgaatttgggaggcggaggttatggtgagtcgggattgtgttattgtattttagtttgggcgatagagcgagattttattttaaaaattaaataaattaaataaataaataaaatataagaaaagaaattattatttttaagtgttaatggaaaataattgttaatttttatattttaattatatttaattattatttaagtaaaggtgaaataaagatatttttagattagtaaaaagagtgtattatttatagattttttaagaattattaatagatatatttggtaggaatgaattattaatttagaaggaaaattgtgataaatatgtaaagtgattagataatttaataaatatattggtaaatcgaaattaatagttttaaaaataatggtaattattattttggttgggagtgtaataaataaaatggaaataaaattttagatagcggtaatatattgaaaaagttattgaatttgaagtgttttaagatttttgtatttaaagaaaaaaatggatatatgaattgatattagattttatgttaagtatatattaaaattttaaaagtaattattaaaataaggaaaacgaaatatttatttttaaatttatttattatttttatttatttaattaagagtatttattgatttgtgcgtataaaatgtgagaaaatagaataaagtagtatattaaaatgaaataaattaaaaaagttgaagagttttaaatatttttattgaagtgtttgaaattgattttaaaaaataatataattattaagataaattattaattttttgttttttttttagatttatttaaaaagatttgttgttagagatggtttttttggatggaaaggtagggaaatattttaatttattttttaagataaagatggaagttaatatttttagaaggttagttatatatatattaagtttgttgtttttttttattttagatatgaagaatagagttaggattggggaaaggtaagtgagaagtttggggtttcgataaagtatttgtggttatttgttatgtttttttatttggggagatagaagtatagtttgtttgtggaaattttagtttatatttatagtgtaagaaaatttatttttagttttattgtggtattagttttaggaatgagagaggataatttaataaaattaaaatagatgaaaagaaaatgagttttatattagattgtaaattttttttattatttaattttgttttttagtatgtataatgatagaatgaaagaattagtaaggttatagaaggaaatttttattttttttaagtattagaaagaagggttaatagtatatgtatttattttaagacgataatatttatagtaatattgattaatatttttaatatgtattagttttaaattttaaattaaagtatatttaatttggagttagagaaggttttgttttaaattttaattttttttttttattgatttttttattttttaatttttttattgtttaaaacgaaggagtagattaaaaagttttgaaaaaaattttttaaatattataatttttaatttattttaaatataattatattgttttatttagaggtttgtttttataggagttgttacgtaaaatgttggttgttaggggttttttaaattttagtatttttttttgtttgtttgtttttgagatggagtttcgtttttgttatttaggttggagtgtagtggtatgatttcggttttttgtaaattttgttttttgggtttaagtgatttttttgttttagtttttttagtagttgggattataggtatgtgttattatatttggttagtttttttgtatttttagtaaagatggggttttattattttggataggttagtttttaatttttgattttaggtgatcgttcgttttggttttttaaattgttgggattataggtttggttatgttgtttaggtttgttttgaatgattgggtttaagtaatttttttgttttaggtttttgagtatttgagataagaggtatatattatagggtttggttttagtatttttttaaattttaaaataaatagaatataaagaaagaaagttaaaaagatattttttttaatagaaatggttttatgttttttatgataaaagttttatgtagttaagtttaaaatattgaaattgttattttaaattttttaaattattaaataatttaatttaaaatgttgtaaatttaagattttattttaaaattgggttatattgttaaatttttaataggtaaaagttaatgattttttttttgattttttgggttattgatttgtaaaggttattagaatattttttattgatagggtagtgattttgttaaggttataatataatttattaggagttaataataattttggattgtttttgaaattttatttagagtttgaagttgagaatttattatttgtttgagattataattttgatttagaataataattaaagtggaatatttaagtttgtttattgatgaaggaagaaagaagtttaaaatatcgatttttttattgtggtatttattttaatgagtaaattagaataattatttgtgtaaatatagagaataaataataaaataatgtaaaattaaagtatttaataatgattgtatgttgtttttttttataaaatatattatttttttaaattaggttttttttttaatatattgtttattggattaaatttaataaattaaaaagtaagtgatg

SEQ ID NO: 299 - DNA, 6109 bp, Artificial Sequence
  chemically treated genomic DNA (Homo sapiens)
  unsure 214, 2796..2797, 4347: n is a or g or c or t
ttataattgaagtaggttttttgttatgggggcgggagggttgtgggggaggaggttgtgggggaggaggttgtggttgattttagggggcggcggtggggttgggagagtttttttttttttttaaagtattttttcgaagaggggtcgtatttgtagggatgtcgatttgagtttaatttaggaagagttttttagtagtaacgcgtttgtntcggaggcggttatggttagaaggcggtgtggggattttattgtttttttgggttggtttttttacggtttagggatttcgtaggggttatagttgttcgttcgtgtttgtttatttttacgggtattataggagagtttaaacgtggacggttttattaaatttttattatatttttatttagttgattttgttatttttttattttatagttggggaaacgggttaagatatttgtttaagcgtatttagtatagataggaaatgttgagtgtgaattaggggtttgtgatttcgagatttttagtggggtttcggttgttttatcggagatttttggaagttgaggtggtgagcgggatcgggggatattttcgagggaagttggaatcgcggttttttttttggaatttaggggattcgtggatttggatgagttttatttggtattgtgtcgtgtttttaattaaaatttagttttttttgtaattaagaacgtgggtatttttttagggtgttagtcgcgtttgtgtcgttgatatcgatagagttgttttagggttattttggtgggttttaagtagttacgttttgggagggtttagggttttataaaagatttttttcgttttttatttattattacgttttttaatgcggtttttacgttttattattttaaattatggtttaatgaaaagtatagtgtttattatattagaatgttttaacggggtggtagttgtattttggtaaaatgggttttttttataattttgtgaatttatttgtttattagatgtttaaggagtttatatatcgggaaggtgaagatttcgattttagtttcgtgtttttattggggtgttttcggtttgcgtttcggttcggattttttaggtagatttgttttttttgggggtggtaggagcgtttagtaattgtagttttagagttttggaattttgtattattttgtattaggtttttttaaattattttagtttttcggttatggtatttttttcgtggttttgggtttgtttagtcgtgttttgagttggggagtggttgagtatttagttatgagtcgttttatttgtattgttttgaatattcggggtaggtttttttttgtttttattttcggtttttattttttttgtggtttattttaattgtttatattttatttaggattagaaagtcggggtaaggttttttcgtatatgatattgtttagtattttttggagcggtttcgcgatttatatttttttttttaggttttgtgattggggatggtatttttgtgggtttttttttttttttgtaaagtgggttggtatgagatttatataaaattatattattatttatttattgatttatttatttatttatttatttatttatttatttatttatttatttatttatttatttatttatttatttatttatttatttatttatatatcgatttatttatttatttatttatttatttatttatttatttatttatttatttatgtatttatttatttatttatttattaatttatttatttatttatttttttattttttatttatttatttatatatttatttatttatttatttatttatttatatatttatttattatttatttatttatatatttatttatttatttatttatttatttatttatttttttatttatttatttatttatttatttatttatttatttatttatttatttatttattttttcgtttatttatttatttatttatttatttatttatttatatatttatttatttatttatttatttatttatttatttatttatttatttatttatttatttatttatttatttatttatttatttatttatttatttatttatttatttatttatttatttattatttatttatttatttatttatttatttatttatttatttattaatttatttatttatttatttatttagtagtgaagggtgtgtgtgttgggggtgggggggtttttatatgttagaagagaaggtaaatataagatattttgtttgaaggaaggtttttttatttatttttatatggcgttattttttttattgtttttttatttttttttagttttttggttattttatagatttattaaagtttgttttagggtttttttgtttatttagggatagtttttttaattgttttatgggttttatatgttgggttatgttgatggaacggggtttttataggttttagagagtaggattaggggttgttttggatatcgaaagaattttagtaggttttaatagggtttttaggaaggaaggaaaggttttttttgtttcgagaggttgggtgttggttgtagatagtagaggtttttgggagaagtcgaggttttttttgttgtttttatttttgtagttattttttttttagttttttattttttggtcgtttagttttgaaagttatagttaacgtttgtttttttataagtattaattgttcggtttgggggagaggaggtcggtagtggggaggtggggagtggnntttatattttaggtaagacggggttaggcggggagtttagggttttattgcgaaagtggaagtgttttatttgtggggggcgtaggtgtaggtttcgaatatttgttttagggttgggggtagggttgtttgttttttatttcgggtggggggagttattatttttatttagggtgttgttttgttgttttacggagtgggggttgtgttttttgagatttttagtttttcgattttgagatttttattgtatatagttggggaataggtattgatatagattaattttagttatatgtttacggtggtttcggtttatgtggcggtttagagtttttgttgtttttattttcggaaacgttgtaggagttgacgtcgttaggatcgtgtattttgtataaatgaggaaattaggagggttagggtttttaggatttttattgtgaattttattttgagttagagtatagggaatagtaggggacgtggggatcgaatgatggtattaggggatgggtttcgggttggtaggaatgttttttttagttttagttttgggggtagaacggtcgattatttagggtaggggaggtttcgggtgggtttggcgtttgggaagttttttagtaggaataaatatatttttattgtaagttggatatatacgttggtatgtagtttgttgttattaattcgagaaagatattcgattattgggatagggagattcgggatatttggagattttgcggggaaggagtcggtttttatttttgtacggtttgaattattaattgcgtgtaaacgtgatttaaaatttaaattaaattaaattaaaatagtatagaagttcgtgagtcggttcggggtttgcgggttttatatttttggtttgtttgaggtcgggaaatttttagttatggtattagaaaagttatcgaattagggttgtagggtcgaagggttattgtttttttttaggaagtttttgttttttgatagttgttagggagttttagaaagtggtttttttttttagtatttgggatgtgttttatttttttagtttaacggtcgttagaaaggggttttaggattttttttagggtttaagtagttttaagagtgttttgaggtggtttttggaattttttagattggagaagttatttattttcgattttcgtaaattttaggttgtttatcggaggcggtcgttggggcgtggggtgagggtttttttgaggtattttcggagagtgggggagttttgttgtttttatagagggttaggagttttgtgtacgaggttaagtagagagagagggttttttttttagtaggcgggaggtattttgaggataggttaggtgtttaagaatttcggagtaggggttgaggagaggttggttagaggtttcgttttgtttaagggtatagttagtagatataggaatacgggtagggtggtttttggagcgggggtaaattaaaaggggtgttggggaaagttcggttgattgaaggttagcggagagggaggatatttntagatattttaggttgaaggaagggttaagttttggggggaagatgggtgggcgggataggttaagggttttgggttaagatggagttgtttttaagtttgtatatttgttttggggtcgaggaaatatatgtttagtggttacgttgtagggtttagggtgggtgggacgttattagagttgtttggaagaaggaagttgttgaaaggttaaatcggaatggttcgagggaaggtcgcgtaggttagggttttagatggtttttgttagggaagtggcgggcgtagttgtaggttttcggtttcggtattattacggggatatagttggttgttttattcgtaggttgtagggagattttttttagtttgtagttttaggttcgtttcgcgttatatgagttttagggtttttattttttttttagggtagaggatatttagttggtggtcgggagggtttcggttttttagggatagaggtttaattttaggacgttttagttggtttagtttttttttttttttttaaggttgtaggaggtcgggaaaggtagttttggtagaggtttgttttgggttttaggttggtttttgagggtggttttttttatgtcggttttaagattgagggatagggtagttagtttagtttcgggatttatttgtggttttatgttttagacgtattttgtgttggagagcggttttttggtatttgtcggttgtttcgtatttcggggttttaggaagggcggtttaagtaagaggttcgaggggaaggtggtggggtgggggtagagagcggtagtcggtgtcggggttgtgattttttagagtttcgcggggtttgtttagtttagttgatagtgtcggtacggatggtcgtgttgatttattttagatattaatagggttattttataggtaggttttgtatagttggggtaggtgggttggtgagggtttggtaggtgttagttaggtgttttagttttatttagaggtagatgttggagggcgggtttgtttattttcggtaaggaagggtgggttgggtttttttggggggtggaaggttcgtagtcggggaaatgaaggggggggttttagaaaaagagtttttttttttttggaatggtttttcgggtgtgatattttatagtaggttggatgaggaaattgaggttagaggggagggtattggtttaagatttcggtgaggaggaaatggatttaattttgggtttttgttcgaggaacgattttagttagggtagtgggggtttacggggaatttgggtttgtttttttgggggtttcgggttttggggaggggtttagtttagtaggacgttagttattgttgatattttttattcgagtttgcgaagttttaggataaggattttcggacgttgggggttgtagttgtaggttggtggtttcgatttttagtggttttcgtggttatatttttagtagtcgtcggaatttttaggagtttatagtttttcgtttcgcggggtttttattgaggtcgttaggtttaaggtttgattgtatttttgatatttatatatagaattcgggatcgaggggtgtttttatttttggagattatattttttgagtaggttttggcggcggttgtttgaggttgtttttatttgtagttgttcgtggggttttagggttattttttataagggttttagatgtgagtaggaattttttaatttcgggtgttcggaatgtaaagg

SEQ ID NO: 300 - DNA, 6109 bp, Artificial Sequence
  chemically treated genomic DNA (Homo sapiens)
  unsure 1763, 3313..3314, 5896: n is a or g or c or t
tttttgtatttcgggtattcggggttgggaagtttttgtttatatttggggtttttgtgggggatggttttggggttttacgggtagttgtaggtgggaatagttttaggtagtcgtcgttaggatttgtttagggaatgtggtttttagagatggggatatttttcggtttcgggttttgtgtgtgagtgttaggggtgtagttagattttggatttgacggttttagtgagagtttcgcgagacgggagattgtgagtttttgaaggtttcgacggttgttgggagtgtggttacgagggttattgggaatcggggttattagtttgtagttgtagtttttagcgttcggggatttttgttttgggatttcgtaggttcgggtggggggtattagtaatagttggcgttttgttggattggatttttttttagagttcgaagtttttagaagggtaggtttaggtttttcgtaaatttttattgttttggttggaatcgtttttcggataggggtttagggttgggtttattttttttttatcggggttttgggttagtgtttttttttttggttttagtttttttatttaatttgttgtgaggtgttatattcggagggttattttaggaggagaagggttttttttttaggatttttttttttattttttcggttgcgggttttttattttttaggagaatttagtttatttttttttgtcgggggtgagtaggttcgttttttagtatttgtttttgggtggggttggggtatttggttggtatttgttaaatttttattagtttatttgttttagttgtgtaggatttgtttgtggggtggttttgttgatatttgaggtgagttaatacggttattcgtgtcggtattgttaattaagttgggtaggtttcgcgaagttttaaggagttatagtttcggtatcggttgtcgttttttgtttttattttattatttttttttcgagttttttatttgggtcgttttttttgggatttcggggtgcggagtagtcggtagatgttaggaggtcgttttttagtatagggtgcgtttgggatatggagttataggtggatttcgaggttgaattggttgttttgttttttagttttgaagtcggtatgaggagggttatttttaggggttaatttggagtttaggataggtttttattaggattgtttttttcgattttttgtagttttgagggaaagaggaggggttgggttagttggggcgttttggagttgggtttttgtttttggaaagtcgaggttttttcggttattaattgggtgttttttgttttggggagggggtgggagttttggggtttatgtgacgcggggcgggtttggggttgtaggttggggaaggtttttttgtagtttgcgggtgaggtagttagttgtgttttcgtgataatgtcggggtcggaggtttgtagttgcgttcgttatttttttgataggaattatttggggttttggtttgcgcggttttttttcgggttatttcggtttgattttttaataattttttttttttaggtagttttggtgacgttttatttattttgagttttatagcgtggttattgggtatgtgttttttcggttttagggtaggtgtgtaggtttgagggtagttttattttggtttagagtttttggtttgtttcgtttatttattttttttttagggtttggttttttttttagtttggggtatttgngggtgtttttttttttcgttagtttttagttagtcgagttttttttagtattttttttagtttgttttcgttttaggggttattttgttcgtgtttttgtgtttgttgattgtgtttttgagtaaggcggggtttttgattagtttttttttagtttttgtttcggggtttttgggtatttgatttgtttttaaagtatttttcgtttgttgggaaggaaattttttttttttgtttggtttcgtgtatagggtttttggttttttgtggagatagtagggtttttttatttttcgggggtgttttagaaagatttttattttacgttttagcggtcgttttcggtgagtagtttggagtttgcgggggtcgggggtaggtggtttttttagtttgggaaattttagaagttattttagagtatttttgggattatttagattttagggagagttttaggatttttttttagcggtcgttgggttgagagagtgaggtatattttagatgttgggaaaaaaagttattttttaaagttttttgataattgttagagggtaggagttttttgggaggggatagtgatttttcggttttgtagttttggttcggtggtttttttgatgttatggttgggggtttttcggttttagataggttagaggtgtggagttcgtagatttcgggtcggtttacgggtttttgtgttattttggtttgatttgatttgagttttaggttacgtttgtacgtagttaataatttaagtcgtgtaggagtaaaagtcgatttttttttcgtagggtttttaggtgtttcgggtttttttgttttaatagtcgagtgtttttttcgagttggtgataataagttgtatgttagcgtgtgtgtttagtttatagtggggatgtgtttgtttttgttggggaattttttagacgttaggtttattcggggttttttttgttttgggtggtcggtcgttttgtttttaggattgaggttggaggggatatttttgttagttcggggtttattttttggtgttattattcggtttttacgttttttgttgttttttgtgttttggtttagggtgggatttatagtgagggttttgggggttttgatttttttggtttttttatttgtgtagggtgtacgattttaacggcgttagtttttatagcgttttcgggagtggagatagtagaggttttgagtcgttatatgggtcggggttatcgtgagtatgtggttggggttggtttgtgttagtgtttattttttagttgtgtgtagtgagagttttagagtcggggaattgagggttttagggggtatagtttttatttcgtgaggtagtaggatagtattttgggtgagggtggtggttttttttattcggggtaggagataggtagttttgtttttagttttgaggtagatgttcgaggtttgtatttgcgttttttatagatgggatatttttattttcgtaatgaggttttgagtttttcgtttggtttcgttttgtttggggtgtgggnnttattttttatttttttattatcggtttttttttttttaggtcgggtagttggtgtttgtggggaagtagacgttggttgtggtttttagagttgggcggttaggagataaggggttggggaggaagtggttgtagaggtgggggtagtaggaggggtttcggttttttttagggatttttgttgtttgtagttagtatttagtttttcggggtaggaggggttttttttttttttttaaaagttttattagggtttattggggttttttcggtgtttaagatagtttttggttttgttttttgggatttataggagtttcgttttattaatatggtttagtatgtggggtttatagggtagttggggaaattgtttttgggtgggtagaggggttttaaggtaggttttggtgaatttgtaggatggttagagaattggaggagggtgagggggtagtgggggagatgacgttatgtgggggtgggtgaggaggtttttttttaggtagggtgttttatgtttgtttttttttttagtatgtaggaatttttttatttttaatatatatattttttattgttggatgaatagatgaatgaatagattgatgaatgaatgggtgggtgggtgagtggatgggtgggtagatgatgggtggatgggtgggtgggtggatgagtgaatgggtggatggatgggtggatagatgggtgagtgggtggatagatgggtgagtgagtgagtgggtggatgggtgggtggatggatagatgtgtggatgggtgggtggatggatagatgggtgaatgggcggaaagatgggtgaatgggtggatggatgaatggataaatgggtaaatgggtgggtggatggagagatgggtgaatgggtgggtaggtggatggatgggtgtgtgggtgaatgaatggtggatgggtgtgtgggtgggtgggtggatagatgggtgaatgtgtggatgggtggatagaggatgggaggatagatgggtggatgggttgatggatggatggatggatgggtgtatagatggatggatgggtgaatgggtgggtagatggatagatgggtggatgggtcgatgtatggatggatgggtagatgggtgggtggatgggtggatgggtggatgggtgggtggatgggtggatgggtgggtgggtggataggtggattaatgaataagtggtaatatggttttatgtaagttttatgttagtttattttatagaggagggaggaggtttataagggtgttatttttagttataaagtttggagagaggaatgtaagtcgcgaagtcgttttagaggatgttgaatagtgttatgtacggaggagttttgtttcggttttttggttttgaataaggtgtggatagttggggtgagttatagagggagtgggggtcgggggtggaggtaggaaaaaatttgtttcgggtgtttaaggtagtgtaggtgaagcggtttatagttggatgtttagttattttttagtttagggtacggttgagtaaatttagaattacggagaaggtgttatggtcggagggttggggtgatttggggaaatttggtataaagtggtgtaggattttagggttttgagattgtagttattgggcgtttttgttatttttagaaagagtaggtttatttggggagttcgagtcgaggcgtaggtcggagatattttaatgagagtacggaattggaatcggggtttttattttttcggtgtgtggattttttgggtatttagtaagtaaataagtttatagaattatgaaggaaatttattttattaaaatatagttattatttcgttagaatattttggtgtagtgagtattgtgttttttattaagttatgatttaaagtggtgaggcgtgggaatcgtattaggagacgtggtggtgagtggaaggcgaggggggttttttgtggagttttggatttttttaaggcgtggttgtttggggtttattaaagtggttttggggtagttttatcggtgttaacggtataggcgcggttgatattttggggaggtgtttacgtttttggttataggaaaggttaaattttggttagagatacgatataatgttagatgaaatttatttaagtttacggattttttgaattttaaggaaagaatcgcggttttagtttttttcgaaggtgtttttcggtttcgtttattattttagtttttaggagttttcggtgggatagtcggaattttattgagggtttcgaagttataggtttttggtttatatttagtattttttgtttgtgttgggtacgtttgggtaaatgttttgattcgtttttttaattgtaaagtaagaaggtaatagagttagttgaatgggggtgtggtgaggatttaataaaatcgtttacgtttggatttttttatggtgttcgtgaaggtgggtaagtacggacgggtagttgtgatttttgcgagatttttgagtcgtgaaggggttagtttagggggatagtggaatttttatatcgttttttggttatggtcgttttcggngtaggcgcgttgttgttagaaagttttttttaaattgagtttaggtcggtatttttgtagatgcggttttttttcggaagagtgttttggaagggagaaagggtttttttagttttatcgtcgttttttggagttagttatagtttttttttttatagtttttttttttatagttttttcgtttttatggtaagagatttgttttaattgtga

SEQ ID NO: 301 - DNA, 5742 bp, Artificial Sequence
  chemically treated genomic DNA (Homo sapiens)
taagattttaagagtagttttgtaggattatattattttttgtttttttttttttttgattttaatgttatttattttaataatagttttatataaaatttttattagtatatattatagtagatttaaggttttgttttaaaaatggtgttagttttttttaatttggaagatatattgttttttttgaatatgggttaagaaaatgtataatttggtattaatataagagttgaagatattttaaatgtattgttttatttttataagataaaaaaaattttaagaattaaaatgttattaatagatttgttttttattaaaaagtaaaattgtatttgtttatattttatgaaagtgtttaattatgaataattttgaaatgtaatttttaaaaatgtaaatagtaaaaatgttgtatttaaaataaatttggaaaggtagaaaaataaaaaatatttagaagatagagtttttggtgaaagttaagatattttatttttgaataatttagaattttttttgtattttatagtttagttttaggtattaatttgaaataattttggaattttaaatttaatatttttcggaataaagtagttttttttttttgttttatgagtaaatggattaaatattagggaatggtattgtttgggtttttgaattaagattgaaagagatgaaattttatatgatatgtataaatattagagaatttattttgatttaataaaaggttgaatttgttttatattttgtgagaaaatggttttttttttttgaaaatgttattttattttaataatagaaagttggtttttttttagggtgtggtgttggcgggggatagagttgttatgaatatggtatttatgaagattgttgttatatttattttttaaaatgtattgtggtaggaaatttagaacgtagtgagagaaaataaatgtttgattttaaaatataaggtcgtatttaaagtagaaggtaaagtatagaatagttgatagtataaattttttatttgtaattttgtagttttttaaatttttgtaatatattatttttaaaagttttagataagtggttttataataatttattaataatttaattttttaaaagttttagtaagttaaattttataattttatattttagaaatgatttaatttgatttttttattttttagaatattttttttaaatttttatttgttttttattaattgatgaataatgagatattttaggtatttgtttataaagaaatgaaatttttattttttaggaatttaataaatgaaaagatagaaattaattttaatagaatattattaaagaaattttttagaatggattgttaaaattatttatttgtatttatttggttttattatttgtggtatatttttattttaaagttaaattttaaataatattatagtgagtggttgattttatgtttaattgagattttgaagattgaaaaagattacgataaatatatatttatttttttggttattgtattcgtgtttattattattttgatagtttgtaatgtattgtagtttattttttgggaaggattaaagtagatatttgtttgttttgtttatttagtatttttattttaatttttttttggagaatttttttattttagattacgtgaagttaatgttaaattttattttaggggatgtatttgaatttaatttttattatttaaatagtgttttttttacgtttagagaagagtaagtgatttaaattgtttttataagaatagatttgggatttttgttgtaaatattgaagagtaagtattttttttttttgttaggattaagttggtagtattttttatgaggttattatatggaaataatttgtttgaaaatgaagttataattagaaaatagattttggtaattcggattgatggatttagttttattttaaatggtaagatttaattcgaggttttttgtattaattaataaagtttttaagttagtttgagttggttttgttatttgtagttaaaagaattttgattttaataatgtgataatagtaaaaataaatataattgtttttgaggtttttaatggatttttttttttatatatatgattttatttaatttttataatttaggaaagtatatatttattaatattaaattaatatttattattttgaatatatgttatgtggataagggatgaggaaagttaaggaagtaattaacgtgaaattttatttatatgggagggaagtggaggttatatattttagggtatttaatagatattattaaatgaaagaataaatagtgtgtgggagaggtagtaggtgattttttattaatttttggatgaaaaattaggagataatgaatttcgaataggtagtttaatgagaatggtttaagtaataggatatagagagggagttaggttagatatggggtttttgggaatttttatttcgtgggggggcgggggggtcgtgtagttgttgttagtgggaaagggaaaaaggaaaaggttgagtttggaaggtagggagggaggagataatgtgagttagtgaaaaagggtttttagaatgataagtttggattagagagaggttaagattgaaaatataagttgggtaattattggtatatagatggtagtttaggtttgggtattgtttattagagttttagtatgaagagaagagggggaggttggttattatttttttttaggtaatcgttattttgatgttgagtttttgaaaataggtttttttattcgttttattttttgtttttgattgtaattcggtatttaggaggtattttgtaatatttgtggagtgatcgataatatagcgttagggtattgagaagattttagggcgttagggattggttttataagggtgtttttttcggttttttttagcgcgtcgttagagttgttagttttggttgttatacgggaggtagttttattatgtagtttttattttttaaattagtttatgtttttatattaggtgtaattatagtttgtaacgttttttggggatgttttagaaagatttgagttgaaaaaatatttttgtgttattttaatttaaagtaaaattgttgtttttttttcgtttttttttttttttttggtttatttagcgattttggtcggtcgtgtttaacgggggcgggggtcggaggtgagattttttttatataattttttaaatagttattaattaagttttaaagaaaaaaaaaagagatttagaagtagagacgtggttgttggcgattttaaagttggtgttcgtttttgggggagagcgtattttgggggaggtcgggaggtcgggttagaggttagtttagaggtagagggtaggagcgtttagtcggcgtttcgcgtttttttagttttcgacgttgcgttggtttcgttgagtacgttaggattaaggtcgtttggtggggatcggagcgttaggagtttgtgggaagcgttttagtcggtttttgattgggattcggcgtcgcgtttttgttttggatttgattgataggttttttcgttttttcgtcgttttattattagtttgggtttattttttagggttacgtttatcgtattcgggttggaaagtttggagcgcgttttttttttttttatttttttagtttttttttttttttgttatttggtaaagttgtattttgatttttacgttttggattacgtgtgtgtagttttaagtttatgcgtggtacgaaaatttatttagggtaaaaattattttcgaaaaatcgtttattttaggatttggtgtttatatttaaggttaggaggtgtaggtacgggtgcgtaaagtatgtcgtaagggtgtatagtaaataaaaagtacggatgtaaaatgtaaattttaagtgtaaaatagaaaagtagtattcgttgtcgtttcgtacgttgggttttaaggggtacgaaggtgggtttcggttgtttttgtttagtttcgcgtttttagcgttcggtttagtattcggtatttcgtaggggtttaatgattttttttgaataagtgaacgaattaataaatgaatgaatgatcgttcgattcgattttcgcggtcggtagagtagtcgttggagaggcgggagagagcgagaggttaagttttattatcgcggtcgtcggttggggtagagggatacggagatattcggcgtttcggtttcgtatcgagttttcgcggtgagtgttcgtttagtagttttcgggtattacgtgcgttcgttagagtcgcgtaggtttcgtttcgtcgcgcgcgtacgcgttttgtatttcggtcgtcgggattttgagttaggttcgtttagcgcgtcggttgttttcgcgttcgcgttcgttggggggcgttttttttttaacgggcgcgtttataggcgggtaggcgattcgtagtttttagcgattttattttcgatttcggggcgcgtcgttttttatttgagggtcgacgagtgggggcgggtaggagggtcgagggaggcggaataggatcgaggcgcgaggcgggagtcgagaaagcgagcggtcgaggcgatttttagtgcgcggacgcgggcgcgcgttcgcgtttttttcgtcgatttacggcgagagtttaattttgttgtcgcgcgttattcgtttcgtcgcgtttaataataacggcgttcggggttaggtggtcgagcgcggatagcgtcgttattggttcggtggggagcgcggcgcgttaggattggttggggggcgtggtttcggtcggggcgggggtagggtttcggagggaggcgggtcgggaggcggcgggggcggggttaggtcgaggttcgcgtttttgtgttcggcgcgcgtttttcgttcgtttcggttgtagcgtcggttgtattaataatttagagcggcggcggcggcggtagcggcgggtgcgggtaggaggcggcggtagtagcgggatcgagtagtagcggttatgtatttaagtgcggttgggtagtcgcggtatttttgaggttcgggaggggtttcgggaatatagcgcggaggggacgttagtcgcggaggggacgttagtttcggagtgcgaggaaaaggtgtagtgtttagagcggcggcggcggagttgcgtacggagttgaggagggggtttcggagcgggattgggacggggggggcggttggcgcgagtagttttgggggtggggggcggggtgggcgtcggcggcgcgatgttgggcgttttggagttgttgttgttgggggttgcgtggttggcgggttcggttcgcgggtagaatgagacggagtttatcgtgttggagggtaagtgtttggtggtgtgcgattttaattttacgttcgattttacgggtattgttttgggtatttttgtgcgttttggtagcgttaaggtggttttttttgttattaggagtattaattacgagtcgttcgagatgagtaatcgtattatgattatttatttcgattaggtgagtgtttttttttttcgcggcgtgtagattgggttggtgaaggagggatggatggaagatcgatgttcggttttttttaagggttttgcggaggcgcggggacgatagttcgggatcgatttttgtttattttttttcgttttcgtttcgttatagg

SEQ ID NO: 302 - DNA, 5742 bp, Artificial Sequence
  chemically treated genomic DNA (Homo sapiens)
tttataacgagacgggaacgaaggggagtgggtaggaatcggtttcggattgtcgttttcgcgttttcgtagagtttttggagaggatcgggtatcggttttttatttattttttttttattagtttaatttgtacgtcgcgggaggaaggaatatttatttggtcgaagtagatgattatggtgcgattatttatttcggacggttcgtggttggtgtttttgatggtagagaaagttattttggcgttgttagagcgtatagagatgtttagggtagtgttcgtggggtcggacgtggggttggagtcgtatattattaggtatttgttttttagtacgatgggtttcgttttattttgttcgcgggtcgggttcgttagttacgtagtttttagtagtagtagttttaggacgtttagtatcgcgtcgtcggcgtttatttcgttttttatttttagggttgttcgcgttagtcgtttttttcgttttagtttcgtttcgaagttttttttttagtttcgtgcgtagtttcgtcgtcgtcgttttggatattatatttttttttcgtatttcgggattagcgtttttttcgcgattagcgtttttttcgcgttgtgttttcggagtttttttcgggttttaggggtgtcgcggttgtttagtcgtatttggatgtatagtcgttgttgttcggtttcgttgttgtcgtcgttttttgttcgtattcgtcgttgtcgtcgtcgtcgtcgttttgaattattgatgtagtcggcgttgtagtcggagcgggcggagagcgcgcgtcgggtataaaggcgcggatttcggtttggtttcgttttcgtcgtttttcggttcgttttttttcgaggttttgttttcgtttcggtcgagattacgttttttagttaattttgacgcgtcgcgttttttatcgagttaatggcggcgttgttcgcgttcggttatttgatttcgggcgtcgttgttattaggcgcggcgaggcgggtggcgcgcggtagtagggttgggttttcgtcgtgagtcgacgaagggagcgcgggcgcgcgttcgcgttcgcgtattgagagtcgtttcggtcgttcgttttttcgattttcgtttcgcgtttcgattttgtttcgtttttttcggtttttttgttcgtttttattcgtcggtttttaggtaggaggcggcgcgtttcggggtcgggagtggaatcgttggaggttgcgagtcgtttgttcgtttgtgggcgcgttcgttgggaggggagcgttttttagcgggcgcgggcgcgagggtagtcggcgcgttgggcgagtttggtttagggtttcggcggtcggggtgtagggcgcgtgcgcgcgcggcggggcggggtttgcgcggttttggcgggcgtacgtggtgttcgggagttgttgggcgggtatttatcgcggggattcggtgcggagtcggggcgtcgagtgttttcgtgtttttttgttttagtcggcggtcgcgatggtggagtttggtttttcgttttttttcgtttttttagcgattgttttgtcggtcgcggaggtcggatcgagcggttatttatttatttgttaattcgtttatttatttaggggagattattgaatttttacggagtatcgggtattgggtcgggcgttgaggacgcggggttgagtaaaagtagtcgaggtttattttcgtgttttttaaaatttagcgtgcggggcggtaacgagtattgtttttttgttttgtatttaaaatttatattttgtattcgtattttttatttattgtgtatttttacggtatgttttacgtattcgtatttgtattttttagttttgagtgtagatattagattttgagatgggcgatttttcgagaataatttttattttaagtggattttcgtgttacgtatggatttggaattatatatacgtagtttaaaacgtgaaagttaaaatgtagttttgttaagtggtagggagaaaggagagttgagaagatgaggagaggaagggcgcgttttaggttttttagttcgggtgcggtagacgtagttttgaaggatgaatttaggttggtagtagggcggcgggagggcggggggatttgttagttaagtttaaagtagaaacgcggcgtcggattttagttagaggtcggttggaacgttttttataggtttttggcgtttcggtttttattaggcgattttgattttggcgtgtttagcggagttagcgtagcgtcgggagttggagagacgcggggcgtcggttgagcgtttttgttttttgtttttgggttagtttttggttcggtttttcggttttttttagggtacgtttttttttaagagcgaatattagttttgggatcgttagtagttacgtttttgtttttagattttttttttttttttttgagatttagttgatagttgtttaaggaattatgtggaggaaattttattttcgattttcgttttcgttgagtacggtcggttagggtcgttgggtgggttaggaggaaagaaaggggcggggaagaagtagtaattttattttaaattaaaatgatataaaaatatttttttaatttagatttttttgagatatttttagaaagcgttgtaagttgtgattatatttaatgtgagagtatgaattaatttaagaggtgagagttgtataatgaggttgtttttcgtgtagtagttaagattggtagttttggcggcgcgttggaggggatcgggaggggtatttttgtagaattagtttttggcgttttgggatttttttagtgttttggcgttgtgttgtcggttattttatagatattatagggtgttttttgaatgtcgggttgtaattaagagtaagagatggggcgagtgaaagagtttgtttttaggagtttagtattaggatgacgattatttagagggaggtggtggttagttttttttttttttttttatgttgaggttttggtgggtagtgtttaagtttgaattgttatttgtatgttagtggttatttaatttgtatttttagttttagtttttttttggtttagatttgttattttaagggtttttttttattgatttatattgttttttttttttttgttttttaaatttagttttttttttttttttttttttattgataatagttgtacgattttttcgtttttttacgaggtgaaaatttttaagaattttatgtttaatttaattttttttttatgttttgttgtttgagttatttttattaggttgtttgttcggagtttattattttttaattttttatttaggaattgatgaagaattatttattgttttttttatatattgtttatttttttatttgatgatatttgttaagtgttttgagatatgtaatttttattttttttttatataagtgagattttacgttgattatttttttggttttttttattttttatttatatagtatgtgtttaaaataatgaatattaatttaatgttaatagatatgtgtttttttgaattgtgaggattaaatgaaattatgtatatagggaggaaaatttattagaaattttaaaagtagttatgtttatttttgttattgttatattgttagagttagaatttttttagttgtaagtgataaaattaatttaaattggtttaaggattttattggttgatgtaaaaagtttcgggttaggttttgttatttaaggtagggttggatttattaattcgggttattaggatttgttttttagttgtggttttatttttagataagttgtttttatatgatagttttatagaaggtattattagtttagttttagtaagaaaaaagagtatttattttttaatatttgtagtagaagttttaggtttgtttttatgagggtagtttgagttatttgtttttttttgaacgtggagaaggtattgtttagatgatggaggttggatttaggtgtattttttggaatggggtttggtattagttttacgtggtttagaataaaggggttttttaaaggaaaattagggtaggaatgttgagtaagtagaataaatagatgtttattttagttttttttaaagggtgagttgtaatatattgtagattattagaatggtgatgaatacggatgtagtagttaagaaaatagatgtgtgtttgtcgtggttttttttagtttttaagattttagttaaatatgaagttaattatttattatgatgttatttgaggtttagttttgaagtggaaatgtattataaatagtagagttagataaatataaataaataattttaatagtttattttaaaagatttttttggtaatattttgttggaattgatttttatttttttatttgttaggtttttggaaagtgaaaattttatttttttgtggataggtatttaaaatgttttattatttattaattaatgaaaaataaatgaaaatttgagagagatattttgaagaataaaaggattaagttgggttatttttaaaatgtaagattataaggtttaatttgttaagatttttgaggggttgaattattggtaaattattatagaattatttatttgaggtttttaaaagtgatgtgttatagagatttagggaattgtaagattgtagataaagaatttatattgttaattgttttatattttattttttgttttaaatgcggttttatattttgaagttaaatatttatttttttttattgcgttttgaattttttattatagtgtattttgagaaatgaatataatagtagtttttatagatgttatatttatggtaattttgtttttcgttaatattatattttggaaaaaaattaattttttattgttggaatgaggtaatatttttaggaaaagggaattatttttttataggatatagaataaatttaattttttattaaattaaaatggattttttaatgtttatatatattatataggattttattttttttaattttggtttaaaggtttagatagtattattttttagtatttagtttatttgtttataaagtagaagagaaaagttattttgtttcgaagggtgttagatttaggattttaaggttattttaaattaatgtttggaattagattataaaatgtaggaaagattttaagttgtttaaagatgaaatattttaatttttattaaaaattttgttttttgggtattttttgtttttttgtttttttagatttattttaaatataatatttttgttgtttatatttttaaaagttatattttaaaattgtttataattggatatttttataaaatgtaggtaaatgtagttttattttttaatgaaggataagtttgttgataatattttgatttttaaaattttttttattttataaaaatgaaataatgtatttaaagtgtttttagtttttatgttaatattaaattatatatttttttagtttatgtttaggagagataatatattttttaaattaagagaagttggtattatttttaaaataaggttttgaatttgttgtggtatgtgttggtaggaattttgtatgaagttgttattgaagtagatgatattaaggttaaaggaaaaaaaaaatagaaaataatgtaattttatagagttgtttttaagattttg

SEQ ID NO: 303 - DNA, 5379 bp, Artificial Sequence
  chemically treated genomic DNA (Homo sapiens)
tacggttataggatttttgagttttttttcgttcgttttttagttttgtagaggtatcgggattttttaggtgttcggcggggtttatcgcgttttcgtttttggggatcgatcggttggcgggcgacgcgcggtcgcggtttcggagttttcgttttttttttttttcgggttacgtaggacgcggtttttaagtagcgttttcgcggtttcgggtcgcggttaggttaggttgtaggttagtcggggaggcggagacgcgtcgggttttttcgatcgggtcgtttttcggtttcggggttggggagagggaattagagcgagtttagttttttcgttagcggcgttcggcgtttttttttttcgttttttttttaagttaaatatttttatttcgcgcgcgcgtttaattttcggcgcgtcgcgaggttgggagttgggaggggagtagtcgagggggaggggcgtaggggagcgagttggaggggggtagttgcgtttcggttgacgattatttcggggttcgtttagcgatttttattttattttttgttttgttgtagtagtttttggttggaaaaaggaagaaagaaatttgttttgcgagtgggtttcgttgggtttgggggcgcgacggggatattcgagaggaaaacgtaggggttggcgtgaaggggtgaattttaggggtacgggagagtcgcggggcgattttgagtaaacgaaatttaaataaaaatatagtgcgtcgaggtcgttgtgagcgcggcggcggcggcggcgggcggtggaagtcgttttaaagattatatttgaaatatggatttcgggggcgtagatttttaggtcggcggggtttcgcgattgagtgggggtcgggggtcgggtgggttttttcgggcgggtttgaggtggttgttttgacgttgggagggacggacgtcgtagaaaatagcgcgtttcgtttcggcgtttgcgattttagcgtgtcgtaatgcggaggcgcggttttgcgggcggcggtgtggtttcgaggggtgtttgggttttgttaaaggattttggcgtcgcggtgttcggggttcgcgttttcgttcgcgtattttgtcgggttagttcgtaggaattttcggttgtagtgtcgcgcggttcgttagggtgggattcgggggcgtcggaggtttcgtcgattaaatgaaagtcgagtttttacgggcggtgggataaagagtagaaatattgaagtggggattcgggggttgggggggtatttttagaaataaagttatttttttagaagggtggaggggcggagtgtagggtttttttatagtttttttttgtacgtataattttattagtttcgttgtttttaagttgtcgttataagtacgatatgattaacgttagcgcgaagtttttttaaggataagggagagaaatgagcgtttgttaaagttcgggtagattttgtagtggttattggtaaattttttttcggtgatttgtaatttattttcgagggtcgggaaaacgatattaatttgagagttttttgagtcgggggagcgattcgggaagttataggcggttcgtttaaggtagagtttaaatttgggtttcgtgggttggcggtggtaattttttggtttagagtattcgtttagcgagaagatttttttaagaagtcgtttattttttcgggatggtgcgggttatgtttttttttagatcgaatatttagtagttattttttagtttacggttgttaaaaggttttcgatttttttagggtttatttttttagtttggtttttattaggagcgagtttgtggttgagttagatagtagttttttttttttggggtttttgagggttttgggggtttaaatcgaggtggcgtttggaaggttttagtttggtagtagaattaggggttcgattagtttttgtttgggagggggtagtattaaataagtaggttagcggtttttttcggggatttgtgcggagttggttattcgaagtcgggggtaggagttttagtagaaggttttgggaattttaggtgtagggttagttttttttgcggttttttgggaggggttaagatagtcgggtgggatggtatggggtattttttcgggaggttttttaggaagggttttttggggtattaggggagtttttagggcgttcgttgtatttttttaggattttgttttattttttggcgtttattcgttttttcgcggatttgagtttttttttatatcggttggtaggggtggtttagggattagttatcgaggttaggtaggggtttttttttttatttgtttattatttataaagataaaataaataattacggaagggaagttaattgttggtgtttgtgtattttatttttaaagtcgttggtaaaaaggttaggagcgggggtggtcgggggttttttgggtttttgaagtgtttgggcggttttttaggtagttttggggagttttaagacgttttttgtcgtcgtataggtagtaatagaaaagattcgttgtatcgattttcgtttttttttttttagtttcgcggttggtttagttcgggttttgcgtaaattcgtcgtcggggtatcgggttttgttgtgtggtttcgaagttttgagcgtgggtttttgaggggtttgggcgtagtgagcgaagcggagttcgacgtttttggtagtagggaggttgtagtagtcgttcggtttttttcggtagtttagatttggacgtcgcggaaatatttattgtaaatagattttttaggggatttttaagagggggagggtagagtgtcgggaagtttagttttttttcggataaggggattggtcgggataaagttgttgtagatttttcgatggttcgacggcgtagacggtttgtgcggcgtggacggatgattgttatttatagcgtttttcgcgttagtttcgcgattttttttttttcgcggtggagttgtttcgcgcgatagtttttcgttttgggtaaaaatgttaggaaaaagttaaatacggtaggagaaaaatatttttttgtatatttatttagtttttggtggtttttgagagtcggtttttatttttcgtaattagttagggaaattaggtaggcgtcgttttattttgtttgttttttcgtcgtattttaatatttagggaattttaggtttgcgttttaagttcgttagagattagtcgtaaatttaatatttttgttgttattagaagataatcgttatttttatatttttggggaggggttacgtgggtttcggtgggtagtagtcgtcgggtagtagtagttttcgtggcgtaagagttgtaaggtggtaatgaaatggagtttacgtgtgcgtttaatattagatcgttttcgagttttttcgggatttttgggcgaatacgagtttcgcgtaggttttttttttttttgttcgttcgagttttcgtgcggtttttaatagatagtcgggtcgcgtgttagggcggtggtggagattcggatggttttttgttcgtttttatttttcgttttattttcgttttgtttttgtttttttttttttttcgtggacgtttagttaagggattgcgtaagttttttgttcgcggttttttaagagttcggagtcggggtttagatatattttaggttaggcgcgtttttgtttttgtttttcgggtcgcgttgttcgttttcgggtttttttatttcgattttacggagttcgcgggttttcggcggcgttttcggtaggtcgtatagggcgtagtagttttattagtcggacgtaggagtcgcgcgttagaacgcgtcgtttcgtcgtcggaggtgttaaattttatattcgttgttgtttaggtcgcgttagttcggagggttttggtttggtcgtttgtcgggaataagggttcgcggatataaggcgaatgcgtggtttttcggttatttcgtttattttttttttgcgttgttcgttcgtttttcgtttagttttaagtttttttcggtttttttagttttttgtttttaggttattttcgggattttacgaagtttttttaggtttttaagcggattttggtttttcgcgttcgttttttttgttttttacgtttttcgtttagtttggttttggaggttgttagaaataggatatttcgtttcgttaataagaggattaagtgtaaattcggagttattgaggatcggggtgggatcggatttggagttttttttgtcgaggtttttgggcgttagggtttcgggattggttgtttttcggttttttttttcgtgcgttttttaatttttttttggtatttagttttcggtttttttttcgttttgttttttttttttttcgcgttttaaaatgttcggagtttggaggcgaggcggggttcgtagtggggcgcgagttgtttttgttttatttcgttttttgtcggcggggttcgcgcgtttcggggcgttggtgacgtaattcggtgtaattgggagcggcggcggatgttttcgtggtttttagtaggggtttcggggtcgtgaatattgagaacgtgtcgcgagggggaggttcgggtatcgggatgtgggcgaggggtcgtcgtcgagattttttcgggttgttaagtttttcgttcgttttcgtttcggcggatatatttttttttttcggtttcgttttttttttgtagttttttttttttaggttcgtcgatttttttttttgtattttttcggcgttttttttttcgcgttttttattcgcgtttttttttttttttttcgtcgtttaggttcggggttttcggtaggttcggttgcgttaattcgcgtcgcggttcgttttttgacgtcgagttgggttcggcgaggtttcgttcgttgacgttcgggatttgtatgagtttttgtgtagtcgcggttcgggtttagttgtttgagcgagcgcgagtcgggagtcggggcgggcgcgggtagcggcgggtcggtcgggttgtgcggggcgagcggcggcggcggcgggggcgtttcggtcggggcggtagttgggcgtcggcgggagttagtagcgtttgtagtcgcgtcggtcgttagcgtttcggcgcgtttcggttcggttatggagttgttagttgttggcgagtacgttttcgcggtggagagtatcgagaagaagcggattcgtaaggtagggcggcgcgggggcggcgagcggcggtcggagcggttcgcgaggaggcggggagggggtggggaggttgcgggtcgggtcggggatttcgcggaagttgatggagtgttgttttttttttttagg

SEQ ID NO: 304 - DNA, 5379 bp, Artificial Sequence
  chemically treated genomic DNA (Homo sapiens)
tttggggggaagagatagtattttattagttttcgcgggattttcggttcggttcgtagtttttttatttttttttcgttttttcgcgggtcgtttcggtcgtcgttcgtcgttttcgcgtcgttttattttgcggattcgttttttttcgatgttttttatcgcgaagacgtgttcgttaatagttggtagttttatggtcgagtcggagcgcgtcggggcgttggcggtcggcgcggttgtagacgttgttagttttcgtcggcgtttagttgtcgtttcggtcgaagcgttttcgtcgtcgtcgtcgttcgtttcgtatagttcggtcggttcgtcgttgttcgcgttcgtttcggttttcggttcgcgttcgtttagataattgagttcgggtcgcggttgtataagaatttatgtaaatttcggacgttagcgggcggggtttcgtcgggtttagttcggcgttagggggcgggtcgcggcgcggattggcgtagtcgggtttatcggaggtttcgggtttgggcggcggggggaggaggaaagggcgcgggtgggggacgcggaggggagggcgtcggggaggtgtagggggagggatcggcgagtttgggagagggaggttgtagagagggagcgggatcgggaaggagaggtgtgttcgtcggggcggaggcgggcggagagtttgatagttcggaagggtttcggcggcgatttttcgtttatatttcggtgttcgggtttttttttcgcggtacgtttttagtgtttacggtttcgggatttttgttgggggttacggaagtattcgtcgtcgtttttagttgtatcgaattgcgttattagcgtttcgggacgcgcgggtttcgtcggtagggggcggaatggggtaggggtagttcgcgttttattgcgggtttcgtttcgtttttaggtttcgggtattttggagcgcgaggagggaaagggatagggcggagagaaggtcgaggattgggtgttaaggagagattgaagaacgtacgaggaaggggatcgaggagtagttaatttcggggttttggcgtttaagaatttcggtagaaagggttttaaattcgattttatttcgatttttaatggtttcgaatttatatttggtttttttattgacggggcgagatgttttgtttttagtagtttttagagttaagttaggcgagaggcgtaggaggtagagagagcgggcgcgggaggttagggttcgtttgggggtttgaggggatttcgtggggtttcgggagtggtttagaaatagggagttgggagggtcgggaagagtttgaggttgagcgggggacgaacgggtagcgtaaaggggagatgaacggaatggtcgaggagttacgtattcgttttgtgttcgcggatttttgttttcgataggcgattaagttaaggtttttcggattgacgcggtttgagtagtagcgagtgtgaagtttggtattttcggcggcgagacggcgcgttttggcgcgcggtttttgcgttcggttggtggagttgttgcgttttatgcggtttgtcgagggcgtcgtcgagggttcgcgagtttcgtggggtcggggtggggggattcgggagcggatagcgcggttcgaggggtaggggtaggggcgcgtttggtttggggtgtgtttgggtttcggtttcgggtttttgaaggatcgcgagtaggaggtttgcgtaattttttggttgagcgtttacggagaaagaaaaagagtaaaagtagagcgagagtggagcgagggatgggggcgggtaaagagttattcgggtttttattatcgttttgatacgcgattcggttgtttgttggggatcgtacgggggttcgggcgagtaggggagggaggagtttgcgcggggttcgtgttcgtttaggaatttcggagaagttcgaagacggtttggtgttgaacgtatacgtggattttattttattattattttgtagtttttgcgttacggaggttgttgttgttcggcggttgttatttatcgagatttacgtggtttttttttaggggtgtaggggtgacggttgttttttggtgatagtagaggtgttgggtttgcgattgatttttaacgagtttgaggcgtaaatttaggattttttgagtgttggggtgcggcgggggggtaagtaaggtgggacgacgtttgtttggtttttttgattagttgcggggggtgggggtcggtttttaggggttattagaagttgggtgggtgtataggaaaatattttttttttgtcgtgtttggtttttttttggtatttttgtttagggcgaagaattgtcgcgcggggtagttttatcgcggagggagaggggtcgcgaggttggcgcgggaagcgttgtaggtggtagttattcgtttacgtcgtataggtcgtttgcgtcgtcggattatcgggaggtttgtagtaattttgtttcggttagtttttttgttcgggaaggggttgagtttttcgatattttatttttttttttttgaaaattttttggaaaatttgtttgtaatgggtgttttcgcggcgtttaggtttgggttgtcgggggaggtcgagcggttgttgtagtttttttgttgttaggggcgtcggatttcgtttcgtttattacgtttaggttttttaggggtttacgtttaggatttcggggttatatagtaggattcggtgtttcgacgacgagtttgcgtaggattcgggttgggttagtcgcggagttggggaggaaggggcgggggtcggtgtagcggattttttttgttgttgtttgtgcggcggtaggaagcgttttgaggttttttaagattatttgaggggtcgtttaagtattttagaagtttaaggagttttcggttattttcgtttttggtttttttgttaacgattttgaaagtgaaatgtataagtattagtaattgatttttttttcgtggttatttattttgtttttgtggatggtgggtagatggggagagaggtttttatttaatttcggtggttggtttttagattatttttgttagtcggtgtggggaggagtttaggttcgcgggagagcgaatgggcgttaggaggtgggatagaattttgggaaggtatagcggacgttttggaagtttttttgatgttttagagggttttttttgggaaatttttcgggggggtgttttatattattttattcggttgttttggttttttttagggagtcgtaggagaaattagttttatatttgggatttttagagttttttgttggggtttttgttttcgatttcggataattagtttcgtataggttttcgagaagggtcgttggtttgtttatttgatattgtttttttttagataggggttggtcgagtttttggttttgttgttagattgaagttttttagacgttatttcggtttgggtttttagggtttttaggggttttaggagaggagagttgttatttagtttagttataggttcgtttttggtgggggttaggttgaaggagtggattttggagaggtcgggaattttttaatagtcgtgggttggagggtggttattaagtgttcggtttgggaagaggtatgattcgtattatttcggggaaataaacgattttttaagggaattttttcgttgagcgggtgttttgggttaggagattgttatcgttagtttacggaatttagatttgggttttgttttgagcgggtcgtttgtggtttttcgggtcgttttttcgatttagaaagtttttaagttggtatcgttttttcggttttcggaggtggattgtagattatcgagaggggatttattagtaattattatagaatttattcgggttttaataagcgtttattttttttttttgtttttagaaaaatttcgcgttggcgttgattatatcgtatttgtagcggtagtttaggggtagcggaattggtggggttgtgcgtgtagggggaggttgtgagggagttttgtatttcgtttttttatttttttggaggagtggttttgtttttaagggtgtttttttaattttcgggtttttattttaatgtttttgttttttgttttatcgttcgtgaaagttcggtttttatttggtcggcgaagttttcgacgttttcgagttttattttagcgggtcgcgcggtattgtagtcgggggtttttgcggattggttcgatagggtgcgcggacggggacgcgggtttcgagtatcgcgacgttagggttttttggtagggtttaagtatttttcggggttatatcgtcgttcgtagggtcgcgttttcgtattgcggtacgttggggtcgtaggcgtcgaagcgggacgcgttgttttttacgacgttcgttttttttaacgttagggtagttattttaggttcgttcggagaagtttattcggttttcggtttttatttagtcgcgaggtttcgtcggtttggagatttgcgttttcgggatttatattttaaatatgatttttggaacggtttttatcgttcgtcgtcgtcgtcgtcgcgtttataacggtttcggcgtattgtgtttttatttgggtttcgtttgtttaaggtcgtttcgcggttttttcgtgtttttgaggtttatttttttacgttagtttttgcgtttttttttcgggtgttttcgtcgcgtttttaaatttagcggggtttattcgtagggtagatttttttttttttttttttaattaagagttgttgtagtaaggtagggaatgaaataaaaatcgttaggcggatttcgaagtggtcgttagtcgaagcgtaattgtttttttttaattcgtttttttgcgtttttttttttcggttattttttttttagtttttagtttcgcggcgcgtcgagggttaagcgcgcgcgcgaggtgggggtatttggtttgggaggggggcgagaaaagggggcgtcgagcgtcgttggcggagaagttgggttcgttttagttttttttttttaatttcggagtcgaggggcggttcgatcggaagggttcggcgcgttttcgttttttcggttggtttgtagtttggtttggtcgcggttcggaatcgcgaggacgttgtttggaggtcgcgttttgcgtagttcgagagggggagggggcggaggtttcggagtcgcggtcgcgcgtcgttcgttagtcgatcgatttttaaaggcgggagcgcggtgaatttcgtcggatatttggggggtttcgatgtttttgtaggattgaggggcgaacggagaggggtttagggattttgtggtcgtg

SEQ ID NO: 305 - DNA, 8895 bp, Artificial Sequence
  chemically treated genomic DNA (Homo sapiens)
  unsure 2851: n is a or g or c or t
atgggtttagataggaatatggagaatttagttatgtaataggtgggaggtagagaattgtttaggaaaaaagtgatcggtagtaggggaggtgagaggtgggggtttgtagaaagttttttttgatggtttttatttttttagcgaaataggaaataagattattagttaagaatgaggataataggtggtgttggaggtttaaggaaaaggtaaaaggtgtgaaataatgtttaaaagaggggaatgtagttgatgggtattaaggatgttttggatatagttattattatttagagttattttagttattgtggttgtgtgattttttttggttatatttaattttatagatgtaagtgggggagttggatttaattaggattaaaattttgttaagtgggtatgataggattagaaaagagtaaaggaattgagggtgtgtttaagggagagattgtaatgatggtttatggatttttaagatgatgggaagtgagggtatgaggaggttgaaggttagtggaaaattaaaatattagtggattggaggtttattggggttaaagaattgttggagttgaggtgttagaggtagtgagtagtaaatgtaggaggtggtggttagaggttggatgttggtagtaggaagtatgaagagttatagatattagtgatagtaagatttaggagttatgattatgggtatatgtgattaaggtatggggaagataagattattagagggatgaagtttaagaaattatttggttatggaattagaggaaatttgtgtattgtggtagaagataatttacggatttaaatttttttaagtcgagtatatatagttttttataatgtgattttgtagtttttttaaaaaaggtagtttttattttttgattttttgaatgtggtttggttttgtgatttatttgtaaaagtagtattatgtgatttttgaggttatgttttaaaatgttttatagtttttattttgtattttcgtaattggtttgagatagagatgagatgttatgtttatttagttgattggaagatgagtagttatataaaggtgaattgatagttgatagttggttttaattttagatgtgggagtgagagtattttggacgatttatttaatttatagaattacgagaaaaaatgttattgtgattttaagtttttgagttttgaggttgtattttaggttgtaaagacgaatagaaatatgtgaatagtgaaattattaagaattattataagagattgttaaagagtaattttaaattagagttaatatttagatttgtgagaaaataatgatttttttttttttttttttttgagttattttgagtttattgttttgttatttgttgttaaaagtatttaatgtatataatgaggttttaatataggtttttttttatttttttaagaagtttaaaaattttagaggtgttacgttagttttttattgatgattttttgttatggaggatgggaaggttttagggaggaggtagttttttggatgatttatggtgagggattttatattgatgtgtttaatgtttttttttattttgggatacgatgaagtatagtgggatagatgagtaggatagagagtagggagagagggggtaaagaagttttggtttttttttttttggtttgttaagttggagtttgtagaatgggaggtgagagagtattttggagacgtagaggttaggtaggtaaaaagaggtagagatgtaggaggaaaaatgattatttggatagaagaagtatgtagtgaggaggggaggtggaaagagaggttggggaaagaaattagataagataagaggagtgtggtaggggggttaagaggggggaaatgaggtgatgtcgagggatttggggtgttattgtttaagatttttttatattttttaaaattatttttgtttatttgtgagatagtaattaatttgattttggtgttttggaaatagtttgggattagaagtaatttttttcgttatgtagatagtgtgttttaagattaggtaatagggatattttatatttttgtgattacggtattattaaattaatttatttatgtagttatcgaatttaaaaggtttgtattagtgattattagggtttatgtagttgaggtgtttgggttttgtttcgttttggttaaattagaatataaggtttttggaatgttgaggttgtattacgaaaggagaattagaaatagggttaagttaaaattggatgttatggatgatgtgtgtaggttatgaaaggtaaataaataggtgagaaggaagaggaggaacgagtaggttaagttatggggttgatataggagggggtattaaattaaggaattagagatttagataaatttaaggttagaatttttaggtgtgtattttattgatatttttttgtttttattatatcgagaggttatagttattgtttatatgtttatttttaggtgtttgttggtggagaagaattttttgggtatgaggtttagtgataaaagtaatggaagataacgtgtattgtatttatttattagtgtaaaaaaaagtgtgtgtgtgcgtgtgttttatgtttaaagtgatatgagaatttgatattgttgttttttttgggaagagaaatggggaaaataaggcgttaggggtaggtaaatttagttttttattttatattttgtgtatttataaatataaataaattatattttagagaatttttgtagattagtggttttcgaaatttattagaaatgtaaatttaggttattttttttgttgggttntttttttgtttttttgtgttgtttttattgtatatatttgttgtggtgagaggggtgtgtgtattaagggggtttgtaaggttataggagatttgagtgtgggtgtgggagggagatagagtaggtaattgagtagttttttgtttaggttttgagttaaagagagaaagaaggttttttagtttatagttggtttagtttaatttttttgaagaaagattatatgggattttgagttaaaagtattgagaaaatttagatttatgttttttaaatttaagtatgtattagaattatgttagtttttgttaaaatttggattgtttggtcgtatttttaggatttttgagttagtatatttggtatgtaattttagaatttgtatggttagtaatgttttagggaatgtgaatgttgttggtttagggattttattttgagaattattgttttaaaggatttttttatttttttttattttcgatgtatttttttttagtttagggtattttttaggttattataaaagttgttttttattgtggtaatttggttaattgtttgtgattttttttaagttataagtttttaaagaatggatttagtttttttttttattattatattttaagtatttaatataatgttcggtatattgtgagtattgaataaatatttgtttaatgaataagtagatttgtttggtatattttttttgtggaatgaaatttagagtagagttggaagtttggttaaggatgaggtattgattatgttttttattttagataggattaaggaaaaggtaggttttataagtttttgttttttttggaaattgatttattagtaaagtattgtaaatagttaggtatatgtagatttttatttatttttttggggtgaagttgagtgatgattagatgttaagtttaggttattttgtttgaattttttattttatagataagaaaattgaattatgaagagataagtgatttttttaaagtatatttatattgatgatttttgaaatagtgttttgtagtaatgtcgtgaggaaggttaggggtgtttttattttatagaagatataagggtagaggtagagtaggtgttggtagttgtgaggagagttatagtatttattatttgttagatattttttattgtgttaggtattttgatattttttatgtataagttgatttcgtgttttttttttgaggtaagtatttaatatttttatttagtagagtaggaattaagatttagaaaggtgagtgatttgtttatgttataggtggagagttgggatttgaatttggtttatgtttgattattacgtaaaataggaatggggtattagaaagggaaggttaaaatgtaattaatagatttatattttttttatgttggaggtttttggggtaaagttattttttgaggtttggtggggagggatttggggagtagagagtagagggataatgagtttttagaagtcgaggggtatagggtgttaaagagaagttgttgtttttgtgagtatttatgttagttagttttgaggaataggatttagggttttagtttaaatttttttatttataatttttaagaagaagaaaaaaaagaagtttgtcgttgattataagagttttatgttttgtttttattttatatatatatattttatattttaattgttttaaatattttgggaatattttattgttatttattttatttaatttagttttatttgtttttaatttttttaaggttgagtttttagggttaagatttaagaggtttagagtgagtagagaaaattttcgtagttaatttggtttttaggaagtggttattggtgggcgttgtggttatttatgagtattaaattatataaaaagaagaattttgttttttttttgttattttgaaagattgtgaaattggagttaattttttattattatataggaagttgagtattttttatttggttaggattttgaaatttgaatttataaaaatttagaaagttttagaaataaagattttacggataaagttttttggaattagagtaagtgttatttgttttttttgttttatttgttattgtggagggtagtgttgtttaaagatatgtatgtagttaggggttttttaaaggtagggggaattttttgagtaggttgggtaaatgtttaagtagtttatggatgtatttttaaggtaattaatattgtagtaatattgagaatggtggatttataaagttgggtgtttagatgaaatataggtttttttgttaaaaaggaagtttatttgaaggattggtttttggttattgattaagaaagttagttagtattaagggataaaaggtgttttttgtggaaatttatttaataagaaattatttggcggggcgtagtggtttacggttgtaattttagtattttgggagatcgaggtaggtggattatgaggttaagagatggagataattttggttatatggtgaaattttgtttttattaaaaataaaaattagtcgggtatggtggcgtatgtttgtagttttagttatttaagaggttgaggtaggagaattattcgaattcgggaggtggaggttgtagtgagttgagattgtattattatattttagtttggcgatagagtaagagtttgtttgaaaaaaaaaaaaaaattgtttgttaaatttttttatgtaaaggaaaattaaatatggtgtatgaagaaattatagtaagagggaaatattagttagaaaaattttggtagatgtaaggatgatttgatattgaatttattttttaagaagattagaattaaggatttttaaaattggtattgttatttttggaagaggtaggtttttatttatttaaaggtaaggagttggttaggtgattttggggggtatttgttttgttttattaataaagatataggttaggattttgttttgaagatagaggggtatggtggtttcgtataggtatttattttataggtggttttggtgggttttagattttaaagagagatggaaatttttaaaattgtataatttggtattagttagtgttatttattgattttttagttttcgtatcgagtagtgggatagtgttggattgtttagaatgtggggtttgggtagtgatgtgttggtaaatgtttaataattgatttttttgaagaaaagatttttgttttataatatttgttgatttttatggtataaatgtttttattgtggttagttttaagttattaatatgttgaatgtggagtggggaagagatgtacgtaattggtatttataaattagtataagttagttagcgtattataggtttgggtgttttttattattatagattgttttatttttgtttagagattttattaatttttaggttggaggatattagtagtggagggtttaggatttagggttatagttgattattgtgtagtggttttgaggtagatttttgtagtagattatagtagggttggtagattagatgataatatggttttttggttttttttttcgggttttattttagattatttttttttaggaatagtatgttttggagtggttgtttggggtttaataagttggggaaataataaatgggttggaggtagggggtgtatggaggtgattcggtttaaaatgttatttgataatgttgatttaatttgtttttgtttttgttaaatttttttagaaattggatttatgggattaggtttgtattagttgttttttgtgttttttaagttatttgtatatttttattgttaatttgttagtttatcgaaaagtgttgattattaaatcgaattgtttgtttttattagtaatggttgtggttgtagaaattagaaattgttaatatagttttgttagtgatcgttagtttgattttttttagaaagagggttgattggatttttttggagatggaggagtgggttaggggatgggtttgataaaaaattaaagttttttattttttattttaatagagtatttttttttttagttagggtgttttatattttttatgtgttttaattttttttataatggttattgaaaaaaatgtgaattgtgtaagtaggaaatattttttaaggagagtagaaggaagaatattagagatttaggtttaagatagaaattataaagtaggtgttatttattttattgattggtatttgggttaaattaatttagattggcggtaatagattgataattttaaatgttatttatatggaagggattattattgtttatcgttattaagaaaaattattttttagattaattataaagaaatttggtaggggggtgggagatagggtatattagttagttagggatattttggatattggtgtttgggatgtgttggtggtgttaggttttagggaagggtttttgtagtgaaggagtttttttagggaaggtttttaagaaaagtgttttggtttggtttttgtaggtttttaataaggggtttggttgttgttaggtggtggtggtgggagggtgatggtagtattttttttatatattattttatagtagttttgtaagataagagttgtttttttatattatagatgaggaatgaagtttagagaggtaaaataatttatttaaagttataaagttcgtaggttatattaaagttaatgttttatttggggaggtatttttaataagtaattggaaaggatttaagtgttaaaaaagtagggattgggagaagttttataaaggtaatttatagagtgatttttttttgttttatttttgtttgttttaaggtattcgtgggtaaaaatatttaagagtttattttagtagaatttagttagttattgtgtaatattattttatagttttagattattttgaatttttttttttttgatgtttagttttttttttttttgattaggttattttttttttttttgtttgtattttttttttttttaggaggtttgtaaagtgattttagatttatttgtgttatttaaggattgtgtaatgtgggttaggtttagtttattttggtgtttttagtgtttttatttttaaaataatggggttgatttattaggattttattatggtaatattattggtgtttggggtagaatgatttttgtattgtaggatatttttggttttgtttattaaatgacggtagtattttttagttttggtgataataataataaatgtttatatatttttaagtgttttaagggtattaggttattttcggttgagaatttttttagattaaaagttatgaatatttgtttgtatttttttttgagttaggattatttttttttttagagtttttttgtgggttttatagtgtaaagttattgttcggggatagtagtaggaaagcgtagtggtgttagggtcgggtatgagaatgatgtatagttgggttggagttttaggtttgtttttataagaggtgtgtttttgaatatgttttttaattattttgaatttttgttttattattttttaaataagaataataatgggatttttttagggttttttaattttaagtttagtgtttaggttatgggggtgtttaggaagtgttggttatgaatagtatggtaaggtttttttttggttttttatttattgaatttattttttataaaattttttgttgaaatgattgaattaatgatttgtgtatttatttatttattgtttttattttttgttagattaagatttttagaaggtagagaggatttgggtttttttaatattttattttgtttttagggtatggtatatagaaggtatttaataaatatttatggagtggttgaaaaaatgttattttttttttgtttttattgtttagtgtttattgtttttagtagtagagtaaagataaattttttttttttttttaatttgtagg

SEQ ID NO: 306 - DNA, 8895 bp, Artificial Sequence
  chemically treated genomic DNA (Homo sapiens)
  unsure 6045: n is a or g or c or t
tttataggttaaaaaaaaaaaaaagatttgtttttattttgttattaaaggtagtgggtattggatagtaaagataagggagaggtaatatttttttagttattttataaatgtttattgagtgttttttgtgtattatgttttggggataaaatggagtgttagagagatttagattttttttgttttttaggaattttagtttaatagggagtggaagtaataagtaaatgagtgtataaattattaatttaattattttagtaaagagttttgtaagggataagtttaatgggtggaaagttagagggagattttattatattatttataattaatattttttaagtatttttatggtttaggtattggatttagggttaaagagttttggaggggttttattgttgtttttatttaagaggtgatgaaatagaggtttagagtggttaggaaatatgtttaaggatatattttttgtgagaatagatttggagttttaatttagttgtgtattatttttatgttcggttttgatattattacgtttttttgttgttgttttcgagtagtagttttgtattgtggagtttataggaggattttgagaaggaaaatggttttggtttagagaaagatataaatagatatttatggtttttggtttaagaagatttttagtcgagagtgatttagtatttttggggtatttggaaatgtgtgggtatttgttgttgttgttattaaaattgggggatgttatcgttatttggtaggtagggttaaggatgttttatagtgtagagattattttattttaaatattagtggtgttgttatagtgaaattttagtaggttaattttattattttggagatgaggatattgagggtattagagtgggttgagtttgatttatattgtatagtttttaggtggtataggtagatttaaggttattttgtagattttttgaaggagaggaaagtgtaggtagagaagggggaggtaatttggttagaaaaagagaaaattgggtattaggggaggaagagtttagaatggtttggagttatgaggtgatgttatatagtgattagttgaattttgttgagataagtttttagatatttttatttacggatgttttaaagtaaataaaaatgaaataaaaaagaattattttgtaggttgtttttgtaggattttttttagtttttgtttttttggtatttgaattttttttagttgtttattaaagatgtttttttaaatggagtattggttttggtgtaatttacgagttttgtgattttggataaattattttatttttttgagttttattttttatttgtaatgtgggaaagtaatttttattttgtaaggttattgtgaggtaatgtatgagaaaagtgttattattatttttttattattattatttggtaatagttaggttttttattgagggtttgtaagagttaggttagggtattttttttggggattttttttgagagaatttttttattgtaggagtttttttttgaggtttgatattattagtatattttaggtattaatgtttaggatgtttttggttggttggtatattttgttttttatttttttgttaaatttttttgtagttaatttagaaagtgattttttttgataacggtggataatgatggttttttttatgtgaatgatatttgaaattgttaatttattgtcgttaatttaaattgatttgatttaaatgttaattagtaaagtaggtggtatttattttataatttttattttaaatttgggtttttggtgtttttttttttattttttttaaggaatgttttttgtttatataatttatattttttttaatagttattgtaaaggaaattaaggtatatggagggtatagggtattttggttggaaagggagatattttattagggtgagaagtgaggagttttaattttttattaaatttattttttggtttatttttttatttttagagagatttaattagttttttttttggagagagttaggttaacggttattaataaagttgtgttggtagtttttaatttttgtagttatagttattgttgatgagggtagatagttcggtttgatagttagtatttttcggtgggttggtaggttaatagtggaagtatgtaaatagtttggaaagtataaagagtagttagtgtaagtttgattttatgagtttagtttttgggaaggtttggtaaaggtaaaggtaagttgagttaatattgttaggtggtattttaaatcgagttatttttatatattttttatttttaatttatttgttatttttttaatttgttaagttttaggtaattattttaaggtatgttgtttttaaagggaggtgatttggggtggggttcgagaagagaaattaaaggattatgttgttatttaatttgttagttttgttgtagtttattgtagaagtttgttttaaggttattgtatagtggttagttatagttttggattttggattttttattgttagtgttttttagtttgggagttggtgaagtttttgagtagagatagagtagtttgtgatggtgaaagatatttaggtttatggtgcgttggttggtttatattggtttataaatgttaattgcgtgtattttttttttattttatatttagtatgttggtagtttgaaattgattatagtgggggtatttatattatgaaaattaataaatgttataaagtagggattttttttttagaagagttagttgttgaatatttattagtatattattgtttaggttttatattttgaatagtttagtattgttttattgttcggtgcgggaattaaaggattagtgagtggtattagttggtgttaggttgtgtaattttgggagtttttatttttttttgaaatttgggatttattaagattatttatgaagtagatatttatacggagttattatgtttttttatttttagaataaaattttgatttgtgtttttgttagtagagtagaatagatgttttttaagattatttggttagttttttgtttttgggtgagtgaaagtttattttttttaaagatagtagtgttaattttgaggatttttggttttagtttttttaagagataggtttagtattaaattatttttgtatttgttaagatttttttagttaatattttttttttgttataatttttttatatattatgtttggtttttttttatatgggggaatttggtaagtaattttttttttttttttagatagatttttgttttgtcgttaggttggagtgtagtggtgtaattttagtttattgtaatttttatttttcggattcgagtgatttttttgttttagttttttgagtagttgggattataggtatgcgttattatgttcggttaatttttatttttagtagagatagggttttattatatggttaggattgtttttattttttgattttatgatttatttgtttcggttttttaaagtgttgggattatagtcgtgagttattgcgtttcgttaagtaattttttattgaataggtttttatagaaaatattttttgttttttagtattgattgatttttttaattagtaattaaaagttaattttttaagtaagttttttttttagtaaaaaagtttatattttatttgagtatttagttttataaatttattatttttagtattgttatagtattaattgttttggagatgtatttatgggttatttagatatttgtttagtttatttaaagaattttttttatttttgaggagtttttagttgtatgtatgtttttgaataatattgttttttatagtaatagataagatagaaaagataagtgatatttattttggttttaagggattttgttcgtgaagtttttgtttttggggttttttgggtttttatgaatttaagttttaagattttgattaagtaggaagtatttagttttttgtgtgatgatggagaattggttttagttttatagttttttaaaatgataagaaagggataaagtttttttttttgtgtggtttggtgtttatgaatggttataacgtttattagtggttattttttggaagttaagttaattgcgaggattttttttgtttattttgagttttttgagttttggttttgggagtttagttttaagggaattgggggtaggtgaagttgagttgggtgaggtgggtggtagtgagatgtttttagaatgtttggagtaattgaagtgtgggatgtgtgtatgtgggatgggggtagggtatagagtttttgtggttagcggtagatttttttttttttttttttttaaagattgtgaatggaaggatttaaattggaattttgagttttgttttttaaaattaattgatatgggtgtttatagaggtagtagtttttttttggtattttatgtttttcggtttttgggagtttattgtttttttgttttttgttttttaagtttttttttattaaattttagagagtggttttgttttaggaatttttagtatgaagggaatataggtttgttggttatattttgattttttttttttgatgttttatttttgttttacgtgatggttaaatatgggttaagtttaaattttagttttttatttgtgatatgggtagattatttatttttttaagttttggtttttattttgttaaatgggagtattgaatgtttattttagaggagaagtacgaagttaatttgtatatgaaaaatgttagagtgtttggtatagtgaaaaatgtttgataaatgatgagtattgtgattttttttataattgttaatatttattttgtttttgtttttgtgttttttataaagtggggatatttttaattttttttacggtattgttataaagtattgttttagaaattattagtgtgaatgtgttttgaaaagattatttgtttttttatggtttagtttttttatttgtaaaatgaagaatttagataagatggtttaagtttgatatttgattattatttagttttattttaaagaaataaatgggggtttgtatgtgtttggttatttgtagtattttgttggtggattagtttttaaagagaatagaggtttgtgaggtttgttttttttttgattttgtttaaagtaagggatatggttagtattttatttttgattaggtttttagttttgttttaggttttattttatagaggggatgtattaggtaaatttgtttgtttattgaataaatatttatttagtatttataatgtgtcggatattgtgttaggtgtttgggatatagtggtgaagaaagaggttggatttattttttgagagtttatagtttaggaaggattataaataattaattaagttattataatgaggaatagtttttgtagtggtttgggaaatattttgggttaaggaagggtgtatcgagggtgggaaggggtgaggaagttttttagagtagtggtttttaaagtgaggtttttggattagtagtatttatattttttgggatattgttagttatgtaagttttggggttatatgttagatatattgatttagaaattttggggatgcggttaagtaatttaggttttgataaagattggtatgattttgatgtatgtttaaatttggggggtatggatttagatttttttaatgtttttggtttagagttttatgtgatttttttttagaagagttaggttggattagttatgagttaggaagttttttttttttttttagtttaaggtttaaataagaggttgtttagttgtttgttttgttttttttttatatttatatttaggttttttatggttttgtaaatttttttagtgtatatattttttttattatagtagatgtgtataatgggggtagtatagagagataagagagnaatttagtaagagggatgatttagatttgtatttttaataagtttcgagaattattggtttataggaattttttgagatgtaatttgtttatatttgtaagtatataaaatataaggtgaagagttaagtttgtttatttttggcgttttattttttttatttttttttttaaaaggaataatagtattagatttttatgttattttgaatatagaatatacgtatatatatatttttttttatattggtgagtgaatataatatacgttgttttttattgtttttgttattgaattttatatttagaagatttttttttattagtaagtatttgggaataagtatgtaggtagtgattatagtttttcgatgtggtggaaatagagaaatattaataaggtgtatatttgaagattttaattttgagtttgtttaggtttttgattttttaatttgatatttttttttgtgttagttttatgatttggtttgttcgttttttttttttttttttatttatttatttgttttttatgatttgtatatattatttatggtatttaattttgatttggttttgtttttggtttttttttcgtgatataattttaatattttagaaattttatgttttgatttaattaagacggggtagggtttaggtattttaattgtatggattttggtggttattgatgtaaattttttaggttcggtggttatatgaataggttaatttggtggtgtcgtgattatagagatgtgagatgtttttgttgtttaattttggggtatattgtttgtatgacgaaagaggttgtttttgattttaggttatttttagaatattaaagttagattggttattgttttatagatgggtaaaagtggttttgggagatgtaagagggttttaggtagtagtattttaggtttttcgatattattttatttttttttttttggtttttttattatattttttttgttttgtttaatttttttttttagtttttttttttattttttttttttattgtatattttttttatttaggtggttatttttttttttgtatttttgtttttttttgtttgtttggtttttgcgtttttaaggtgtttttttattttttattttataaattttaatttgataaattaaggagaaaggggttaagatttttttgttttttttttttttattttttgttttgtttatttattttattgtgttttatcgtgttttaaagtgaaagagggtattgggtatattagtgtgagattttttattatggattatttaagaggttgttttttttttgaagtttttttattttttatgataggaagttattaatgaaagattgacgtagtatttttgaggtttttaaattttttaggggggtagggggagatttgtgttgaaattttattgtatatattgggtatttttgatagtaaataataaagtaatggatttaaaatagtttaaaaaagaaaaagaaaagaaattattgtttttttataaatttagatattagttttggtttgaaattattttttaatagttttttgtaataatttttaatgattttattatttatatgtttttattcgtttttatagtttaaaatataattttagaatttaggggtttgaaattatagtgatattttttttcgtgattttgtgagttagatgaatcgtttaaggtgtttttatttttatatttagggttggggttagttgttaattgttaatttatttttatgtggttgtttattttttaattagttagatagatatgatattttatttttgttttaggttagttacgagagtataaaatagaagttgtaaagtattttaaggtataattttagaagttatatgatgttgtttttgtaagtaagttataaagttaagttatatttaaggagttaggaaatagaaattattttttttggaagagttataaagttatattgtaaaaggttgtgtgtattcggtttggaggagtttgagttcgtaaattattttttattataatgtataaattttttttagttttatagttaagtagttttttgaattttatttttttaatggttttgttttttttatattttggttatatatgtttatgattatagtttttgaattttattattattaatatttgtagttttttatattttttgttgttagtatttagtttttgattattattttttatatttattatttattgtttttagtattttaattttaatagttttttaattttagtggatttttagtttattgatattttaattttttattgatttttagtttttttatgtttttattttttattattttaaaaatttatgagttattattatagttttttttttaaatatatttttaatttttttgtttttttttgattttgttatgtttatttggtaaaattttggttttagttagatttagtttttttatttgtatttgtgaagttaaatatggttagagaaaattatataattatagtgattagggtggttttaaatgatgatagttgtatttaaagtatttttaatgtttattaattgtattttttttttttagatattattttatattttttgttttttttttaaatttttaatattatttgttatttttatttttagttgatgattttgttttttatttcgttgagaaaatgaaagttattagaagaaattttttataagtttttattttttattttttttgttatcggttattttttttttggatagttttttgttttttatttgttatatggttggattttttatgtttttgtttaaatttat

SEQ ID NO: 307 - DNA, 10528 bp, Artificial Sequence
  chemically treated genomic DNA (Homo sapiens)
tagggaatatgttggtggggagtatgaattttagttttttatttttagattcggtttttaatttgttgttgttaagttttggggatatttataaatgttttttaaatatttgttttggtttatttttagttatagatttttttttagagtaggttatttttgaggtatttatattgagattttaattatagagatatttaaaatatttaggttataaaagaatttttattatagggtttaaatgaattttttttcgttatttgagatagttttttagtaagtatatgtattaaagattttgattttttttttttttttttatagtttgtttggtttaaaggtatgatatttaatttgttgtatttatattttaagttaaaattattattttgtttttttaatttttatttttaattatatatttttgtttatttttggtttatttggagataaagttgaatttagaagatggaggagaaatttttatttgttttttgttagttgatattttttttttaagaattatttgtagttgttgggtttttttgttgtgattttatgttttgttgtgttatttttttatttgtgataaaaatagtggtaatagtttgttttatttttattatgaagatttgattaggataggtaggaatataattattgttttttttgtgggtattatattggtttagattatgtttaattagaattgaagatgtaaaattttagaatttattaatttattttagtaggttataggaagtatgtaaattataaaaatcgtaatgaattaaaagtatttgtgttgataagaggtaagaatttttttattttttaaaggtattaattgaataaatttattgtttattatttaggaaattgttaagggtatcgttaaagtattttaggttgttgaaaaattttttttgtttttttgttttattattaattttttttagttatgtttttttttatatgtttttgttatttatggagtggtagagaggttttgagtataattttaatttttagttttaatggtttaatttttaatttaattgttgattttgagtgtaaaaataaataagattttaaatattttagggttagtattttgggtttttttttgttatttggggagtataaattatttttatattattggtttgtagaaaaattgagtttttttttttttttgttttatgttattttgaggtgattatagttttgttttttatgtaattttgtttggttagtaggtatattagagtttagtggtttgtgatatatttttttttaagtttgttcgaagggttatatttattattgagattgggaattttagaaattatgaatttagtgttaatgggtagatatagaatttttaaatttatgaaaaaatattttttttaatttttttcgtgtgtataaagaattttaagatgtattgattaagatttttaattttttaattatttattaatatatggacgaggtaagaagaaagttgtaagaaaaaaatttgtttgatttgacggttgtgtggttatttgttatatttttttagatttattttgagttttaggatgttgattttaggggttatattgtttagattgtttattattttttttttttatttggtttagttattgggaagtattggtaggaggttagagtgggagaaggaggttaggatattttttgtttttgttgttttattgttttgttgaatttttagtagtggttgagttattaatttgtagtttttaattttagttgtttgtagtatttaagtggtattgtttatttttttgatttttttagttgttaaggaagaaaaaaataattttttttttaatgtttataagtttttggaatggatttttgtaataaaagatagattaatacgagaaaagtttattaacgtatatattttatacgtatataggagttatttagggaatgaataatttttaaaaaggtgattttgaattttagtttatatagtatttttaataaagtttagtaatattttagagatatgataagataaagaaaatgaattttgagtttttagggatagtgatttgtaggaaggtaaaaggaataaatggaggtaaaggttggttagtaatatttgttaatgaagatttttttggtgttatttttaggtttataaggatttaaatttgtttttagtggtgaatttttgtttattttggtagaaggtgtggaggggggtgtagattcgttttgtttttgtaagtttatattttgtttttagataaataaagggagggaaaagagtttttttttatttgttttttaattgtttttagtttaataatttttatgtaaaagaggtatattttagggtgttaaattttggttttttataaagtatagggatgatagattattttattatttttgttgttttttttaagtttgtttatttttttaaaaatatttttattttatattgtttttttaaaattttagcggagggtgttttttgttattttgttttttgtgttagtataagttaaaggtttgaattttggttttgtaattatttatttttgtgtttttttttgtttatgaaattatagggttggagataaagattataatgtgaagataaaattggagagcggttttaattagttagagtaaaatttttggtttttgtttttttttattttgggttgaattataggaataggtggtaagatgttagggttaggagattttagaagtggtagtaagtttagtgttattaggttagggatgatttgttttattattgaaattttagagatatgttttaatttcggtttagagatatattgagagataattggggaatttgttatgtttttgaataggtaatgagttgttttttaagaaaaaatttgagattttttaagttttaggttttatttagtatatatattaggttttatataggatatatggttataattgattgaaatttgggttgggtgtaggagtttatatttgtaattttagttttttaggaggttgaggtaggtagattgtttgagtttaggagttcgagattagttcgggtaatatgataaaattttatttttataaaaaatagttaggtatggtggtatgtatttgtagttttagttatttgggaggttgagatgagaggattgtttgaggttgagattgtagtgaagtatgattatgttatcgtattttagtttaggtaatagagtaagattttgtcgtaaaagaaagtaaaaatataatataatataataataataataataataataatagtaaaaaagttaattttttgaaatttggaaaggatatttggattgttttgagtatttgattgttgttggttttagtagtggatgtattttttaatttttggtattttgtagggtttagattgttttgttttgtttgttatttgtggagtgtttgttagattttgttttagttgttttaggtttatttatttttatagatttttagttttgttatttatattttatatttgggaaatggaaatttagaaatttgttaagtttatagtatgagattttgttttcggtgtttgttggattttagaaagtgttaggggttaatttagatgatattatgttttttgtataattttaggaatgtttttagtttgatgtttttattgtaaaatttatattattttttaataaaacgtttttttaaggaggggtatttaaaataattgaggttttttttgttaaggacgtttttgatataagagataatttagtattttttttttattaaaaagtttgaaattttgtaatttgtgataatgtggatgaatttagaggatgttaagtgaaataagttatatatagatagataaatattacgtgattttatttttatgtggaatttttttttaaataagttgtttagtcgggtatgatggtatatatttgtaattttagttatttaggaggttgaggtgggaggatggtttgaatttagaaggtggaggtagtagtgagttgagattgtgttagtgtatttcggtttgggtgatagaatgaaatttaatttaaaaaaaaaaaaaaagttgttattttagaaaaagatagtagagtagtggttattagagattggggaggaaagagaggaggtgagaatgggtagtagttgattaacgggtataaagttattatgagataggagaaataagtgttggtgttttgttttaagtagggtgacggtagttaataatgaattttgtatatataaatagttagaagagagggtttttaatattattattattttaaaagaaatgataaatgttttagaggatggatatgtaattattttgatttgattattgtataatgtatatatgtagtaaaatattatattgtgttttataaatatatataattattatgtgaattaaataaaaaaaaattttaaagttttatttaaatgaaatttttaattagattttgaatttatgatattattgaaattagtatatatgatcgtagtaaaattttattatattttttttattattattaatattttttattttttggaatatgaaatattttgttgtgtttatattatgtaaattattattagtaggagagtagagagtggaaatgttttaggtataaagatttataagataaagaagtttagagtcgttagaaataggagtagatgtatagggtttgtttgatttatatttaaggttgtataagtaagattttaaaattaattttattttggagattttaatttaatgtataatgtttttgattggaaaagaagaattatatttttttgatttttttttttaaatttttattattagttgttttgtattttcgtttttattttttgtaggaaattttattttttatttttgtatgttaagtttttatttttagatttgtttggtttagttgttgagaagtttgatatattaggattgtttgagataagttataagttggtgagttgtaggtattttttttattattttttgatttataggtttaacgtattttaaagttggaaatgtcgggtttgggtatattttggggaattgtaaagtttgtatatttgggggaaatgattaagatgagaggtaggggtggggatggtatgtgtattaggagatgttagagaaattttgaggaagagtagcgtgtagtaggtgatgggggagagtgggtagtaagcgaggttaggatagttattttgtttagttattagtttatatatttaggggtttattttgtttttttgagtatttaaggacgttaaagagttggaattgttagtttaaatataggattatttaagttttgaattaaaatgtgttttttgttttaatttaggagatttatagaggtagaagtaaggaatttattttttgaaagatagatttttattagttttgggtgatatgttttgatatttgaaatgatatttaggatagtatattttaggtattttgtttattgtttattgtagtagaagttatatgttagttagttgtaaaaatgaaattaagtaatgtgtgtatagtatttaatatagtatttgagttttaggagtatttaattaatgattatagttgtgattttttaggtagatgtatttttttttaattttgattagaggttttatttagtttttttagattttaagaatttggtttagtgatatgaaatataagatttgtgaaaagtgttaattgtaagagaaatggaaggataaagtatataggtgggtggaaaagaaatttatagttattgttagaaaaaaaatttttgagaattaagttttgatgatgttagggtttatagtttttattataaagagttttatgtatttatttagtgaatatttattggtgttttttttagttaggtattattataagagttgaaaataaaagtataatttagtttttgattttgaggaatatgttgtgtgtagtagataatataataagtgtttatttagatgtatgtagtgttatgtgataagagtaatatgatagaggatatagattaggttttatagagaagggggatttgagtaggaggtattgaagggtgaatagaagtttattaattattttgggtagaggggtaaggatttgtaaaattattgaagtatgaaggaaatggtgagtttagggaaaatgaagagaagatggttgtgattgaagtataggatttgggattggagaagggattggaggtgaggttgagaagaggtaaatttagaaaagatgttgtgttgggtagtttggatattatttttgaagtttattatatataagttatagggttattggaggttttaagttaaaagtgattatttaattttaatttaagagaagataggttgagagggaatatggtttgagatgagttatgagtaaaggaaagattataataaagttaggagtgaggagtgtgtgaagtaagaaagtgatagttgaaagtagtgtagaggggatgaatttgagaggtatttatgaggtggaatttaaatgatatgataataatatagggtatttttttgtgttagatgttgttttaagtttttattttattgatttttatagtaatttagtatagttaatattttatgtataaagaaatcggtatttgaaggagtaattggttttagattatattgtttataaggatttaaatttaggtttgtttggttttaaaaattggtttttaatttttagaaggagaagcgatttagggtaatgtttaattttgttttttaggtaatggaggaatttataatcggaaggagtttttagtagtgttttatttggggtgggttgaatttgaggtttttgtatgatatttattttgtttattttagtgtttaaaattgagtatggtttatagtaggtgtttaataagtgttgatgtagtgaatatatgtatggggagatatgtattaggtaatgggaaatttaattttaaggtttaggggaaagttggagtttgaagatagagttttagaaaatagtagtatagaagggagtaggaattatgagtttagataatataatttaggaagaattttgtagtaaggataaagaggtaaaaaattaaagaggtgagagttaagtgtggtgtttggggaattttaaggtgtgggtacggggaggagatgttagtaaagaatatgaataaaaagcggtagtatagttttttttatttggaagttaaaaagaattgtaaatggaggaagttagtagaaggattaaatatttgaagagggtggaattggaataaaattagggtatttgaaaaattgggttgttattgtaattttaataagagaagttttggtaggatgatggaggtagaaagttgagagaattattagttagaacgtttttgattttagagaatagaaaatgtagtttataatggttttaaaataggggtttgttttttttttagtaatttgagaggttaaggcgggtgtattaggaggttaagagatcgagattattttggttaatatggtgaatttttatttttattaaaaatataaaaattagcggggtatggtggtgtacgtttatagttttatttatttaggaggttgaggtaggagaattatttgaatttaggaggtggaggttgtagtgagttgagattatggttattgtattatagtttggagatatagcgagatttcgtttttaaaaaaaaaaaaaaagaaggtagaaggtgaatagtttaagggtgggtttaggatttagtgataataggattttgtttggttttttatggttttttaggttttttatttatggtattatgtttttattaggtatgttgttagagtaggaggggtaggtggagggtttttttgtgtttgttttattagggaagaagagtttttttagaagtttttagtagattttttttttatattatggtttagtaatgagttatagatttatgtattatttgtaaaggagttagagaaaataaacgtttagcgtttttagtttgaaaatgagaatttggtttgttggggaagataaagggtgtcggaaaatggttgttgggtaaattattgatgtttgttattaggaatgaaaggtaaattaggaattggtatatatgtttttagggagatggttgtaagggagagggtaaagattgggaagttgtttatgtggtgttagattatttggaagattatggattgcggtgtttgtgttgtgtggttattattttgttttttgtttatagaatagagaaagtggattgaataaggacgtatttttttagtatatttataatatgttgtttatatttcgttttcggtttattagaaatattaacgagagcggtgaagaagttattattttttttgattatgattacggtgttttttgttataaatttgacgtgaagtaaattggggtttaatttttgttttcgttttattcgttggtgtttatttttggttttgtgggtaatatgttggtcgtttttattttaataaattgtaaaaagttgaagtgtttgattgatatttatttgtttaatttggttatttttgatttgtttttttttattatttttttattgtgggtttattttgttgtaaatgagtgggtttttgggaatgtaatgtgtaaattatttatagggttgtattatatcggttattttggcggaattttttttattatttttttgataatcgatagatatttggttattgtttatgttgtgtttgttttaaaagttaggacggttatttttggggtggtgataagtgtgattatttggttggtggttgtgtttgtttttgttttaggaattatttttattaaatgttagaaagaagattttgtttatgtttgtggtttttattttttacgaggatggaataatttttatataataatgaggaatattttggggttggttttgtcgttgtttattatggttatttgttattcgggaattttgaaaattttgtttcggtgtcgaaacgagaagaagaggtatagggtagtgagagttatttttattattatgattgtttatttttttttttggattttttataatattgttatttttttgaatattttttaggaatttttcggtttgagtaattgtgaaagtattagttaattggattaagttacgtaggtgatagagatttttgggatgatttattgttgtattaattttattatttatgttttcgttggggagaagtttagaaggtatttttcggtgttttttcgaaagtatattattaagcgtttttgtaaataatgtttagttttttatagggagatagtggatggagtgattttaataaatacgttttttattggggagtaggaagtttcggttggtttataaaacgaggagtagtttgattgttgtttataaagggagataataatttgtatataataataaattttaagggtttgttgaataatagaaatttgtaaagtaggtgtttaggaattttagggttgtgtgtattaatatagattatgttatttaatgtatatttaatatgtgtttagggaataatttagaaaaattgtgggtagagattttgattttttagaaagtttattttagtttttgaaaaatgttttattattttgtgttaattttttttttttagtttttataatttttttatttaatttttgattttgttaatgttttgaaattaagggttagttggaggtgaagaagagaatgtgataggtatagatgaatgggagtgagggatagtggggttagggttgagaggagaaggagggagatatgagtatggttgagtttggataaagataaaggtgagtaaagggtttacgtatttagttaggagatgatattggtttttagttttatttgttacgtgtatttaattttgaagggtttattaggttagggagagtttgggaattgtaataatttgggagttttggtggagttcgatgatttttttttgtataagtgtatgatatatttttgttttattatagtttatttatggtatttatgtattttatatttgaaatttatgaaatattatgttttattgtttagatgttttttaggttatatttttttgtttaaaaatttagaaaatttttgtttataaaagatgtattatttatgatatgttaatatatgtatatgtaatatatataggtttttgtttgatttttttaggaggtagtgattatgagaagggggtggagaatgatgagtttttttattaggagtaaaggacggggatcgtgtggaattattgtagaattattttcggaattaattaagtggagagagttaggaaggttgtattagaatttagtaaagttttttgtttggatttgagttggtttgttttgtgtttgtttttttttgttttgttattttttttattttttttttttttttatagt

SEQ ID NO: 308 - DNA, 10528 bp, Artificial Sequence
  chemically treated genomic DNA (Homo sapiens)
gttgtggggaaaagagaagagtgaggggagtggtaaggtagggaaaagtaagtataaaataaattagtttagatttagataagaagttttattgggttttgatgtagtttttttggttttttttatttagttgatttcggaaatagttttgtagtggttttatacgattttcgttttttgtttttggtgaaggaatttattattttttattttttttttataattattattttttggagagattaagtaagagtttatatatattgtatatatatatattagtatattatagataatgtattttttataaataaaaattttttgaatttttagatagggggatgtggtttaagaagtatttgaataatggagtatgatattttatagattttaaatgtaaggtgtatgggtgttatagataaattgtaataaagtaaaaatatgttatgtatttatgtaaaagagaattatcggattttattaaaatttttaggttattgtagtttttaaattttttttgatttggtgaattttttaaggttaaatatacgtggtagatggggttaaggattagtattattttttggttgaatgcgtgagttttttgtttatttttgtttttgtttaggtttagttatgtttatgtttttttttttttttttttagttttgattttattattttttatttttatttatttgtgtttgttatatttttttttttatttttagttggtttttgattttaagatattgatagaattagagattgagtgaagaaattatgaagattagaaaaagaggattagtataaggtaatgaggtattttttaggagttgagatgagttttttggagagttaaagtttttatttatagtttttttggattattttttgagtatatgttggatatgtattgggtgatatagtttgtattagtatatatagttttgaggtttttgggtatttgttttataggtttttattgtttaataaatttttgaagtttgttgttatatatagattgttatttttttttataaataataattaaattgtttttcgttttataaattagtcgagattttttgttttttagtggaaggcgtgtttgttgaagttattttatttattgtttttttgtagaaaattggatattgtttgtagaagcgtttggtgatgtgttttcggaagaatatcgagagatattttttgaatttttttttaacgaaggtatagatgatgggattgatgtagtagtgagttattttaagagtttttgttatttgcgtggtttggtttagttgattggtgtttttatagttatttaggtcgaagaatttttggaaggtgtttaggagaatgataatgttatagggagtttagaagagaaagtaaataattatgatggtgaagatgatttttattgttttatgtttttttttttcgtttcgatatcgaagtagggtttttaggattttcgagtagtagatgattatgatgagtagcggtaggattagttttaaaatgttttttattattgtgtggaaattattttattttcgtggaaaataagggttatagatataaatagaattttttttttggtatttagtaaagatgatttttgggatagaagtaaatatagttattaattaggtgattatatttgttattattttaaaggtgatcgttttggtttttaaagtaaatatagtatggataatagttaggtatttatcgattgttaggaggatgatgaagaagatttcgttaaaataatcgatgtgatatagttttgtgaataatttgtatattgtatttttaaagatttatttatttgtagtagagtgagtttataatgggagagtaataagaaaaagtagattagagatggttaggttgagtaggtaaatgttagttaagtattttagttttttgtagtttattaagatgaggacgattagtatgttgtttataaaattaaagatgaatattagcgagtagagcggaggtaggagttgggttttaatttgttttacgttaaatttatgatagggagtatcgtaattataattaaaaaaggtggtgatttttttatcgttttcgttggtatttttgataaatcgagaacgagatgtggatagtatgttgtggatgtattggggaaatgcgtttttgtttaatttattttttttgttttgtaaataaagaataaaatgatgattatataatataaatatcgtaatttatgattttttaaatagtttggtattatataagtaattttttagtttttgtttttttttttgtagttatttttttgaaagtatgtgtgttagtttttgatttgttttttatttttagtggtagatattaatgatttatttaatagttatttttcgatattttttattttttttagtaaattagatttttatttttaggttaaaagcgttgggcgtttgttttttttggtttttttgtaggtggtgtataggtttgtgatttattgttggattataatatgaaaagggagtttgttgggggtttttgagaaagttttttttttttgataagatagatataagagaattttttatttgttttttttgttttggtagtatgtttagtgagggtatggtgttatgaatggaagatttagagaattatgagaagttaggtagaattttattattattgagttttaaatttatttttgaattatttattttttgttttttttttttttttttttggagacggagtttcgttgtgtttttaggttatagtgtagtggttatgattttagtttattgtaatttttattttttgggtttaagtgatttttttgttttagttttttgagtagatgggattataggcgtgtattattatgtttcgttaatttttgtatttttagtagagatggggatttattatgttggttaggatggtttcggttttttgattttttgatgtattcgttttggttttttaaattgttgggagaaaaataagtttttgttttaaagttattatgaattgtattttttgttttttgaagttaaaaacgttttaattgatgatttttttagttttttgtttttattattttgttaaaattttttttgttaagattgtagtgataatttaattttttaaatgttttggttttattttaattttattttttttaagtatttgatttttttgttaattttttttatttataattttttttggtttttagatgggaggggttgtgttatcgttttttatttatgttttttgttggtatttttttttcgtgtttatattttaagattttttaggtattatatttagtttttatttttttaattttttgtttttttatttttgttataaagttttttttgaattgtattgtttaaatttatggtttttatttttttttatgttattgttttttaaagttttgtttttaagttttagtttttttttaagttttagagttgaattttttattgtttgatgtatatttttttatgtatgtatttattgtattaatatttattgaatatttattatgaattatatttagttttaggtattgaagtgagtaaagtgggtattatgtagggattttaaatttaatttattttaaatggggtattgttgaaaatttttttcgattgtggatttttttattgtttaagaagtaaaattgggtattgttttgggtcgtttttttttttgaaaattaggagttagtttttggagttaaataaatttggatttgaatttttataggtagtgtaatttggggttaattatttttttaagtgtcgatttttttatgtataaaatattaattatgttgagttgttgtgaagattaatggagtaaggatttaggatagtatttgatatagagaaatgttttgtattattattatgttatttgagttttattttatagatgttttttagatttattttttttgtattgtttttaattgttatttttttgttttatatattttttatttttggttttgttgtagttttttttttgtttatggtttattttaagttatgtttttttttaatttatttttttttaagttgaaattgaatagttatttttagtttaaaatttttagtagttttatgatttatatgtggtgggttttaaagataatgtttagattgtttagtataatattttttttgagtttgtttttttttagttttatttttagttttttttttaattttaaattttgtgttttagttatagttattttttttttattttttttaaatttattattttttttatgttttagtggttttgtaggtttttgtttttttgtttaaaatgattggtgagtttttatttattttttaatattttttgtttaaattttttttttttgtgaagtttaatttgtattttttgttatattatttttattatataatattgtatgtatttagataagtatttattatgttatttgttatatatagtatgttttttaagattaaggattggattatgtttttatttttagtttttatgatagtatttggttaaaggaggtattaataaatgtttattgaatgagtatataaaattttttataataagaattataagttttaatattattaggatttgatttttaagaattttttttttggtagtgattgtgaattttttttttatttatttgtatattttatttttttattttttttgtaattgatattttttataagttttgtattttatattattgagttagatttttgaaatttggagaagttaaataagatttttgattaaagttggaaaaaaatgtatttgtttaaagaattataattgtggttattaattgagtgtttttgaagtttagatgttatgttaaatgttgtgtatatattatttaattttatttttataattggttagtatgtagtttttattatagtgaataatgagtaagatgtttgaaatgtgttgttttaggtgttattttaagtgttagaatatgttatttagaattgatagaaatttattttttagaaaataaattttttatttttgtttttgtggattttttgagttgaggtaagggatatattttggtttagagtttggatggttttatatttagattaatagttttagttttttaacgtttttgggtgtttagaggggtagagtgagtttttgggtgtgtggattggtgattgagtagagtggttgttttggtttcgtttgttgtttatttttttttattatttgttgtacgttgtttttttttagggtttttttaatattttttggtgtatatgttatttttatttttgttttttattttgattattttttttaagtgtgtaggttttgtagttttttagggtgtatttagattcggtatttttagttttgaggtgcgttgagtttatgaattagaaagtaatggaaaaaatgtttataatttattagtttgtggtttgttttaggtagttttggtatgttaggttttttagtaattgaattaaatagatttagaggtagaaatttggtatgtagaagtaggaaataaagttttttgtagaaagtgaaggcggagatatagggtaattaatggtaaagatttgaaaaaaaaaattagaaaaatatagttttttttttttagttaggaatattgtatattgggttgaggtttttagaataggattaattttgaaattttgtttatgtaattttgagtgtgagttaggtaaattttgtatatttgtttttgtttttaacgattttgagtttttttattttgtgggtttttatatttggaatatttttattttttgtttttttattagtgataatttgtatgatatgagtataatagaatgttttatgttttagagaataaagggtattggtgatagtggaggaagtataatgaggttttattgcgattatgtgtgttggttttagtggtattatggatttagaatttggttagaaattttatttagataagattttaaaatttttttttatttaatttatataataattgtatatatttatgggatataatgtgatgttttgttatatgtatatattgtgtaatgattaaattagggtaattatatatttattttttgaaatatttattattttttttgaaataataatgatattgaaaatttttttttttagttatttatatatatagaatttattattaattatcgttattttatttggagtagagtattagtatttgttttttttattttatggtaattttgtattcgttgattaattgttgtttatttttatttttttttttttttttttagtttttggtaattattgttttattgtttttttttaagatagtaattttttttttttttttaaattgggttttattttgttatttagatcggagtgtattggtatagttttagtttattgttatttttattttttgagtttaagttatttttttattttagttttttgagtagttaggattataggtgtgtgttattatgttcggttaagtaatttatttaaaaaaaaattttatataagagtgagattacgtggtatttgtttatttgtgtgtggtttattttatttaatattttttaggtttatttatattattataaattataggattttaaattttttaatgaaaaggaaatgttaaattattttttgtgttaggaacgtttttagtaagaagaattttagttattttaaatgtttttttttggaaagacgttttgttaaaagataatgtaaattttgtaatggggatattagattaggagtatttttaagattgtgtagagaatatggtgttatttaagttggtttttggtattttttggaatttagtagatatcggaggtaggattttatgttgtggatttggtaagtttttaagtttttattttttaaatatgaaatatgaataataagattgggggtttatgagggtaaatggatttaaagtagttagagtagggtttggtaggtattttataggtaataaatagaatagaatagtttgagttttgtagagtgttagaggttgaaggatgtatttattgttagagttaataataattaaatgtttagggtagtttaggtgttttttttagattttaagaagttggtttttttgttgttgttgttgttgttgttgttgttgtgttatgttgtgtttttgtttttttttgcgataagattttgttttgttgtttaggttggagtgcggtggtatgattatgttttattgtagttttaattttaagtaatttttttattttagttttttaagtagttgagattataggtgtatgttattatgtttgattattttttgtagagatggggttttgttatgttgttcgggttggtttcgaatttttgggtttaggtaatttgtttgttttagttttttgaagggttgggattataggtgtgagtttttatatttagtttagattttagttagttgtaattatgtgttttgtgtaagatttggtatatgtgttaagtaagatttgagatttgaagggttttaggtttttttttggaagatagtttattgtttgtttaggaatatagtaagttttttagttgttttttaatgtgtttttgggtcggaattggagtatatttttgagattttaataataagataggttatttttgatttggtaatattgagtttgttgttatttttggaattttttgattttggtattttgttatttgtttttatgatttaatttaggatggggaagagtaagagttagaaattttgttttggttgattaggatcgttttttaattttgtttttatattgtgatttttgtttttagttttgtaattttataaataaggagaggtatagaggtagatagttgtagagttaggatttaaatttttggtttatattgatatagagggtaggataatagagggtatttttcgttgagattttgaagagatagtatagaatgaaaatatttttggaggggtgagtaggtttaaaagaagtaatagggatggtgaggtggtttgttatttttatgttttgtgggagattagaatttgatattttaaaatgtattttttttgtataaggattgttgagttgaaggtaattaagaagtagatgaaggaaagtttttttttttttttttatttgtttaaaagtaggatatagatttataaagataaaacggatttgtatttttttttatattttttgttagggtgaataaaggtttattattgaagataaatttaaatttttgtggatttggagatggtattagaggaatttttattaataagtattattaattagtttttatttttatttattttttttgtttttttataagttattgtttttagaggtttaaagtttattttttttgttttgttatatttttaaaatgttattgaattttgttgaagatgttatatgagttggaatttaaagttatttttttaagaattatttattttttggatagtttttatgtacgtataaaatatgtacgttaataaatttttttcgtgttaatttgttttttgttataggggtttattttaagaatttatgagtattgaggaaaaaattattttttttttttttaatagttagaaggattaaaagaataaataatattatttgagtgttatagatagttggaattgagagttgtaggttgatggtttagttattgttagaagtttagtaaagtagtaggatagtaggggtagaaagtattttaattttttttttttattttgattttttattagtgttttttagtgattgaattagatgggaagagggaataatggatagtttaggtaatgtagtttttaaaattagtattttgggatttagagtggatttgggggagtgtggtaaataattatataatcgttaagttaaataaattttttttttgtaattttttttttatttcgtttatatattaatagatagttagaaaattgggaattttgattagtatattttagaattttttatgtatacggagagagttaaaaaggatgtttttttatgagtttgagaattttgtatttatttattggtattgggtttatggtttttaaggtttttagttttaatgatgagtatggtttttcgagtaggtttgaaggaaagtatgttataagttattgagttttgatgtgtttgttgattaagtaggattatatagaaggtagggttgtggttattttaaggtgatatggggtaaggaagaggagaagtttaatttttttgtaagttaatgatatgagaatagtttatgttttttaaataataaaagaagatttagaatgttggttttaagatgtttaagattttgtttatttttatatttaaggttagtagttgagttggggattaggttattgaaattgaaagttagagttgtatttagaatttttttgttattttatggatggtaagaatatgtgagagaaagtatagttagagagaattggtggtggggtaagaagatagaaaaggttttttaatagtttgaagtattttaacgatgtttttagtaattttttaagtaatgggtaatagatttgtttagttagtgtttttagaaaatagagaaatttttgttttttgttaatatagatgtttttggtttattgcggtttttatggtttgtatgttttttgtgatttattaaaatagattagtgagttttaggattttatatttttaattttggttaaatatgatttggattaatatgatgtttatagaaaaagtagtaattatgtttttatttattttggttaagtttttataataaaaatgaagtaaattattattattgtttttgttataaatgaaaaagtaatataatagggtatagagttatagtaagaaagtttagtaattgtaaatgatttttggaaaggaagtgttaattagtagagggtagataagaattttttttttattttttaagtttaattttgtttttagatgaattaggagtagataagaatgtatgattagaaatagaaattaaaagaataaaatggtaattttgatttagagtgtaaatgtagtagattagatgttatatttttaggttaaataaattgtaggagaaaaaaggggaaattagaatttttaatatatgtatttgttaaaaagttgttttaagtgacggaaagaaatttatttgaattttatagtaggaatttttttgtagtttagatgttttaaatgtttttgtgattaagattttagtatagatgttttagaggtagtttgttttagggaggaatttgtggttggggataggttaagataggtatttagaaggtatttatagatgtttttaagatttggtaatagtaggttgggagtcgagtttgggagtgagaagttaagatttatattttttattagtatattttttg

SEQ ID NO: 309 - DNA, 7201 bp, Artificial Sequence
  chemically treated genomic DNA (Homo sapiens)
atagtgtaggaaaaatttatttttataatttaattattttttatcgtgtgttttttacgatatatggggattgtgggtgttataattcgagatgagatttgggtggggatatagttaaattatgttattttatttcggttttttttaaattttatgtttttatattttaagattaattatatttttttaatagttatttaaagttttaatttattttattattaatttaaaagtttatagtttaatattttatttgagataaggtaagttttttttgtttatgaatttgtaaaattaaaagtaagttatttattttttagatataatgagggtataggtattgggtaaatatagttattttaaatgggagaaattggttaaaataaaggggttataggttttatgtaaatttaaaatttagtagggtagttaaattttaaagttttagaatgattttttttgattttatgttttgtatttaggttatgtagatgtaagaggtgagttttaatggttttgggtaatagttaagaaaataaaaatgaaaaattttagtttttgtaatataaataattttatttttttaagtaattaaagattttgataaatataatatgaggtagaggaaattattttgatgagaaataaaatttgtttttttaggtagattatttaaaaggtagagaaaatatttttattatttttattaagagtagattaataatttaagaaaattttgtggtttttaatagaaagaagattaaattttagttttgtattagtgtattttgatattgaaagtttattttaaaatttttgtaataaatttatttaattttatttagtttaattatataagatttttttttttatttttttttttttttttattttttatgtttatttaatttttgttttttattattttttttttttatgttgaaataatttttaaataatttttaaaatagattaaaattatatttttaggtataaaattttgatattgtaaagttattaattttttttaaatttatttataaatgtaatataattttatttaaatttatgtttttataagtaattgagtagatgattttaaagtttaataaaataaatggttttaataggtaagatatttggaaatgtataatgaaagggagttgtataataagattatttatataaattatttaataaatttataataaaaagtgtttttagtatagaaataagatattaatagaatataaggtataaaattagatttaggaatattaaagaatatacgataaaggtgatattttaagtttaaaggggagaggatggttatttaatatatagtgttttaaaatttgttagataagaatggagaggaggaggttttttttttttgattttagggaatgtgagaagagatatagtggttatgaaaggaagtagttatatttgtggatttttattttttttattagagttagggggtatggagcgttttttgttaagatggggatttttaaggaatgtttttttgtgggtatttttttattagatgggatggttagtgtagttaagttggtggttaggtagaaaaaaaagatttagtttgtatttttgagagtttttcggtttgtttatggtatgggtagggagttaaggagtagtagttttgttttagtgtttattagtgtaggaaaaggtgtatagtttgggtcgttagggttttggtggaggcgtagtggtaatagagagggttttttattttagtttaaggaagattaagaatgaatattttatgagtatattagttataaattattatagtaggttttagaaaaaggtttagcgttggaattaggttatttttatttagtagatattagttatataaattaaggattaataggagataggaatattttttttttattttgttttatgttttaagttgtagtggttttttttttagatttttgttattattttagaaaggaatattgaaagaagaaattgaaattataagttgatagtataaagaggatgagtaaaatttaaaattattgtttaaatgaatgaattaagagaagtttaaattattttggattaaaatgtgtgaatttttttttttgttatttagtagatgagaagttggtaatagagattaaaatagtttggagattaaagaattattgtatattttattgttgagttgtattgtgagtaattttagttgattttatttttgtaaattttgtatacgggtatttatatttgtatagagatatgttaatagtggtaaatgttgtatgaggagattgggtgatttttattttcgtttttgtgttttttttttttattgtttttatttatttacgattattttatcgttttttaaaatgtaaaaggttattttgaaagtttaatttaaatttttttattattttgtatttaagtatttattttgattgagattgggtagataggtgaaaattatattaggtttttaattttttaatttttaattatttatttatttatttattttttgagatggagtttggttgtcgtttaggttggagtgtagcggcgtgattatagtttattgtagttttaattttttaggtttaagggatttttttattttagttttttaagtagttgggattatacgtatgcgttattatgtttggttaattttttatttttttgtagagataggattttattatattgtttaggttggttttgaatttttgggtttaggtgagttttttatttgggttttttaaagtattgggattataggtatgagttaaggttttttgtttatatgagattttttgtttttgattttatgtagttagtaattaaggatttggttgttgattttggaggatttgtatgtttttttgagttgtgaattttagtgttaaaagtttataggtagttttgaaatttaaattaaaaggttttatggtttattatttcgattatgttgattttatagaaataatatatgaattaaagatattatttttaaattgagtaaaatttaagtaatttttttaaagtttgatttgtttttaaattatttttggagaaaaaggaaaataaatataaataattaacggtgaatataggttattatatttttgttttttagaattagtagttttgttttttttttgttttagatgttgaagtgtagaaggatattttgtgattgtacgtgtgtaattgataaaatgtgtatttttttttttagttgttatggattggattatgttattatgaataagaatgttgatgggagtatatataaattatttgttttttagtttatttttttttttaaaagtttggaatgtgttattgattagtgggagatgtatttggatagatttatgaaaagagattaataagttttatttaagggattttattttttttaattttatttgaaatggtttttaattgttttttttttatttttgttttttattagttttatagttttttttggttttaaatgtgaatttatatatatttttatttttttttattataattttaagtgatttaatggtttttattttcgatataagtaaaggaggttttgtattaagggtttgtttaaggtacgtagttgagaggcgttaggattggttttatttttatttttatttttattgattttgattatttagaattttaatatgtggggttttagtattcgattaattattttattaagaagtaaaaataatttttcgtattggttttagttattaagtattttttagatttattttgagaaatgtttatcggtttgtatatttatatttttatttttgttttttttttttagaaaggagaaagttagttggatgttttttgaggaattagtgtatggtttaattgtttttttatgatttttgttttatttgttttttatttttttttttttttatcgaagtttataattttaagaaaagtaggtattggttttagggtttttggtttaagaaatattaagtttagtgagaaattttattgattgattttttttgtttatttttttgtgatggagaagtttttaggggtttgttttttgtatgttattaggtttaatttagtattattaggggtaagaaaaggaaagtaatttaaattaatgttgtttataattgtaattattgtaatagttaattattgtgattgtatatgtgtaatagataaaatgtgtattttttttatagttgttgtggattggattatgttatttggaataagaatgttgttaagagtatataagttaggttttttaagttcgtagtaaattttttaaaagttaaatttaaaaattattatatttgaatttagtgataggagaaatggatatggatagagattaaagatttagtttaaattttatatttatttgttagaggattttgaataaattattaaatttttttaaggtttaatttttttattaattataatgaatggtttattattatggggttttggagaagtataattatttgtaattgtaataattattgttattattattatatatattttgtttttaaatggataaggatttttaaggtatatgtaaattgtaaaatataaaatgtaaaatgtcgtaagagatagtagtaataataatgattattatattgttattattatttagtttgtttttttttgttttgtatttttttttttaaatgtttttagaaatttgtatttttattttttattattattttataatatttttgtttttttttttatgtcgggttatgttaattttgaaagttttagttttttttttttttaattttttttttggtatttttgatatgttttttgaaatttatgttaaagaatttttaggttgttattatatgtggtatttttgttgagtatatgaataaattaattggtgtgttttacgaaggatgattatgttttattgtgggattgtatttttttttttttattatagggagaagtgaaatgataattttattagatatagttgagatttttggtattatattttattatgatgacgtgggtttgttttgtgaaaaagttgatattagagtattgatggtttagtttgtgttttcgttgtattttttggtgtttattgtgggttttttgggtaatgtggtggtggtgatgatttttataaaatataggaggtttcgaattatgattaatatttatttgtttaatttggttatttcggatttgttttttttcgttatttttttattttggatttattatgttagggggtataattgggtttttggttatggtatgtgtaagttttttttagggttttattatataggtttgtatagcgagattttttttataattttgttgataatcgataggtatttggttattgtttatgttgtgtttgtttttcgagttcggattgttatttttggtgttattattagtatcgttatttggggtttggtagtgttagtagttttttttgaatttattttttatgagattgaagagttgtttgaagagattttttgtagtgttttttatttagaggatatagtatatagttggaggtatttttatattttgagaatgattattttttgtttcgttttttttttgttcgttatggttatttgttatataggaattattaaaacgttgttgaggtgttttagtaaaaaaaagtataaggttattcggtttatttttgttattatggcggtgttttttattttttggatattttataatgtggttatttttttttttttttattaatttattttatttggaaatgattgtgagcggagtaagtatttggatttggttatgttggtgatagaggtgatcgtttatttttattgttgtatgaattcggtgatttacgtttttgttggagagaggtttcggaagtatttgcgttattttttttataggtatttgtttatgtatttgggtagatatattttatttttttttagtgagaagttggaaagaattagttttgtttttttatttatagtagagtcggaattttttattgtgttttaggttagatgtagaaaattgtttaaagaggaaggattaaggagatgaagtaaatatattaagttttttatatttatttttaaaatagttttttaaatttttagtgtaatattgaagtttttgaagatattgaaatatatatatagtagtagtagtagatgtatgtattttaaggttattattataggttaggggttgggtagcgtatttattattaattttaaaaagtagagttttgtttttttttttaaaatgagttatttatattttaatgtatttgaatgttagatagttattatatgtcgttataaaaaggtaaaattttttatattttatatattaattttagttagttattgatataaataaaatatttttatataatataataagttaattattttattttttaatgtgtttagttttttttttgtttaatgaaaagtttgtttttttagtgtgaataaataatcgtaagtaatataatggtatgttatttttgttttaaatattttttatagtttgttgattttttgtttatattgaatgataaaattttttatgggtgatttatagagttttgagaagtgtgtattgtttttttaatgttaatttgatattgtagaggaggttagggttttttgtatatatgaagtagttcgggtatggagcggggaggtgttgggtttgtagggattttcggtatttgtagtttagtggtttttaaatttgttattagaagtatttggaagttgtgtgaaaatgtggatggttggattttatttaagagtttttgatttagcggatttagaatgagatataagaatgtgtttagtattattagtaagttttttggtgatgttgatgatgttggttttggaattacgtttttagaataattgttttagttaaaatgtttggatattttagatttatttttgaaattgtagattttagtgttagaaggaaatgtaaaatatttttgtgatttaggttttgttaaaaataattattatttaggatagcgtatgtatgttagtttatcgtaaattaattagtttagtgggtttttttattttattatttttatttagttgagtttttt

SEQ ID NO: 310 - DNA, 7201 bp, Artificial Sequence
  chemically treated genomic DNA (Homo sapiens)
gaaaagtttaattaaataaaaatgatggagtagaaagatttattaaattgattggtttacgatgaattgatatatatacgttgttttgggtggtgattgtttttggtagagtttagattataagggtattttatatttttttttgatattaaaatttgtaattttaaggatgggtttggaatgtttagatattttagttagggtagttgttttaaaagcgtggttttaggattagtattattagtattattagaaaatttgttagtgatgttaagtatatttttgtgttttattttagattcgttgaattaggaatttttgggtggggtttagttatttatatttttatataatttttaggtgtttttgatgataagtttgagagttattgagttataggtgtcgagagtttttgtaagtttaatattttttcgttttatattcgggttattttatatgtataggaggttttggttttttttgtaatgttagattggtattaagaggatagtgtatattttttagggttttgtgagttatttatgggaaattttgttatttagtgtgaataggaaattaataaattatgaagaatatttagaataggaatggtatgttattatgttgtttacgattatttatttatattgaaaaaataagttttttattaagtagggaaagaattaggtatattagaaaataaaatagttaatttattgtattgtgtgaaaatgttttatttatattaatagttggttgaagttaatgtataaaatataaaaagttttatttttttgtagcggtatatagtaattatttaatatttaggtgtattaaaatgtaggtaatttattttagagagagaagtaaagttttgttttttagggttgatgatgagtacgttgtttagtttttggtttgtggtaatgattttagggtatatgtatttattgttattgttgtgtgtatattttagtgtttttaagagttttagtgttgtattggaagtttgaaggattgttttagaggtgagtgtggaaggtttaatgtgtttgttttatttttttggttttttttttttaggtaattttttgtatttgatttaaaatataatagagagtttcggttttgttgtggatggagagatagagttggttttttttagttttttattaggaaggaatgggatgtatttgtttaggtgtatgagtaagtgtttgtggaagaagtggcgtaggtattttcggaatttttttttaataaaggcgtagattatcgggtttatgtagtagtgggagtaggcgattatttttgttattagtatgattaggtttagatgtttgtttcgtttatagttatttttaaataagatggattgataggaagagagaaggatagttatattgtagggtgtttagaaaatgaaaaatatcgttatgatgataaaaatgagtcggatggttttgtatttttttttattggggtattttagtagcgttttgatgatttttgtgtagtagatggttataacgagtagagggagaacgagatagaagatggttatttttagagtgtggaaatgtttttagttatatattgtattttttgggtaaagagtattgtaaagagtttttttaaataattttttagttttatagaagataaatttaggaagagttgttagtattgttaggttttaggtgacgatgttggtgatgatattaaaagtgatagttcgggttcgaagggtaaatatagtatggataatggttaggtatttgtcgattgttagtaggattatgaaaaagatttcgttgtataagtttgtgtgataaaattttgagaggagtttatatatgttatggttaaaaatttagttatgttttttgatatagtggatttagaatggaagggtgacgaggaagagtaggttcgaaatggttaggttgagtaggtagatgttggttataattcggagttttttgtattttatgaggattattattattattatattgtttaagaggtttatagtgaatattagggagtatagcgggggtataaattgggttattagtgttttggtattagtttttttatagagtaggtttacgttattatagtaggatgtggtattaaaggttttaattgtatttagtgaggttgttattttatttttttttgtgatagaagaagaaaaatataattttataatgaagtataattatttttcgtaaaatatattagttgatttatttatgtatttaataaagatgttatatgtgatagtagtttagggattttttaatatgaattttaaaaggtatattagaggtgttaggaaaaggattgaggaaggaaagagttgaagtttttaaagttagtatgattcggtatgggaaaagaagtagaaatgttgtggggtggtggtgaagaatggggatatagatttttgaaagtatttaaaggaagaaatataaaataggaaaaaataggttagataatgataataatataataattattattattattattgttttttacggtattttgtattttatgttttatagtttatatatattttaaaaatttttatttatttaaaagtaaaatatgtataataataataataatgattattataattataagtaattatgtttttttagggttttataatgatgagttatttattatagttaatggggaaattgaattttgaagaaatttagtaatttgtttaaaattttttaataagtaaatataaaatttgggttagatttttagtttttatttatgtttattttttttgttattagatttaaatgtagtgatttttaaatttaatttttgaaaaatttgttacggatttgaggaatttggtttgtgtgtttttaatagtatttttattttaaatggtataatttaatttatagtagttgtgaaaaaaatatatattttgtttgttatatatgtataattatagtaattaattattataataattataattataagtagtattagtttaggttatttttttttttttgtttttggtgatgttgagttaggtttggtaatatgtaaaaagtaaatttttgggagtttttttattataaaggggtaagtaggaggggttagttaatgggattttttattggatttgatattttttaggttaggagttttaaggttagtgtttgttttttttgagattatagatttcggtggaaaaggaggaaaatagaaaatagataaggtaggagttatggaaggatagttaagttatgtattagttttttagagggtatttaattgatttttttttttttaggaggaagggataagggtgaagatgtgaatatataggtcgatgggtattttttaaggtaaatttgagaaatgtttaataattggggttaatgcggggaattgtttttgttttttaatagaataattgatcgaatattgaggttttatatgttggggttttgggtagttaaagttagtgagaatagagatggaaatggagttagttttagcgttttttagttgcgtgttttggataagtttttaatgtagagttttttttatttatatcgaaagtgaggattattgggttatttggggttgtgatgaggaaaaatgagagtgtatgtgagtttatatttgaaattagaaaaagttgtaaaattggtaggaagtaggaatgaaagaaggataattagaagttattttaaatgaaattaggaaaaatagggttttttgggtggaatttgttgatttttttttatgggtttgtttaggtatattttttattgattaatggtatattttaggtttttgaggaggaaaatggattgaggaataaatggtttgtgtgtgtttttattagtatttttatttataatagtataatttaatttatagtagttgagaaaaaaaatatatattttgttagttatatacgtataattatagagtgtttttttgtattttagtatttaaagtaagaaaagaatagaattgttaattttggagaataaaggtatagtagtttgtatttatcgttaattatttgtatttatttttttttttttttaagagtgatttaaaaataggttaaattttaaaaaaattatttaagttttgtttagtttgagggtagtgtttttaatttatgtgttatttttataaaattaatatgatcgggatgataaattatagaattttttggtttgggttttagggttgtttatgagtttttagtattgaagtttatagtttaagaaagtatgtaggttttttagagttagtagttaagtttttgattattagttgtatgggattagagatagaaaattttatatgggtaggggattttggtttatgtttgtaattttagtattttgggaggtttaggtgggaggtttatttgagtttaggaatttaagattagtttggataatatagtgagattttatttttataaaaaaataagaaattagttaggtatggtggcgtatacgtgtggttttaattatttggggggttgaggtgggagaattttttgagtttagaaggttgaggttgtagtgaattgtgattacgtcgttgtattttagtttgggcgatagttagattttattttaaaaaataaataaataaataaataattaaaaattaaaaaattaaaaatttgatatggtttttatttgtttatttagttttaattaaggtgaatatttagatataaaatagtgaagaggtttgaattaggtttttaaaatggttttttatattttggaaaacgatagggtaatcgtaaataagtaagaataataagaaagaagagtataaaaacgaaagtaaaaattatttaatttttttatgtagtatttattattgttaatatatttttgtgtagatatggatgttcgtgtgtaagatttataaaagtgaggttaattaaaattatttataatataatttagtagtgaaatgtgtaatgattttttagtttttaaattattttggtttttgttattagttttttatttgttggatagtaggaaaaaggatttatatattttagtttaaagtggtttaaattttttttgatttatttatttgaataatgattttaggttttatttattttttttatgttgttagtttataattttagtttttttttttagtgtttttttttaagatggtggtagagatttggaggaagggttattataatttgagatatggggtagagtgggaagggggtgtttttgttttttgttggtttttgatttatatgattggtgtttgttgagtgggggtgatttggttttaacgttgagtttttttttggaatttgttgtggtggtttgtagttaatatatttatgaggtatttatttttagttttttttgggttggaatggagagttttttttgttattattacgtttttattagggttttggcggtttaggttatgtatttttttttgtattggtaggtattgaggtaaggttgttgttttttgattttttgtttatgttatgaataaatcgaggaatttttaagagtataaattagattttttttttttgtttgattattaatttaattgtattggttattttatttggtaaggaagtgtttatagggagatattttttgggggtttttattttagtagagagcgttttatgttttttagttttgatggggaaggtagggatttataggtgtgattgtttttttttataattattgtgtttttttttatattttttggggttagaggagaggagtttttttttttttatttttatttgataaattttaaaatattatgtgttgaataattatttttttttttttgggtttgaaatattatttttgtcgtatattttttaatgtttttgaatttgattttgtattttatattttattgatattttatttttgtgttagagatattttttattgtagatttattagatgatttatatagatgattttattatgtaatttttttttattatatatttttaaatgttttatttattagagttatttgttttattaaattttaggattatttatttaattatttataaaaatataagtttgggtggaattgtgttatatttgtaaataaatttaggaagaattgataattttataatattaaggttttatatttgggaatgtgattttgatttgttttgaaggttatttaaaggttattttaatatgaagaaagaggataataaagaataaaagttaaatgaatatagaaagtaggagggagagaaagaatgagagagagaattttatgtggttaaattggataaaattgaatgaatttattataaggattttaaaatgggtttttaatattaaagtatattgatgtaaaattagaatttggttttttttttgttaaaaattataaagtttttttggattattagtttatttttgataagagtaatgaaagtgttttttttgttttttaagtgatttgtttaaaagagtagattttattttttattaaaataattttttttgttttatgttgtgtttattaagatttttgattatttaagaaaatagagttatttgtgttataggaattaagattttttatttttgtttttttaattattgtttaagattattggaatttattttttatatttgtataatttggatgtaagatatggagttaaaggagattattttggagttttaaggtttgattgttttgttggattttgaatttgtatggggtttgtagtttttttgttttggttaattttttttatttagaatggttgtatttatttaatgtttgtatttttattgtatttaggaagtaagtaatttgtttttgattttataagtttataggtagaagggatttgttttgttttagatgagatgttggattgtggatttttgagttaatgatgaaatgagttaagattttgggtgattgttgggaaggtatgattggttttgaaatgtgaggatatgagatttgggaggggtcggggtagaatgatatggtttggttgtgtttttatttaaattttatttcgaattgtaatatttataatttttatgtgtcgtgggagatatacggtgggaggtgattgaattatgggggtgggttttttttgtattgt

SEQ ID NO: 311 - DNA, 5559 bp, Artificial Sequence
  chemically treated genomic DNA (Homo sapiens)
taattttgaaagaagtgggtaaaatgttattaaatagtattatatggtatggagaaattttttgtgaagggaagagtcgattaaggtggtaaattgtattgttattttattttaagaaattgttatagttatttttagttttagtaattattattttgattagtaagtagttattaatattaaaataagatcgttattttttttagtaaaaatattatgatttgttgaaggtttagatgatggttagtatttttagtaatataatatttttaattaaggtatgtatattggtttttttgatataatattattgtatatttaatagattatagtataggataaatataatttttatatgtattgggaaattaaaaaggttatttttgagatatttgttttattgtggtggtttgaagttgaatttataattttattaaggtgtgtttgaatttttttagttaattggttattgttatagtttattttgtgttggttaagatgttttagagtggtaggtatattgtgtggttatatttaagggtttagatatggtgggggttttaaatggatttagatatgtgagatttttttttgatttgattttttttaatttattattttttgggtgttgggtttattttatttagaaagtaggatttaatgtgatagtttttgtttagtttttttttgtggtagttatttgatttaggggtatttttgatttttgtagttttatttatatattttatttttatttttattaattttttttaatttttattttttttgtttagtttgtttgttgtttagtgggggttttatttatgttggtttttttttttgtaagtttttattttttatatggtttttttagagtttttttttttggttttgaggagagatgtttttattcgtttttttattaattttgtttatttttataatttatttattattttaattgttttcgtatatagattggagtgagaggagttgatgtgatgggtgtggatatagggttggtgttgttattttttagtaagttttgggagaggtgtttgagtttaggtgttagtggttttttttggaattgtgagtgtataatatttttttgtttttagttttaggttatagttgttagttttgggataattagaaaagttttatataatttcgtgttatgtgtagagttgagtatagagttttaggtatgatttgatttatttaagattatagtgagtttattgtattgttgaattgttagtttagatatttgttattgtatttatatggtattagttttacgtttagatatcgatttgaaagaaattttttaaatgtatagagaagattttttagttgagttaaggggtttttattaggtttgagtttatttaatgaatttatgaggtagatagtttgtatatgtttatttggtttgatgaattgtataaatttttatgggggatgtggtttatgggttgggaagtgggttattttgggaaaggtttataggatagaggtagggatggagataatagtatggtgagtttttaatttatttacgatgataggtgtttgaggtagaaggtaaagaggttgttatttggtgggtgttataagatttaagtgttattgttgaggtatatgggtaataaagcgtggtattggatgggggtagattttttttatttttgtgaggattagggggattttttggtttttttgttaaaggtggttttagggataggaagagtgtattttttgatagggatgttagagtattgatggtgataattagtgtgatattgtttatatgattgaataatcgagaagagttcgattgtttattgaataacgggaagagttcgattgttaatgacggagttttgttaaatatagttaaggttattttgttgaatgaatgaagttagataggaaagaggatagtatttttaatttatttatagaagttaaagataggtttatttaatttttatgaagatagagtggtttttatttttgggtggagtaaaaggtattttttgaagtgatagggatgttttttattattttgattcggagtggtagttatatgtatgtatgtatattaaaatttattaagttgtattattaagtgtgtttttttttaataaaaataataaagaattatatttataaagaattttttaataatataggaaaatgtttatattataatttttagttaaaaaaaaaaaaaaagaagtcgtttatagaatggtatatgtatgagaataattaatcgaaaagtgtatgggaaaagttaggattgaaatattatgttttaaaagatattgttttgatattgtgagaatgtatttaagtttttttttttttttgttttttttaattttatataatgagtatgtgttggttttataattagatattttgtttgtttggtttggttttgagatatagtttgttgttatttaggttggagtgtaatggtttaattttggtttattgtaatttttattttttgggtttaagagatttttttattttagttttttgagtagttgggattataggggcgtattattatatttagttaattttgtgtatttttagtagagatggggttttattatgttggttaggttggttttaaatttttgattttaagttatttattcgttttggttttttaaagtgttgggattataggtatgagttatcgtatttggtttagatatttgtttttaaaaataaaagatttatttgttttttttatagttcgttttattgttgattgatattgattaggagttaatttaggttttagggatttttataatagttgttgtatggtagggtttttgtttattgtgtttatgtagttggtttttgtatttaaagtgaataattaatattttttttattttgttgacgatgttttgaaaatatggtttagaaatggtgtgagtaaggagatagtaaagtaatgtttggaatataggtgtagtgattagatatggggtagttgtttaaagataaaaaggttttaaaaaggagggatggtacgaaatattttttaatatgggtatggagtttagagtgataaagtgattaaaagtttattttttatggggtgttcgaatgtatttaataataaaaagagaataagagttatgtaaattgagagggataaagtagaaagagtagtagatattaagtaattaagttatagtatgataagttgttagtttgttgttattattgtatttagaataatattttatttaaatgttgaagaattttttatgggtttttatttttttgtgaatttttgggttgaatttttttgttttgagtggttattagaatatatttttggattagaaatataaaagtggagtaatatatattgtaaagttgtgtttttttgttttagtttgtgaatttttattttgttttttatttagtttatattttttaaattaatttggttatagaattatgtagtatttagggtggaagttgttttaggtttagtacgttatttaatagatgaggaaatggaagtttgggtagtggaagtattttgtcgaggttatatagtaagttagtagtatagcgtgtgtgatttcgagtttgtttcgttagtttatattgttttttgggggtgagtatgtttttatattttttaatattttaatgatagataaatagaatatggtaaagttttagttttgtatggtgaaagtaagaattagtaattgttataaatagaaatatagtgttggttcggtagttttcgggggttttgtataagtggattattagtgaatataaggttatttatttttcgaaaaattaacgttgtatttatgttattttttataaaattttatattaatttatttgttatttatttttgaatttttttaaaagtatattttatatttttttgtttaaatagtttttcgagggtgggtgtttaaaaggttttatatttgttattattttttttttattataggtatattgagtaagtttgtatttgggtttttttaaaatttttattttatagttaagaaaattaaggtatagagttttaataatttggttagagttaagtagtagtaatgaagttggaggttaaatttagtagtatgattgtagtttttaattaatgttttttgaattgtatatatgggatgaattagaatattttttcgatgattcgttgtttttgttatgattatgttattgagttttgttgtagtatagatatatgtttttatatggggcggggttgggggtgttttgatcgttgggttatttttatattgttttggttttttttaagtagttatttttttttattttttaagtattagtaattagttttatttttttagtttttagtttgttgaaattaatttgttatagatagagatttcggtgaattaattttattaggatttgattaaataaattttttttgataaaggattgttgaaagagtaattaagagtttgatgtttattgagtgtatagtatgtgttagatgttggtcgtggatgttttatagaatttttttaataatttatgaaatgattattgttatttagtttaatatttagacgagaaagttgagggtaagataggttttaagtttggtagtttgattatagaggttattggtttagtttttgggttagtttgtttttgtaggattgggggtacgtaattttgttgtttggggttttatttgtttttttagagattataagttaaagttttttattttagagttaaggttacggaagtttagagggtattttgtggttcgggagtagttttttgttgtttttttagttttgttgataatatttgagatttttagatgttattaattattaagagagtttgatatgattgtatatagtatagttataaagaatttgaatttgattatatatttatgttatgtggaaaattttttatagttttagatagattatatttggagtgaagaattttgttatttatgtatttggtatagtgtgagtttttataaatgtttattggtttgaagggtaataaaatagtgaatagagtgaaaatttttattaagattttgggtttagaaaaagatgggaaatttgtttagtttattcgtgagtttatagttaaaattttttagataataggtttttttcgtttatagagaataataatattgggtggtgagtatttgtgtgggggttggggtgggataggggatacggggagagtggagaaaaagggggtatagggttaatgtgaagtttaggatttttttttatatttaaagttggtttaagttggttttaattaatagtaatttttaagataattagaatttttttaattttttagttttattgttgaaaagttttgtgattttgtataaattatttgttttttggatagtaattttttttattaaaatgtgggtttttgattagatgaatgtaaatgtttttttagttttgatattttttattttttatattttttaataga

SEQ ID NO: 312 - DNA, 5559 bp, Artificial Sequence
  chemically treated genomic DNA (Homo sapiens)
tttgttagaaaatataaagaataaaggatattagagttagaagaatatttatatttatttagttaaaagtttatattttagtaaaagaaattattatttaagaagtaaatgatttgtataagattatagggttttttaatagtaaggttaaaaggttaagaaaattttgattattttaagagttgttattaattaaagttaatttaaattaattttaaatgtagagggggattttggattttatattaattttgtgttttttttttttttatttttttcgtattttttattttattttaatttttatatagatgtttattatttaatattattgttttttgtaaacggaaaaaatttgttgtttaaagagttttaattatgggtttacgggtgagttaaataggttttttatttttttttggatttaggattttagtggggatttttattttgtttattattttgttgttttttaaattagtaagtatttatgaggatttatattatgttagatatataggtggtaggattttttattttagatataatttatttgaagttatgagaaattttttatatgatataagtatatggttaagtttaggttttttatgattatattatatatagttatattaagtttttttggtggttggtgatatttgaaaattttaagtattgttagtagagttgagaagatagtagagagttattttcgagttataagatgttttttgggttttcgtgattttggttttagaataaaaagttttggtttgtgatttttaagaaggtaaatgagattttaaatagtaaaattacgtgtttttaattttatagaggtagattaatttaggggttaagttagtggtttttgtagttagattgttaagtttgaaatttgttttatttttagttttttcgtttgggtattgggttgaatgatagtagttattttatgagttgttgggaggattttatgaggtatttacggttagtatttagtatatattatgtatttagtaaatattaaatttttagttatttttttagtagttttttgttagagagagtttatttgattaaattttaataaaattggtttatcggagtttttgtttatagtagattagttttagtaaattagaagttgaaaaggtaaagttaattgttggtgtttggagaatagaaagaaatgattgtttgggaaaagttagaatagtatagaaatagtttagcgattaagatatttttaatttcgttttatatagggatatatgtttgtgttataatagagtttagtaatataattataataaggatagcgaattatcgagaaaatgttttagtttattttatatgtgtaatttaaaaggtattgattaagaattgtagttatgttgttgggtttaatttttagttttattattgttatttggttttgattaaattattgaagttttgtgttttagtttttttaattgtagagtggaggttttaaaaaaatttaaatataaatttatttaatatgtttgtggtggagagggaatgataataagtgtagagttttttgggtatttattttcgggggattgtttaagtagggaaatataaagtgtgtttttgaaagagtttaaaaataggtaataaataaattaatataaaattttatagaaaatagtataaatataacgttggtttttcgaaagatagatagttttgtatttattggtaatttatttgtgtagaattttcggaggttgtcggattaatattgtatttttgtttgtggtaattgttggtttttatttttattatgtagagttgaggttttgttatgttttgtttgtttgttattagggtattggaggatgtgaagatatatttatttttagagggtaatgtgggttagcggagtaggttcggagttatatacgttgtgttgttgatttgttgtgtgatttcggtaagatatttttattgtttaagtttttatttttttatttgttaaatgacgtgttagatttggggtagtttttattttaaatattatatgattttatggttaagttagtttgaaaaatataggttagatgggaaataaggtgaggatttataggttgaaataaggaagtatagttttgtagtgtgtgttattttatttttgtgtttttggtttagaggtgtgttttagtaattatttaggataggggggtttagtttaaggatttataagaaagtggggatttatgggaaattttttagtatttaaatgaaatgttgttttggatataataatgataataagttagtagtttattatgttgtgatttagttgtttggtgtttgttattttttttattttgttttttttagtttgtatggtttttgttttttttttattattaagtatattcggatattttataggaaatgaatttttgattattttgttattttagattttatgtttatattggagggtgtttcgtgttattttttttttttggggtttttttgtttttaaatagttgttttatgtttagttattgtatttatgttttaagtattgttttgttgtttttttgtttatattatttttggattatatttttagagtatcgttaataggatggggagaatgttaattatttattttgggtgtaagggttaattatatgagtatagtgagtagaaattttgttatatagtagttgttgtgaaaatttttggggtttgagttgatttttggttaatattagttaatagtgagacgggttgtaaaaagagtaaatgaattttttatttttaaaaataaatgtttaggttaagtgcggtggtttatgtttataattttagtattttgggaagttaaggcgagtggataatttgaggttaggagtttgagattaatttggttagtatggtgaaattttatttttattaaaaatatataaaattagttggatgtggtggtgcgtttttatagttttagttatttaggaggttgaagtgggagaattttttgaatttaggagatggaggttgtagtgaattaagattgggttattgtattttaatttgggtgatagtaagttgtgttttaaaattaaattaaataaataaaatgtttaattataaaattaatatatgtttattgtataaaattgggaaaaatagaaaaaaggaaaaatttaggtatatttttatagtattaaaataatgttttttaaaatatgatgttttaattttgattttttttatgtatttttcgattaattgtttttatgtatatattattttgtaggcggtttttttttttttttttttagttaaagattatagtgtagatatttttttatattattaaaaaattttttataagtgtagttttttattatttttattgaggaagaatatatttagtggtatagtttggtgagttttgatatgtatatatgtatgtaattattatttcggattaagatgataaggaatatttttattattttagaaggtgttttttgttttatttagaggtaagggttattttgtttttatagagattaaataagtttgtttttaatttttataaatggattaaagatattgtttttttttttgtttggttttatttatttaataaaatagttttaattatatttaatagagtttcgttattgatagtcgggtttttttcgttgtttagtagatagtcgggtttttttcggttgtttagttatgtgagtagtgttatattgattgttattattagtgttttgatatttttgttaagaagtatattttttttgtttttagagttatttttagtaggagagttagggagtttttttgatttttatagaaataggaagaatttatttttatttagtgttacgttttgttatttatgtgttttaataatgatatttgagttttatgatatttattaggtgatagtttttttattttttgttttagatatttattatcgtgggtgggttgggaatttattatgttgttgtttttatttttgtttttgttttgtagattttttttagggtaatttattttttagtttatgaattatattttttatagggatttgtgtaatttattaaattaagtggatatgtgtaggttgtttattttatggatttattagataggtttaaatttggtgggagttttttagtttagttgagaagttttttttatgtatttaggggattttttttagatcggtgtttaggcgtgaggttagtgttatgtaggtatagtaatagatgtttaagttaatagtttaataatataatagatttattgtgattttaagtgagttagattatatttggagttttatatttagttttgtatataatacgagattatgtagggtttttttggttgttttagaattagtaattatggtttaaggttgaaggtaaagaagtgttatgtatttatagttttaaagaaaattattgatatttgggtttagatattttttttagggtttattagaagatgatagtattagttttgtatttatatttattatattaattttttttattttagtttgtatacggaggtaattaggataatgaatggattgtagaagtgggtaggattggtggggaagcgagtgagggtatttttttttaaagttaaagaaaggggttttgaagaaattatatgaggaatggggatttgtaaaaggagaggttagtatgggtggggtttttattgggtagtagataagttgagtagggggagtggggattggagagagttaataggggtagagatagggtgtgtaagtgaggttgtaaggattaagagtgtttttgggttaagtggttattataggagggaattgggtaggaattgttatattgggttttattttttgggtgagatgagtttagtatttagaaaatggtgggttggaagaagttaaattaaagagagattttatatatttagatttatttggagtttttattatatttaggtttttggatgtgattatatagtgtgtttgttattttggggtattttgattaatatagagtggattgtggtagtggttagttagttaaagaggtttaggtatattttggtgagattgtgagtttagttttagattattatagtaaagtaaatattttaaaaataatttttttggttttttagtgtatataaaagttgtgtttattttatattgtagtttattaagtatgtaatagtattatgttagaaaaattaatgtgtatattttaattaaaaatattgtattgttaaaaatgttaattattatttgagtttttagtaagttatagtgtttttgttgaagaggatggcggttttgttttgatgttgatggttgtttattgattagggtggtggttgttaaagttgggggtggttgtggtaattttttaaaataagatgataatgtaatttgttattttggtcgatttttttttttataaaagatttttttatattatgtgatgttatttgatagtattttatttattttttttaaaattg

SEQ ID NO: 313 - DNA, 5349 bp, Artificial Sequence
  chemically treated genomic DNA (Homo sapiens)
ttttatttttttaatgtattttttttttttaaattttttagttaagtttttatttggatatttttaaagaaattttgttttaaagagtattgagaatagtagtgatgaaacgcgtaggtcgttttttagtgtttaaattttttattttgtaggttttttataagtatttttttgttttttttttttttttttttttaaagatattgtattaatattttaggatttattttttggttatttttgaagtgttatttttttagttttagtttgtttttttgttttgtaaatatgagtttaatattttagtagttttatcggcgtttttgggtttaattataatttttttatgtaagatcgtttttgtattttttgttaagttttttttttatgatttaatagtggtaatttttatttttatttttattattacgataataattataattataaagttgttattgtgtatttaatgttgtgtgaggtatgaattttgttttcgatttttatatgaattatttataaatttaaaattttcgtgtattgattaggagatagatatttagaggttaatttgaaaagtgattttcgatttttgatatgagtttaaagttatgttaagaatttttaagaatttttagttatacgagatattaatttttttatattttaggtattttaatgatatttattttttttttttttagatcggtttttataattgtttttttacgtagaaataaattagtaaataaaaagtaagtttttagtttgatttttttatttttgtttcgatgtaaaatttggtattattttgattttttttttgtttgttttttattgatattttttaaaatatttttttatattattttttttttatatgtattttagaaaggtatgaatttttggattagatgatatggttttgagattggttttttaatttattggtgtatgaatttgaggaagttgcgttttttttttgagttttagtttttttatttgttatttgaggaggattatgataattttagggtttttgggtttttagtgaggattaatgaaaatgaatgggtgaaatggcgagggttagttttatatgttggacgtttttggtttcggtttttttttttattttgtgatgttaggtagggttgtcgttaggaggagggtgtatttgttttgtgatttgtttttttttttatcgtaaattcgttttttgtttttttacggtttatagacgtttgtgtttttgtattgttgttagtttttcggttttgtagttattttttttagttttttattgagggttggtgtttttatttgtttttattgttttttatttcggtgtttttttgtttttttatttaggtttatgttgtttgtttttaaattgtttttttttttttgtttatttggttagatttgagtcgtttttttggttgagttttagttttttacgaagagtttgaagtttaggatgttggaggtggaggagtttttttgtgtttttttttgtgaattggacgttcgtagtggtatttttttattgattcgttatacgtaggttttttgtatattatatgtggtttgtattgttatgtatttaggttttaattttttaattatatgagtttttaaaaggtgggaagtaaatggtatatttttaattatttttgtagtttgtgtgttgtatatagtaattatttgaaaaaatgattcgtatttgaaaaataatttataataggtgtttttttggttatttgggagagtaatttttaggttagttattttatggggtagaataatatagagtgattttttatgtttaaatgtattagtatatatagtgagtattgaaggatatattatttgatattttcgtaaattttaaaatttaaggtgttagtatagtttgtatttttttttataaaatgtgtttttgtttttattagagaatttgttgatgtaatttgttaagtagttttttttaatttttttatgaagaaaaagatatagatttaaattatataatatagatttaagtattgttgggttcggtagtttatgtttttgtaatgggtgtgagtttgtggttgtttgttagttgttattgttgtaggttttttttttttgtttttttatttttagtatttgtgttaattttaggtttttttggggagggttttgtaaaaattaataaatgacgtttttattttaatttgttttgttttttaaaaatatgtttattattttagaagttttgtgcgtataatgagagtagaaaattgttttagttatttattattttgagttatggtggttttaatagtgatttatttataattttttgtggttttgggggttaattgggttcggttgagtgttttttagttggggtttttattgtaggtattattagagagtgggtgggagttatgttattcgaaggttcgattgggttgggggatttttatatgtggtcggtaggtggtgtattgttgttgtttggtattttagtaagaatttttaattagtttattatattgatttttttaaagtttatatagagtgttattttaggggttaataaagtatttattatttttttaattttgttgataattttaaaagatgattgatatttagatgattaatgtttataaagtggtgtgttatggtttttagtgtgtgtgttatggtttttagtgtgtgtagagtttgtttgtgaattaaaggtaattataaggagaaacggttatggtgatttattttgagttgtatatagtgttttttgtaggattgtagttagaggtagatggtttttttagaaatgttttaatgttgagttttaaagtaattttttatgattgttatttgaatttattaaattgtttttggttttttttaggaatgaatttttgatgttgttgtggaattttttgtttggaaatttattgttatgaaatatgtgattgtaagttatatttttcgttttttatgtattttatagtgtttatgtaaatgaatagtgtgattttaaatttgaggaagttttaataagagtgagatttaagaggatttttaatataggggtatttttagagagttaaaaattaaataggttttagtttttttagggtgatatataatttagatttgatttggaattatagaaggaatatggggtaaaggatatgagaaatattgtagaggttagtgttatatggagtttttattttagttttcgaagtaaaggtaattagtttaggttgggagttagttagtagtagggttttaatttttatttattatttttttttttggggtagggagggtgttgtagggaggaggttatttttggagatttttagatttttgtttttgtgtagtttaatagaaggggtttttatagtggttatgaatttttttgttttgtaaggaagggggtgttattgggttttttgggttttttagtatttgcgtggttatataacgcggttttgtttaatacgttatatttttgtttaattaatgtttatttttggtttttagtaaagtttaatttgtttttcgtttttttttttttttttttaggtaggtattgttagggttaattatttataaaagggtttatttttttatttttacgttaagtaagattatttaagggtagtgttagagggtatttgagaacgtaggaggggtgtgttatttggtggtttgttttttttttttatgggtagtttttttataggaagtagaagttttaggggcgatggtagaaatgaggaggaggggatggagttgaggtagtaggggaggggtcgtaagagtagaggggagggttttgttttgttcgttatttaataattagtaggtttcgggttggggtgaattattggggaggagcgttttagggttttttttagatggaggagggataggttatttagagtgaaggaagttgtgagttttgttagaggaaaatagttaggatttagttaggagaggttttgtttggaaggattgttgtaaggtagggagaggaatgatggtagtaagaggatttcgtgattataggtttgtaagtattttaaatagaaaaggttttttttttatttagtaagggggagttattggggttagtagagtttttggaggggattttggataaattcgggaaaatggttagtggggttgagtaggatataggttttgttgtgtttagttggttttttagagagatgataaggggtgcgttttagttttttaggtttatttaggcgtgaggacgtggagtttagggttttgtaggaaggagcgatttaggtgaggtgtggttaagatagagtagagttgggtagcgggtagtggagtttcgtgggtagtttgggggtggggaggtatagtgtattgggaagtggagaaagtgtgagtttattaggttggttgagaattgattacgaatttattgtttgtaaaatttttgttattttttgagacgtggtttatagtaatttaggtgcgaatagttttgtgattttagggtttttttttattttttaagtatttgtatttataaataaatttttgagtgatttgtcgttagttgttttttttgatatgtttaaagatagggtagtgattcgtatcgttatttagagattttgtttttgtgttatatgaagattaggtgttcgtttttgattgaggagtttttttgttgtttttaaagtattttgtaataatagttgagatgtatggagaattattttttttttaggcgttgtttttcggttttcgtggacgggtatggttatttttcggaattttttgaggttagagttgttatggttttttttttgaaagaggaaatcgaggtttgttggggtttagtggtttttttgtggttgtatagttttcggggtggggttaggattgattgattttatataaaagtgttttcggtttatgtttttaatttatacggttttttgtaaacgtttttaaatttttttagtcggtttgtagagattttttgtttttaggagataattaggtaaaggagtatgaaagtttgggtataaatttattgttgtaaattgaaaattatgtaaaggttgtttttttttggggagtttaatgttttttttttttttattattttattattggttggattttgattttagggattttacgattatttaatattttataggatatatatggttaattatttgtatttgggtaaataggcgttattttttaataggaagtggtaatttagaatttgtttttgggtaattttagtagtttatcgttttttttttaatgattgttaga

SEQ ID NO: 314 - DNA, 5349 bp, Artificial Sequence
  chemically treated genomic DNA (Homo sapiens)
tttagtagttattaagaaaaaagcggtgagttattagaattgtttaaaagtaagttttggattgttattttttattgaaaagtaacgtttatttgtttaaatgtaaatggttaattatgtatattttgtagggtattgagtaatcgtaggatttttggaattaaagtttaattaatggtaaagtgataagaaaaagagaggtattgaattttttagaggaagatagtttttgtatggtttttaatttgtagtaatgagtttgtatttaaatttttatatttttttatttggttattttttgggagtaaggagtttttgtaagtcgattgggaagatttgggaacgtttgtaagaggtcgtgtgagttaaagatatgggtcgggagtatttttgtgtggagttagttagttttggttttatttcgaaagttgtgtagttatagaagggttattgagttttagtaagtttcggtttttttttttagaagaaagattatgatagttttaattttagagggtttcgagaaatagttatgttcgtttacggaagtcgaggagtagcgtttgaaggagaggtggttttttatgtattttagttattattataagatattttgagagtaatagaggagttttttaattaaaagcgggtatttaatttttatgtggtatagagatagaatttttgggtgacgatgcgggttattgttttgtttttagatatattaaggaaagtagttgacgataagttatttagaaatttatttgtagatgtaagtgtttaaaaaatagaaaagaattttagaattataaggttgttcgtatttgggttgttgtgaattacgttttaggaaataataaaagttttatagataataggttcgtgattaatttttagttagtttgatggatttatattttttttattttttagtgtattgtgtttttttatttttaggttgtttacgaggttttattgttcgttgtttagttttgttttattttgattatattttatttgggtcgtttttttttgtagagttttgagttttacgtttttacgtttgagtgagtttgagaagttggagcgtattttttattatttttttggggaattagttagatatagtaggatttgtgttttgtttaattttattggttattttttcgggtttgtttagggttttttttaaagattttgttggttttagtggtttttttttattggataaaagaagggttttttttgtttgaagtgtttgtagatttatggttacggggtttttttgttgttattatttttttttttgttttataataatttttttaaataaagttttttttgattaagttttggttgtttttttttaatagagtttataattttttttattttgggtgatttgttttttttttatttgagagaagttttggggcgtttttttttagtagtttattttaattcgaaatttgttgattattggatggcgaataaagtaagatttttttttttgtttttacgattttttttttgttattttagttttatttttttttttttatttttattatcgtttttgaggtttttgttttttgtagaagggttgtttataggaggaagaaataggttattaggtaatatattttttttgcgtttttaggtgttttttaatattgtttttggatggttttgtttagcgtgaaggtaagaaagtaagtttttttatagatgattagttttggtaatgtttgtttggaaagaaaagaaagaaaacgaaaaatagattggattttgttggggattaaaaatgaatattaattaagtagaaatgtaacgtgttgaataaaatcgcgttgtgtggttacgtagatgttgagggatttaggaggtttaatgatatttttttttttgtagaataaagagatttatggttattgtgggggttttttttgttagattgtatagaggtagggatttggaggtttttaagagtggttttttttttgtaatattttttttgttttagaggggaaggtagtggatggagattgagattttgttgttgattggtttttagtttgggttggttgtttttatttcgagagttgaggtggaagttttatatggtattgatttttgtaatgttttttatgttttttgttttatattttttttgtagttttaagttaaatttaaattatatgttattttgagaaagttgagatttatttggtttttagttttttaaaaatgtttttatattaaagatttttttagattttatttttattgaaatttttttaaatttaaaattatattgtttatttgtatagatattgtgaggtgtataaaaggcgaggaatgtggtttatagttatatgttttataataataagtttttaggtagaaaattttatagtaatattagaagtttatttttaagaaaagttagggatagtttggtaaatttagataatagttataaggagttgttttaaaatttaatattgaggtatttttaggaaagttatttgtttttggttataattttatagaggatattgtgtatagtttagaatgggttattatgatcgtttttttttgtgattgtttttaatttataaataggttttgtatatattggaggttatagtatatatattggaggttatggtatattattttgtggatattggttatttgggtgttagttattttttgaaattattagtaaagttgaaaagatagtaaatgttttgttaatttttaaagtaatattttgtataaattttgaggaagttaatatggtgagttggttgggaatttttgttgagatattaggtagtagtagtgtattatttgtcggttatatgtgggagttttttagtttaatcgagttttcggatgatatggtttttatttattttttgatggtatttgtagtggaggttttaattgagaagtatttagtcgagtttagttgatttttagagttataagagattgtaaataaattattgttaaagttattatgatttaaggtggtagataattggggtagttttttatttttattgtgcgtataaaatttttgaagtaatgaatatgtttttaaaaaataaaataaattaaaataaaagcgttatttgttggtttttataaaattttttttaggaaagtttagagttagtataggtgttgagagtggagggataggaagaagaaatttataataatgatagttggtaggtagttataggtttatatttattgtaaaaatatagattatcgagtttagtagtgtttggatttgtgttatgtggtttggatttatatttttttttttataaaaaagttaaaaaaggttatttaataaattatattagtaaattttttagtagggataaaaatatattttataggaggaagtataagttgtgttgatattttgaattttggagtttacgaagatgttaaatggtgtattttttaatgtttattgtatatgttaatatatttgggtatggggagttattttgtgttattttattttataaagtagttggtttgaaaattatttttttaaatagttaggagaatatttgttataaattattttttagatacgaattatttttttagatagttattatgtatagtatataagttatagaaatagttaaaagtatgttatttattttttattttttgggaatttatatagttggaaagttgaggtttaaatatatgataatataagttatatgtgatatgtagagagtttacgtgtgacggattagtgaagaaatgttattgcgagcgtttagtttataggagggagtatagaggagtttttttatttttagtattttggattttaggtttttcgtgaaaggttgggatttagttaggaaggcgatttagatttgattaggtaggtagggggaggaaggtaatttggggataaatagtatgagtttgggtggggaggtagaaaggtatcgaggtggagagtagtaaggataggtgggggtattagtttttagtggggagttggggagggtggttgtaggatcggaaggttggtagtaatataaagatatagacgtttgtgggtcgtggagggatagggagcgagtttacggtagggagaagagtaggttatagggtaggtgtattttttttttggcggtagttttgtttgatattatagagtagagaagggagtcgggattaagggcgtttagtatgtggggttgattttcgttattttatttatttatttttattaatttttattaaaggtttaggggttttggggttgttatagttttttttaagtgatagatgagaaaattgaaatttagaggaaaaacgtaatttttttaagtttatatattaataagttgaagagttaattttaaaattatgttatttgatttaaaagtttatatttttttgggatatatgtgaagagaaaatgatgtggggagatgttttggaaaatattagtaaggaataagtaaaaggggaattaagatgatgttaaattttatatcgggatagaaatagggaaattaaattgaaagtttattttttatttattaatttatttttacgtagaagaatagttatagaaatcggtttaagagggaagaaaatggatgttattgaagtatttggaatgtgaagagattgatgtttcgtgtaattgaaaatttttggagatttttgatatgattttagatttatgttaagaatcgaaagttattttttaagttaatttttagatgtttgttttttaattaatatacgaggattttagatttgtaaatgatttatgtgaagatcgaagataaagtttatgttttatatagtattaggtgtatagtggtagttttgtaattatgattgttgtcgtggtggtagagatgggggtggaagttattattattgagttataaagagggggtttagtaagagatgtaggaacggttttgtatggagaggttgtaattaaatttagagacgtcgatggaattgttgggatgttgggtttatgtttataaagtagaaggatagattgaagttggaaaagtgatattttagaagtggttagaggataggttttaaaatattagtatagtgtttttaaagaaaaaaaaaaaaaaaaaatagaaaagtgtttataggaaatttgtagagtgaagaatttgagtattgaaaagcgatttgcgcgttttattattattgtttttagtgttttttgagataaaatttttttaagaatgtttaagtgagagtttaattaaagggtttaagaaggaagaatatattgagggaatagag

SEQ ID NO: 315 - DNA, 11534 bp, Artificial Sequence
  chemically treated genomic DNA (Homo sapiens)
ttattggggttttttgtattttttgaatttgaatgtttgtttgtttagttaggttggggaagtttttttggaaaatattttgaaatatgttttttaaattgtttttattttttttattttttttagatattttaattagttatagatttcgtttttttatataattttatattttttggaggttttatttattttttattattttttttttttatttttatttgttcgtattattttataaagatagtttttaagttttgagatttttttagaggaagaattttttagaggaagattaagtagaatttggtttatttttttatgaatatttttgattgtattgtgaagtttttgtagtgtgttttttagttcgattaggttagttatgtttttttttataatatttattttggttgttagtttttgtattgttttattatgatttttagtttttttgtattgggttataatttgtttttttagtttagcgacgtttatttttatttatattttgaagtttattttttttattgtagtgattttagttttattttagttttaaatttttgttggagagatgttgtagttatttggaaggaagaaggtattttggttttttgagtttttagtgtttttatgttgatttttttttatttttgtgggtttatttatttttgatttttgaggttgttgatttttggatggggttttggggttttttttgttttttttttaataatttggttatttttttataaagttgttgtggtttgttgagggttttttttagattttagttattttggattttttagtatttggaggtattattagtgaaggttgtgaaatagtaaaaatggtaatttgtttttttttttgggagttttattttagggaggtatgaatttattgttggtttaaatatatttgtaggagatggtcggagattttatttgggaggttttatttagttaggaggaataggattggggagttattgaaagaagtaatttaattatattttcgaagagaaattatgttatgttgggtattatttgtatttttagttggtttgggatttttaaagtttggagattggtgtggttaagtcgttaaaatagtaaagatggtagtttgtttttttttcgaggagttttgttttaggaagtttttaaatttttgttagttagagaatatcgataggagtggttggaggttatagttgggaggttttgtttagtgagaaggaatggattagggatttttttaaagaagtagtttggttatattttggtaaagtagttgtgttacgttgggagatttttttagtttttagttggtttgagttttttaaagttgaaaggttggaatggttgggatgtttaaatagtaaaggtggtagttttttttattatttaggtattttgttttagggagagattaaaattttatgggttgtagaaaatgggtagaggtggttgaaggttttgtttgggaagatttatttagtgaggaggaatggataggagttttgtttaaaaaaatagtttggttacgttttggtagagtagttgtgttgtgttgggggattttttttatatttggtgggtttggattttttaaagtttataggttggaatagttgagtcgtttaaatagtaaaggtggtgttttttatttttattttagttatttttagaattttattttgttttaggtaggtgttatattgttgttcgtggttggttggaattttaagttagttggttttatttggtgaggtgttgtggaagtgaggtttatagattaatgttgtttagttttttggatttagttttttttttaggggtatgtatagattttttgttttgtttgaatggcggttatttttgttggggtttcggagtttgagtatgtaaagtttttgggtgtttgtgtatgtttgagtagttgttttgttaataatttaatgtagttttgtgtgtaagatttaaaggtttggtggagtgggtttataggggatttttcgatttaaaggttgtaaagatcggtgggagaagtattattttttaggtttgtatatttatttattatttttttggtggggggaggggagggggttttttttgggtttgtgttgtttttatgtaggttattgttttgttttgtttttttttattttttgtgggtcgagttgattttttaattagttttaatgtaagtatttggatgttttagataaaggttttgaagtatttatttttttgtttttttttgagagagttatgttttatatttgtttttagttggttatttttgaaaataaaattaagaaaataattttatttataagtatattaaaaagagtaaaatatttaagaaaaaatttaataaagaagtgaaagatttgtagtttaaaaagtataaagaaattaaggaagatttaaataaatgaaaaaaattttatgtttatggattaaaagattttgttagaatggtaatattttttaaattgatttatagatttaatgaaatttttattagaattttagttggttttattgtagaaattgataatttaaaatttatatggaaaagagagagatgtagattagttaaataatgtttaaaaagatagataaagttggagtagttataatttttaattttaaaatttgttataaagttatagtaatcgagatagtgtggtattgttataggatagatatagagattgataaaatagaattgatagtttagaaataaattattatatttatgatgaattgatttttaatagaggtgttaagatagtttaatggtggaaaaaatagtttttttaataaatgatgttgggaaaattagatatttatataaaaaatgaagttggatttttattttatattatatgtaataattagtttaaaatggattagatttaaatgttgtagttaaaattataaaagttttaaaagaatatatacgaataaatttttgtatatttgaattatgtaatggttttttagatatggtattaaagatataattgataaaagaaaaataaattaattgaatttttatatttaaaattttgcgttttttttgttagagatttaggttttaaaaaataaaaagtttttgtgttttaaaggacgttattaagaaagtgaaaagatgatttatagtaagggagaaaatatttatagatatgtattagataagggattgtaattagaatatataaagaagttttataatttaataataaaaaataaataatttaattttttaaatgggtaaaggatttgaatagaaattttttaaaaaataatataaatggttaataagagtatgaaaagatgtttagtataggtagttattaggaaaacgtatattaaaattataaagaggtcgggtatggtggtttatgtttgtaattttagtattttgggaggtcgaggttggtagattattttaggttaggagtttgagattagtttggttaatatggtgaaatttcgtttttattaaaaatataaaaattagttaggtatggtggtacgtgtttgtagttttagttatttgggaggttgaggtaggagaattatttgaatttaggaggtggagattgtagtaagttaagatcgtgttattgtattttagtttgtgtaatagagtaagattttatttttaaaaaaaaaaaagaaaaaagaaaaaaaatataatgagatattattttatagttattaggatggttagaattaaaagaatggataatagtaagttttgttgataatgtggaatttttacgtattgttgatgggaataaaatggtgtagttattttggaaaatagtttgatagttcgttaaaatgttaaatatataattattatatgatttaataattttatttttaggtatatatttaagagaaataaagtatatgtttatataaatatttgtatataaatatttatagtagtattatttataatagttaaaagggaaaatagtttaaatatttaattgatgatagataaataaaatgtggtatatttatataatggaatgttatttagttataaaaaggaatggggaatggatttatattattatataggtaattttgaaaatattaattgaaagaagttagatgtgaaggttatatattgatatttttatttatgtgaaatgtttagaataggaaaatttatagagttagaaagtagatttgtggttgttaggggttttcgatgataggaggggaggggagtagttattgttagtgattatagggtttttgagagggagtgagaaaaaatgttttaaaatgtattgtggtgatggttgtataattttgtgaatatataaaaattattgaattttatattttaaaaaggtaaattttatgggatgtggattatagtttaataaagttgttattaagaaaggaaaaggaagggaggggagaagagggaaaggggagggaggggaggggaggggaaggggggagaaaaaagatatatcgtggtatatttttttttttttatttgttattatgtgttagtgttttttattggtttaaattatttagaagttagagggaaagttatttgggattatattttattgtgatattgagtagagtaagggaaggatggggatattttttttatatatttttgattttttaatatttaatttatggtttggtatgtgatatttatgttataaatatttgttgaattagtaaatggttttttatttagattttgttaggtagcgtagggggttttttgaatgtaaatgatttaatgatttaggattttatgattagcgattgttattttttgttattttttttttgtttttttatttttgaaggtattgaaggggttttgtatgagttagggagggttggggggaggagtaagggtgggaggggtagggaagagggtggttttttcgataatttaaaaggggtttgaattattttttttttagataggggtagtgcgaggtcgggtatagtttttttgtgtggttttatcgtttagagagcgttatggatttgggtgagtgagtttttttatgtgagaaggaatagtattagggttttggatatttagattgattttgtggaatgggggtggaggatgcgggtggagcgtataggggtgttttttggagaaattagttttgatttggtgggtattggaagttatttttagagaatgttttttgttgttttaggaggggtgtatttgtttttttagatttggagaaggggttagtttttggtgttagtggggataagggaggggtcgagattatgtttttttaaaatagtagggatataagagagtggcggggttgggtttggtggtttggtagaatttgtttttattatgagggtgataggttaggttttttgggatttttggggataggttttaatagagaaattttttttagagagtttaggattttttatttattttttgatttttattttttttttttgttaaatatttatatatttgtttatttggggttatgaggagatgtaaatgaaacgtgattgggttgtgagaatggtgcggtgtattgtaaatgtaagttttggttgttttttttttgttgtatattttatttgttttgatttggttttgttgttgttttttgtaagttaaggaacgggtaggtaatatggaatgggatggtaaggggtatttagtttggagaaattatagttaggtttttagtatagtttttgtttttgagtaaattttacgtattttgtttcggtagataattttattttttagaaagtttttttttaggtttaatttagaaggggttaaggggaagtattgagggtgttttgagtggtttatttagttttagacgttttttttataaattttagttgtggagttagattaggttgaggttaagaagattaggtttttagatggtttgttttattagtaaataatgtattacggcggttttaaagtcgtaaagggttggttttaaaaagtgaaggttttttggtgttgtttttatattttttttcgttatattatagtttttttgattttattttttattttttcgtttgttttgaacgttggatttggatttagtaaatagttgtgaaagggttaaagtggttattttatttattgattgtgaatttttgaaaggtaggtttaggtgttttgaggatgtgaggagaaaatgtttgcggaatgaatgaatatatcgtattaagaatttcgtagagtttagtttttgaaaattttttttaaatgttttattttttagttaatttatttttaaattttatttttttgtattttttttattattttttattataattttatagtatagacgttatttatagaagattttgttttagttttttatattggtttttaggaaggaaattaagtagtgtttagtggtgtgttattgggtatttgaaaagtagtttttcggggtggagtattggtagttgattttagggtggagggaaagttttgaatttgtagtgtttgttaatttttatggtgtaaatttttttattttggttgattgattttaagttatttatatgattgaatagggggttgggaagatgtgtagagtgttttattttagattaggtttaggggtgttagatttttaggttttgatgtagggagagagggtaatttttggtttaggaagaagggatatttttgttattttatttaatttgagagagttttaacggttaaattcgaaatattggtaggaggggaagtcgttgataagttttatttaaaacgggttttttgggtcgttgatggggtgggtgggttttggaggatttgttgttttgttttttatttgtttagtaaggagtaagaggtgggtgaggagggagggtttttgttatataaaatgaaaatttttaagtagggttgagttggttttttttacggtttgaatgagtagttttgaggtattttttttattttcgagtaatgagatcgaagattttttataatttttaaaagtaaagtaaggaaaaaatgaatttatgagagatgtgtgttttatagttcggatataaatggtggtaaagggggatgttgaagttaatttagggttagttttttgtttgttagaaatttggttggggaggagaggaacgttgtagtttggggtcgttgttggaaaaaattttttttttttgtttcggatatttaggtaatttttattgtttgagggatttagggatgattagtttggtggggagagtgatatatatgttataaagttattgtaatagaataagatatagtattgattagggtaagggtaagataagaagggaatagtgaatttgggttagagaggtatttaaggtgggtttttaagggtgtgtaggagttgttaagtttaataaggagttgtaatgggtttaggatgtggtaggaatggtaaattttattgttattagaggtcgataaggtaatagagggaatgggtataaggtgtaggaagtggaggggagtagagtgatttagagggtgtatgttttatttaaaggtatttaaatttattattttaaaaattttatgttgataagtagagtgttttggggattaaggttgtagtcgtgtagatggttagttgagataatagtaatagagataagaaagaagtaagcggaggggagggtggagtagttggttatgttaaggaggaagatgaggaggaaggacgtaggtataggagatttaatttttaaaacgtggtacggtatttttaaggaatttgaattttattttgaaaataatggggatttattaaagatttttattttttaagtaggtgaattaaaggatgagatttgtgttttggaaggagttttgtggtagtaaagaggtagtaaagttcgtgttagaatagaggtggggtcggtttttttgggggtcgggatgttgggggatggaagtaggaagtattggtggttagtggggtatggggagtaaagattttttttatgtttcgtggagcgttttagatgtagtaggtttattagaaatatagtttgatgtagtagttagagtttaaattttgttattttgtttaaattttaggttttttttttagtagttgtgtggttttaggtatttggtttaatttttttgggtttttattttttggaatttaagatgaggattattagggtagtttatgagatgttatgagggagagatatatatagatttagtggtcgtatagaaggatggttaggagtgtggttgttggagttggagggttttaaagtttgtttttttgttggttattgtgtgattttgagaaagttatttgttgtgttttagttttttattggtaaatggggataatagtagcgtttattttatggggtttttgagaggatgaaatgagattatatatgtagatagtgtggtacgtagtgagagtttagtgaatatgaattattttattggatatagtagttgataatatagaaaatgtaaggtttattaggtttttatttatttttgtttattgtttgaaagtggattttttagatttttagattttttattatttttttgttttttttttgttttttttatttaaaaaaaaagagagagagagaaaagttgtgttggtaggtgaggaagtttaaagaggaaaaagtttggggtcgtttttggggcgagttgattgggtaattgtgattttttgggtagtttggaggatttggaaaaatgtggggatggaagtttatggtttggagatgggggtagttagttaataatttttttttttggatgggtagttttttatgttgggggtttcggttggagttttagggaatttttatgatgattattattgaaaatttaagaatttagaaaatatttaatatttaggttaattattttttagttttagagatttttaattttattggttttattgaagttgttgtttaagattagtttttttatgattttgtaatagatagggatgatttgatttaaggttattgattaggtttttttttgttatatataagagtttttttaagtttttttgtgatgttttttgaaagttatttgttttggatttataagatttttgtttatttattttttttaaaatatttggaatgagaaattataggtatatacgttagtatttttttaattttttttttttgacgggaatagtaggagtgggatagcgttcgggagaaggggttattaatagagtttaatagaaatatagtttttgttttttagattttattcgttgtgatttattaaaattttgaggttttttatttttttttgatagttagagcgggttttttttagagtaatcgaaagatatttacgtgttttaaagaaatttcgagattcgatttttagatgagttagtggagggcgggtggagcgttgaatcgtgaagagtgtggttgggcgtaaacgtggatttaaatttaggagttaaggggtaatttagtgaaaaaggggaatgagcggtggggagttttgttgtaatagggtttaatcgtagtaggattataaatgttcgagcgtaggttgggaacgaggggatagcggttgtttgtttttagaatagaaaatgtagttaggaagttttttttgagtggatagcggaggattggattgttaggttaagtattaggggttttatttttagggtcggttagagtttttgaggatttaggaggaaggtgaggtggggattgttattagagttaagttttaggtagatgtgtttagtagtagtgtgtaggattatttgtttaaggcgggagaaatatttatttatttatgtagttcgatgtagtttttttttttcggaggaatttttaagtttagaatttttggttttatataattttcggggaatatattaattaattgtaatttgggtgttatgtagggaggtttttagtaggtggtgttgtggttaaggatacggaagcgttgggtttttattgtttttttagtttttaggagaaggtgttttaaataggtttttacgtattttttggcgttattgagtttggagttgttaagggtttgtttttatttgtggtatcgtagttattgattttttagtgggttaggttttatttagttgggatttgagggttaggatacgggaagagggttattgtcgttttgatttgtaggtaagttaaaatatttaggtaaattattttgttaattgttttttttgtttagttttaggaagaaataagtttttgttgggttttaggtttagttataaaattagattgagtatatttgggttttgtgttatatcggggtttttattagttgtttagattttaggaagttttttgatttttagaatacgtcgttttttaaagttgattttgtttttttttttatttgttttttaagtttaagttagaaaataagttaaaggagagaaagtgtgtgtaggtattttagttaagtaaaaaaataaagaagtcgtgatattaggaaagagcgttttttttttatattgtaataggatagtattttttttgtgttttttcgggttattttgatgtttttttttttggaaaaaggataggtattcgtttatttgttatttatgtatttatttattatttatgtatttattatttatatatttattagtatataattgtggggtatttttttaattttgggtttgtataagataaaagggaagggatttttgttttaaaggtaggttaagggtgtgcgtttagtggattaatagttagtgttgaatgaatgttattttagtgagggggtgttgtggagttggtggagttttgaggtagtttttatcgttgtggattagtaaggaattttatttttttatttagtttgtgaggttattttttttttttagtttattttttttaggagatatttaggtttggttttatgtacgtgtggttgcgtatttatttggatgttaggaaaatgtttttgggttagtggttattagtattaaagtagggttggaaacgtgtgtatttattttacgattttatagttttgtcgttttattttatattaggtggagtgggagggggtatttagatttattaattaagtttagttttgaggggtggtttgggttagagaagattttttagttttaagaagtagtttagatgggttaagatagggggtgggaggggttgttttgtattttgatgttgtttttttttaggatttgggagtggaggaggataagaaggaggtgaggatagtgatgtcgggtagtaggttaggtgtttaaaggtataatttggttttgatgtttttttttagtaaatatagtgtttggagtttgggaggaaagtttttaatagcgtttttttttttattgttttttttaataataaagatttgtttttgttaagtaataattttttcgttttgttttttatagg

SEQ ID NO: 316 - DNA, 11534 bp, Artificial Sequence
  chemically treated genomic DNA (Homo sapiens)
tttgtaggagataaggcgagaaagttattgtttggtagggataagtttttgttattaaagaaagtagtggagggggagacgttgttgggaattttttttttaagttttaggtattgtgtttgttgaaagagaatattagaattagattgtgtttttgaatatttggtttgttgttcggtattattgtttttattttttttttgtttttttttatttttaggttttggaaagaagtagtattagaatgtagggtagttttttttattttttgttttggtttatttgggttgttttttggagttgggaagttttttttagtttagattattttttaagattgagtttggttggtgggtttgagtgtttttttttattttatttgatgtgggatgaggcggtaaagttatgaggtcgtggggtaggtgtatacgtttttagttttgttttggtgttggtagttattggtttaggagtatttttttggtatttaggtgagtgcgtagttatacgtgtatgaagttaagtttgagtgttttttgagggaggtgggttgaggaaggaggatgattttataggttgggtagagggatgaggttttttattggtttatagcgatggagattgttttagggttttattagttttataatatttttttattgaaatgatatttatttagtattgattgttggtttattgggcgtatatttttggtttgtttttgggatagagatttttttttttttattttgtgtaggtttagaattgaggaggtgttttataattgtgtgttgatgaatatatgaatgataaatatatgaatgatgaataaatatatgaatgataagtaaacgaatgtttgttttttttttaagggagagggtattaagatggttcgagaggatatagaagggatgttgttttgttgtagtgtgggggaaggacgtttttttttgatgttacgatttttttatttttttgtttaattgaagtgtttgtatatatttttttttttttaatttgttttttaatttaggtttggggggtaggtgaaagggggaatagggttagttttgggaagcgacgtgttttggaagttaggaggttttttggggtttgagtagttgatggggatttcggtgtagtataaggtttagatgtgtttagtttggttttgtggttgagtttggggtttagtaggaatttatttttttttgaggttgagtagggaggatagttgatagagtaatttgtttagatgttttagtttatttataagttagggcggtagtagtttttttttcgtattttgatttttaggttttagttaggtagggtttggtttattggagagttagtaattgcgatgttataagtgaaggtaggtttttggtagttttaagtttaatagcgttaggaaatgcgtgggaatttgtttaaggtatttttttttggaggttggggaagtagtgagagtttagcgttttcgtgtttttggttatagtattatttgttggaagtttttttgtatggtatttaggttgtagttggttaatgtgtttttcggaaattgtgtaaagttagggattttgggtttgggagttttttcgggaaggagagattgtatcgggttatataaataaataggtatttttttcgttttgagtaaatagttttgtatattattgttagatatatttgtttaaagtttagttttgatggtagtttttattttattttttttttaaatttttaggggttttaatcggttttgaggatgaagtttttgatgtttggtttggtagtttagtttttcgttgtttatttaaagagggttttttagttgtattttttattttggggataggtagtcgttgttttttcgtttttagtttgcgttcgggtatttgtagttttgttgcgattggattttgttgtaatagagttttttatcgtttattttttttttttattgaattattttttagtttttgagtttaagtttacgtttacgtttaattatattttttacggtttaacgttttattcgttttttattgatttatttagaggtcgagtttcgaggtttttttaaaatacgtaagtgtttttcggttattttagagaaagttcgttttgattgttagggagaaatgagaaattttaaagttttgataagttataacgggtgagatttgaggagtaagaattgtgtttttgttgaattttgttgataattttttttttcggacgttgttttatttttgttgttttcgttaggggaggggagttgggggagtgttggcgtgtgtgtttgtgattttttattttaggtgttttggaggaggtggatgagtaagggttttgtaggtttaaaataggtggtttttaagaaatattatagggaaatttaggggaatttttgtatgtggtaaaagggagtttggttagtggttttgagttagattatttttgtttgttataaagttataaagaaattggttttgggtagtagttttagtgagattaatgaagttgggaatttttggggttaaggagtggttgatttagatgttgggtgttttttgagtttttgagtttttagtaatgattattatgaaaattttttagaattttaatcggagtttttaatatgagagattgtttatttaggaaagaaaattattggttggttgtttttatttttaaattatgaatttttatttttatatttttttaggttttttagattgtttaggaaattatagttgtttaattagttcgttttaagagcgattttaagtttttttttttttgaatttttttatttgttaatataatttttttttttttttttttttttttggataagggaggtagaggagaagtagggaggtggtgagaggtttagagatttggggaatttatttttagatagtaggtagggatgggtgagagtttggtagattttgtattttttatgttattaattgttgtatttaatgagataatttatatttattgagtttttattgcgtgttatattgtttgtatgtatggttttattttatttttttaaaagttttatgaggtaggcgttattattatttttatttattaatgagaaattgaaatatagtaagtaatttttttagagttatataatggttagtaggggagtaggttttgaaattttttaattttagtaattatatttttaattatttttttgtgcggttattgggtttgtatgtgttttttttttataatattttatgagttattttggtgatttttattttagattttagaaaatagaggtttagagagattaagttaaatgtttggggttatatagttgttaagagagggatttgagatttgaataggatagtaaggtttgggttttggttattgtattaggttgtgtttttgatgagtttgttgtatttaggacgttttacggagtatgaggggaatttttgttttttatgttttattggttattagtgttttttgtttttattttttaatatttcggtttttaaaagagtcggttttatttttgttttgatacgggttttgttgtttttttgttgttatagaattttttttaaaatataaattttattttttaatttatttatttgaaaaataaaaatttttgatgggtttttattgtttttaggataaagtttaaattttttagggatgtcgtattacgttttaaggattgggttttttgtgtttgcgttttttttttttatttttttttttggtatggttagttattttattttttttttcgtttgttttttttttgtttttgttattgttgttttagttgattatttatacggttgtagttttagtttttaggatattttgtttgttagtatggagtttttgaaataatagatttgaatgtttttaggtggggtatgtattttttgggttattttatttttttttattttttgtattttatgtttattttttttattattttgtcggtttttgatggtaatggagtttgttatttttgttatattttgggtttattgtagttttttgttgggtttgataatttttatatatttttgaaaatttattttaaatatttttttgatttaggtttattattttttttttgttttgtttttgttttggttaatgttgtattttattttgttgtagtggttttgtgatatatgtgttattttttttattagattggttatttttgaattttttaaataatgagagttgtttgaatgttcgaagtaaagaggagagattttttttaatagcgattttaggttgtagcgttttttttttttttagttaagtttttggtaggtaagaaattggttttgaattagttttagtatttttttttgttattatttatgttcgagttgtgaggtatatattttttatgggtttattttttttttgttttgtttttgagaattatgaaagattttcggttttattgttcgaaggtggggagggtgttttagagttgtttatttaaatcgtgaaaaaggttagtttagttttgtttgggagtttttattttgtgtaatagaaattttttttttttatttattttttgttttttgttgggtagatgaagagtagaataatagattttttaaggtttatttattttattaacggtttagagagttcgttttgagtaaagtttgttagcggtttttttttttattagtatttcgggtttgatcgttggggtttttttaagttgagtgaagtggtaagaatattttttttttttggattagagattattttttttttttgtattaaagtttaggagtttagtatttttaaatttagtttggggtaagatattttgtatatttttttaattttttgtttagttatgtagatggtttgaaattaattagttagggtgggagaatttatattatggaaattggtaagtattataaatttaggattttttttttattttggagttagttattagtgttttatttcggggagttgttttttaaatgtttagtagtatattattgggtattgtttggttttttttttggaggttagtatgaaaggttggagtagggttttttgtgggtgacgtttgtattgtgggattgtgatggggggtggtggagggggtgtaggggagtgggatttaagggtagattggttgggaaatgaggtatttggaagagatttttaaaaattaaattttacggagtttttgatacggtgtatttatttatttcgtagatattttttttttatatttttaaagtatttgaatttgttttttaggagtttatagttagtgggtggggtgattattttaatttttttatagttgtttgttgggtttagatttagcgtttagggtaggcgggaaagtaagagatgaaattaaggaggttgtggtgtggcgaggaggggtgtgaggatagtattagggaatttttattttttaaagttaattttttgcggttttgaggtcgtcgtggtgtattgtttgttggtgagataagttatttaggaatttggtttttttagttttagtttggtttgattttatagttgagatttataaagggggcgtttggagttggatgaattatttagaatatttttagtgtttttttttgattttttttaggttagatttgagaaagggttttttaaagagtagagttatttgtcggggtagagtgcgtgaggtttgtttaggggtaggggttgtgttgaaggtttggttatgatttttttaagttgagtgttttttgttattttattttatgttgtttgttcgttttttaatttgtaagaggtaatagtaaagttagattaaagtaggtgggatgtgtagtagagagaaagtaattagagtttgtatttgtaatgtatcgtattatttttataatttagttacgttttatttgtatttttttatgattttaagtggataggtatatgaatatttggtaggggagaaaggtgggaattagagagtgggtaaaaggttttaagttttttagggagaatttttttgttgaaatttgtttttagaggttttagagggtttaatttattatttttatgatgagaataggttttgttagattattaagtttagtttcgttatttttttatgtttttgttgttttagaaagatatgatttcggttttttttttgtttttattggtattaaaggttgattttttttttaggtttgaaagggtaggtgtattttttttgggatagtagggggtattttttggaagtagtttttaatgtttattaaattagaattgatttttttaggaagtatttttatgcgttttattcgtattttttatttttattttatagggttagtttgggtgtttaagattttggtattgtttttttttatatgaagaggtttatttatttaggtttatgacgttttttgggcggtaaaattatataggaaggttgtgttcggtttcgtattatttttgtttggggaggaagtggtttaagttttttttaagttgtcggagaagttatttttttttttgttttttttatttttgtttttttttttagttttttttgatttatgtagggtttttttaatgtttttagagataaaggggtagaagaaaggtgatagagggtgatagtcgttggttataggattttgaattattaggttatttatatttaaaaagttttttgcgttgtttggtagaatttagatgaggggttatttattgatttaataaatatttatagtatgaatattatatgttaggttatgggttagatgttggggagttagagatgtgtgagagaagtgtttttattttttttttgttttgtttagtgttatagtggaatatagttttaaatggttttttttttggtttttgggtagtttaggttaatgggaggtattgatatataatgataggtaaaagggaagagatatgttacgatgtatttttttttttttttttttttttttttttttttttttttttttttttttttttttttttttttttttttttttttttaatgatagttttattgagttataatttatattttataaaatttatttttttaaagtatagaatttaatggtttttgtatgtttatagagttatgtaattattattataatatattttagaatatttttttttatttttttttaagaattttgtaattattagtaatgattgtttttttttttttttgttatcgaaagtttttggtaattataaatttattttttggttttatagatttttttattttgaatattttatataaatagaagtattaatatgtgatttttatatttggttttttttagttagtgtttttaaggttatttatgtggtggtatggatttattttttatttttttttatggttgaataatattttattgtatggatatgttatattttgtttgtttgttattagttggatgtttgggttgtttttttttttagttattatgaatgatgttgttataaatatttatgtgtaagtgtttgtgtggatatatgttttattttttttgggtatatatttagaagtgaaattgttgagttatatggtaattatatatttaatattttgacgaattattaaattgttttttaaagtgattatattattttgtttttattaataatgcgtgagggttttatattgttaataaaatttattattgtttatttttttgattttagttattttagtggttgtaaagtggtattttattgtgttttttttttttttttttttttttttttggagatggagttttattttgttgtataggttggagtgtagtggtacgattttggtttattgtagtttttattttttgggtttaagtgatttttttgttttagttttttaagtagttgggattataggtacgtgttattatgtttggttaatttttgtatttttagtagaaacggggttttattatgttggttaagttggttttaaatttttaatttaaggtgatttgttagtttcggttttttaaagtgttgggattgtaggtatgagttattatgttcggtttttttgtagttttgatatgcgtttttttaatgattatttatgttgagtatttttttatgtttttattgattatttgtattattttttgagaaatttttatttaaattttttgtttatttaaaaaattgggttatttattttttattattgagttgtaagatttttttatatattttggttataattttttatttgatatatatttgtaaatatttttttttttattatggattatttttttatttttttgatagcgttttttgaagtataaaggttttttgttttttaaaatttgaatttttggtaaaagaagcgtaaagttttaaatgtggaggtttaattgatttattttttttttgttaattgtgtttttggtgttatatttaagaaattattgtataatttaagtatataaagatttattcgtatatgtttttttaagatttttatagttttagttgtaatatttagatttgatttattttgagttaattgttgtatatggtgtgaggtagggatttagttttattttttatatggatatttagtttttttagtattatttgttgaaaagattattttttttattattgaattgttttagtatttttgttggaaattaatttattataaatgtaatggtttatttttagattattaattttattttattaatttttgtgtttgttttatgatagtattatattgtttcgattattgtagttttatagtaaattttgaaattgggagttgtgattgttttaattttatttgtttttttaaatattgtttgattaatttgtattttttttttttttatatgaattttaggttattaatttttgtaatgaaattagttgggattttaataggaattttattgaatttgtaaattaatttagggagtattgttattttaataaagttttttggtttatgaatatgggattttttttatttatttaggttttttttaatttttttatattttttaggttgtaagttttttatttttttgttaaatttttttttaagtattttattttttttgatgtgtttgtaaatgaaattgtttttttaattttatttttaaagatggttaattagaagtaggtatggggtatggtttttttagagaggaataaaggggtgggtattttaaaatttttatttgaaatatttagatatttgtattgggattgattaaggaattagttcgatttatagaggatagaggaaagtagggtagggtaatggtttatataggagtaatatagatttaaaggaaatttttttttttttttttattagggaagtggtgagtgaatgtgtaaatttggggaatgatgttttttttatcgatttttgtaatttttggatcgggagattttttgtgaatttattttattaggtttttgggttttatatatagagttgtattggattattggtagagtagttgtttaggtatgtatagatatttaggagttttatatatttaggtttcggaattttagtaaaggtgatcgttatttaggtaaggtaggaggtttgtatatatttttaggaaggaggttgaatttagggagttgagtagtattggtttgtgggttttatttttatagtattttattagataagattaattggtttggaattttagttagttacgggtaatagtgtagtatttatttgagataaggtggagttttgggggtggttggggtgggggtgaggggtattatttttgttgtttggacgatttagttgttttagtttgtagattttggagagtttaaatttattaggtgtggaaaggattttttagtatagtatagttgttttgttaaaacgtggttagattgtttttttaagtaggatttttatttatttttttttattgggtgggtttttttaaataaggtttttagttatttttgtttattttttatagtttataaaattttgatttttttttgggatagggtgtttggatggtggagagggttgttatttttgttgtttgggtattttagttattttagttttttagttttggggagtttaaattaattgggggttgaaaggattttttaacgtggtatagttgttttattaaaatatggttagattgtttttttaagagggtttttaatttatttttttttattgggtaggattttttaattgtggtttttagttatttttgtcgatgttttttggttgatagagatttgaagattttttgggatagagtttttcgggggaggggtaggttgttatttttgttgttttggcgatttagttatattagtttttaggttttggagattttaagttaattggggatgtaagtggtgtttagtatagtatagttttttttcggaagtgtggttagattgttttttttagtggttttttaattttgttttttttgattgggtgagattttttaaatggggttttcggttattttttataggtgtgtttaggttagtaataggtttatatttttttgggatggagtttttaggggaaggggtaggttgttatttttgttgttttatagtttttattggtgatatttttaggtattggaaaatttaaagtgattagagtttggaggggatttttagtaagttatagtagttttatggaaaagtggttagattgttaaaagaaaaataaaagaaattttaaaattttatttaaaggttagtaattttaaaaattaaaggtagataagtttataaagatgagaaagaattagtataaaaatattaaaaatttaaaaagttaaagtgtttttttttttttaaatgattgtagtatttttttagtaagggtttggaattggggtaaggttaagattattgtaatgaaagaagtagattttagaatgtggataaaaatgaacgtcgttgagttaaagaagtaagttgtaatttaatgtaaggaagttaaaaattatgataaaataatgtaggagttgatagttaaaatagatattatagagaagaatataattgatttgatcgagttgaaaaatatattataagaattttataatgtaattagaagtatttatagaagaataggttaagttttgtttagtttttttttgaaagattttttttttgaaagaattttagagtttgaagattgtttttatgaaataatacgggtagataagaatagagaaaaagaatgataaggaatgaataaaatttttaagaaatatgggattatgtaaagagacggaatttatgattgattggggtatttgaaagagatggggagagtggaaataatttggaaaatatattttaggatattttttaggagaatttttttaatttagttagataagtaaatatttaaatttaggaaatgtagagaattttagtga

SEQ ID NO: 317 - DNA, 7346 bp, Artificial Sequence
  chemically treated genomic DNA (Homo sapiens)
aaatagattttttatgttttttgtaattaatttttatttttagttttaggttattattgataggttttttgtttttataaatttgttttttttggatattttatataaatgtagtttgtaggtcgggtgcggtggtttaagtttgtaattttagtattttgggagatcgaagcgggtggattatatgaggttaggagtttaagagtagtttggttaatatggtgaaatttcgtttttattaaaaatataaatattagttgggcgtggtggtatgtgtttgtaattttagttatttgggaggttgaggtacgagaattatttgaatcgaggaggtagaggttaaagtgagttgaaattatgttattgtattttagtttgggtgatagagtgagattttgttttaaaaaataaaaaaataaagtgattatattattttttatttttagttatagtatatgagagttttaatttttttatatttttgttaatatttgttattattttttttatagttatttttattgtgtatttaaatttttttttgaaaatttaggaaagatggttaggtaaggtggtttttgtttgtaattttagtattttgggagggtgaggtaggtagattatttgaggttaggagtttaagattagtttggttaaaatagtaaagtttttttattgaatgaaataaaaaatatatttaaaagttttaatagtatattagattaagtagaagaaagaattttatttagttagagtaattaggtaggagaaaaaaataaagggtatttagattagaaaagaagaagttaaattatttttatttgtagatgatatgatgttatatttggagaaatttaaagattttattaaaaaattattggaattgataaataaatttagtaaagttgtaggatataaaatttatataaaaaattagagtatttttatatgttaatagtgaataatttgagaaagaaatttttaaaatttttttataacgttatagataaaattaaatatttgggaattaatttagttaaagaagtgaaaagtttttgtgataaaaattataaaatattgatgaaagaaattgaagagagtattaaaaaatggaaagatattttatgtttatgaattagaaaaattaatattgttaaaatgtttatgttattttaaataatttatagatttaatgtagattttattaaaatattaatgatattttttatagaaatagaaaagagaattttaatatttatatggaattataaaagatttagaaatttaaaggtattttgagtaaaaagaatataattgaagttagaacgtattatcggattttaaattatattatagaataatgaaaattaaaatagtatgatattggaataaaaatagatatatagattaatggaatagaatagagaatttagaaagaagtttatatatttatagtgaatttgtttttgataaaggtgttaggaatatatattggggaaaagatagtttttttagtaaatggtattaggaaaaatggataaatatatgtagaggaataaaattagatttttgttattatatataaaaattaaattaaaatggattaaagattaagtttaatattttaaattatgaaattattataagaaaatattggagaaattttataggatattggtttggataaaaaatttttggagtaatattattttataagtataggtaattaaagtaaaaatgggtaaatgaataaaaaaatatattaagttaaaaagtttttgtatagtaaaggaaaaaattaataaagtgaagatataatttataaaatgggagaaaatatttgtaaattatttatttgataaggggttaataaaaaatgtgtaagaaatttaaataattttatgggaaaaaatttaataatttaattaaaaatgggtaaaagatttgaatatatattttttaaaataagatatataaatggtaaatagatatatgaaaaagtatttaatattattgattattagagaaatgtaaattaaaattatagtgagatattattttattttagttgaaatggtttttatttaaaagataggtaatagtaattgttgaagaggatgtggggaaaagggtatttttgtatatttttggtgggaatgtaaattaatataattattatggagaatagttgggagagtttttaaaaagttgaaaatagagttattaaatgatttaataattttatttttgggtatatatttaaaagaaaggaaattagtatatagaagagatatttgtatttttattttgtggtattgtttataatagttaaggtttggaagtaatttaagtgtttattaatagatgaatggataaggaaaatgtgatatatatataaaatggagtattatttagttataaaatagaatgagattttattatttgtagaaatatggatggaattgaaggttattatgttaagtgaaataagttaggtatagaaagacgaatattatttgtttttatttatttgtgttatttaaaaattaaaatagttgaatttatggagataaagaataggaggatggttattagtgggtgggaagtgtgttggggggtggaggaaggtggggatggttaatgagtatatataaaaaaatagaaagaatgaataatatatggtatttgatagagtgattatagttaaaattaattgtatattttaaaataattaaaagagtataattggattgtttgtgatataaaggataaatgtttgaggagatggatattttattttttatgatgttattattatgtattgtaaatttttattagaatattttatgtatttttataaatagatatgtttattatgtttttataaaaattaaaaaataaaattttgggttgggtataatggtttatgtttgtaattttagtattttgggaggttaaggtgggtagattgattaagtttaggagtttaagattagtttgggaagtatggagaaattttgtttttataaaaaaatataaaaattagttaagtatggtggtgtatgtttgtagttttagttatttcggaggttgaggtaggaggtttgtttgagtttagaggtagaggttgtaatgagttgagattgcgttattgtattttagtttgggtgaaagagtaagattttgttaaaaaaaaaattaaattaaaaaaagatttttagaatttaacgataggtttttttgaaataaattagttagattaaaataaaaaagaatgaataaaatttatatgatatacgggatattataaagtaattaaatatttaaatgtttggtgttttagaaggtaaagagaaaataaaaggggtagaaaatttatttaattgattaatagttgaaaattatttaaatttagtaagagatttagatatttagatagcgttttttatatagaaatatttaaatatttagatatagttttttaaatagaaataatttaaaaaggttttttttagtgtatattatagttaaattgttaaaagttaaagataaagagagaattttgaaaatagatgtaagagaaaagtgtttagttatttattagggaatttttattagattaattgtggattttttagtagaaaatttataggcggggagagaaagggatgatatatttaaagagttaaaagaaaaaaaatgaaattaaaggatattatatttagtaaagttattttttataagtgaaggagaaataaatttttagataagaaaaagttgaggaaatttattattattagatgggtttaataagagaaatgtttaatagaattttatattaggaaagaaaagatgataattattatgatgaaaatatatgaaaatataaaatattgttaaagaaaataagtaaataaggaagagaaaatgtagatgttattattatagaaaattagtaaattatagtgataaatagagagaaagataggaataaaggatgtataaaataattagaaattgattaataaaatgatagaaataagtttttatatattaataataataaattttggatgtaaatggatttagttttttatatttaaatcgatgaaatttaatttgtaaaatgtaatttatgttgaaagagttaataaatgtatatgaataaaatatatatatataattgtgtatgttatatattatggaggaaagttagttttggtataaattgtataattttaaaataataatggaattatgattttattttaatattgattttaattaaaaattttaatagattattttttagaggttttaagtttatagaaaatttaggtagataatatagaaaatttttattaatttttgtattagtttgttaggatttttataataaaatattataggttgagtagtttaaataatagaaatttgtttttttatagttttggaggttagaagattaaggtgtttataagtttggtttttggtgatgtttatttattttatttgtagatggttgttttttttttgtgtttttatatggttttttttttgagtatttggaggtaagagagtgagttttggtgtgtatttttttatttaggagatattagttttattgaattagggttttagttttacgattttatttaatttttattgtttttttttaggtgattaggtgtgagggtggagtttttaagagattgttttttttttatttgttgtttgtagtgggaggatatttttagagaggttgttgtttattgagttgtatttatatgaggatatagattttgtgaagaaggaattggtaatattgaaatttttagaataaaggttgttattaaggtatgtgttataagtatttttggggaagaagggtatgagtaggtaggggtatttttatatttttagaggataggtaaagggaagattaaaattttagaggtttagtataagaagtaaaatttttttttaaatttttgtatttttttagagtttataaatatgtatgtgttttagtggttgtttatgttttggttgaggagagtaaatcgtgttatattttttgtaggtttttaggagagagtgaaaatttttataagagtgggaaggtagataagagaagattttttataatattaggtatttgggaagatttgtttttgtgttgggtatagggtttttattaggtaattgaaggatatttgggtgttgtttttaaggaaagaagttagcgagtaaatttttatatgattaaagaagttgttggtgggtgtttgtagttttagttatttaagagtttggggtagaaggattgtttgcgtttagaagttagggttttgtgtgagattatatttgcgtataattattgtattttagtttgggtaatatagtgagattttgtttttaaaaaaataaataaattgtttgtttgtttgtttgtgtttttaaattatagaaaagtagtagagtggagaggggtgtttgaatgtaaagtaaataaatgttttggaaaaatatgtttggattgaaattgtattgaatgtatatattaatttgagaagaattgttaagttttataatttttatgtaattgaattgtatttttattagttttatttttagtaatgttagtaatttttattgttagtataattgggattatttttttattgtatttataaagttattttttttttggtgtttaggaaagtaattaaaagaataaattgatgaatattatgtagatatatttttaaaataataagtaaaatataaagggaaaaataatatattatttatgtaagttaaaataatatattatttatgtaagttaaaatatataaaaatatatattgtttatggatatatataaatatgtaaaagtatagggggaaattgtttggaatgatatatattaaattggttttagttgttgtttttgttatggggataagttgtgtagttaaagggaatattagttttatttttattgtattagaaataaaaaaagaaagagggatggaaggaagagagggaatgagggagggagaaaagaagggagaaaaaaagaaggaaggaaggaaaaaaaaataatttaaagtattgtgagaatatgttagtagttgttaattttaggtgatggaattatgggtatttatattttttttgtaagttttggttttttttattttagttgattttttttggtttatataataaaatataatagattgagtggtttaaataatagaaagtgttgtttaatatatttttaaaggttggaagtttaagattaagttgttaatgtagttgatttttggtgaggtttttttatttggtttgttgattttagtttttttgttgtgtttttatatggtttttattttatgtataaggggagtaaaattttttgtgttttttttttttttgttaaggatattagttttattagattagggttttgttttttttggttttgtttttgtttttttttttttgagatagagttttattttgttatttaggttggagtatagtggtttgatttcgagttattgtaatttttgttttttgggtttaagaaattgtcgtgttttagtttttcgaggtagtttggattataggtatgtggtattatgtttggttaatttttgtaattttagtagagacggggttttgtattgttggttaggtttgtttcgaatttttggttttaagtaattcgtttattttggttttttaaagtgttgggattataggtgtgagttattgtgagagttagggttttgtttttataattttatttaattttttttttttttttttaattttaatttttttttttttttttgagatagaattttattttgtcgtttaggatggagtgtagtggtgtgatttcggtttatagtaatttttattttttcggtttaagtgatttttttgttttagttttttgagtagttaggattataggtatgtattcgttatgttcggttaatttttgtatttttagtagagacggggtttcgttatgttggtaaggttggttttgaatttttgattttaggtgatttgtttattttggttttttaaagtgttaggattataggtatgagttatagttttcggtttattatttaattttaattatatttttaaaggtttaaatagttttatttattttaaatagttatatttatatcggaggttgagtattttaatatatgaatttggggaggatatagtttagtttataatatttttttaatttttaaaaaataaaaatgtttttaaggagtgaatgttttttatgtgtttttgtgattagg

SEQ ID NO: 318 - DNA, 7346 bp, Artificial Sequence
  chemically treated genomic DNA (Homo sapiens)
tttggttatagagatatataaaagatatttattttttaaaaatatttttattttttaaaaattagggggatgttatggattgaattgtgttttttttaaatttatgtgttgaagtgtttaattttcggtgtgggtgtgattatttggagtgggtgagattatttgggtttttaaagatgtaattaaggttaaatgatagatcgggagttgtggtttatgtttgtaattttagtattttgggaggttaaggtgggtagattatttgaggttaggggtttaagattagttttgttaatatggcgaaatttcgtttttattaaaaatataaaaattagtcgggtatggcgggtgtatgtttgtaattttagttatttaggaggttgaggtagaagaattatttgaatcgaagaggtggaggttgttgtgagtcgagattatattattgtattttattttgggcgatagagtgagattttgttttaaaaaaaaaaaaaaaaattaaaattaaaaaaaaaaaaaaaaggttaaatgaggttataaaggtagggttttggtttttatagtgatttatatttgtaattttagtattttgggaggttaaggtaggcggattgtttgaggttaggagttcgagataagtttggttaatagtgtaaaatttcgtttttattaaaattataaaaattagttaggtatggtgttatatgtttgtaatttaagttatttcgggaggttgaggtacgataattttttgaatttaggaagtaggggttgtaatgattcgagattaagttattgtattttagtttgggtgatagagtgagattttgttttaaaaaaaagaaaatagaaataaaattaaaaaaggtagggttttaatttgatagaattagtgtttttaatagaagagaaagagatataagaaattttgttttttttgtgtatggagtaaagattatgtgaggatatagtaagaaggttgaaattagtaagttaggtagagaagttttattagaaattaattgtattggtagtttggttttggatttttagtttttagaagtatgttaaataatattttttgttgtttaagttatttagtttattgtattttgttatgtaaattaaagggagttagttgagatgagaaaagttaaaatttataaagaaaatgtaaatatttatagttttattatttagaattagtagttgttaatatatttttataatgttttgggttattttttttttttttttttttttttttttttttttttttttttttttttttttatttttttttttttttttatttttttttttttttttatttttgatgtaatagagatgaagttaatgttttttttaattatataatttatttttataatagaaataataattaaaattaatttggtatgtattattttaaataatttttttttgtatttttatatatttatatatatttataaataatatatatttttgtgtgttttaatttatataaatgatatattgttttaatttatataaatgatatattgtttttttttttgtattttgtttattgttttagagatatatttgtatgatatttattagtttatttttttaattgtttttttaagtattagaaaaaaaataattttataaatgtaatagaaaaatgattttaattatattagtaatgaaaattattagtattattaggaataaaattaataaaaatgtaatttagttatataaaaattataaaatttgataattttttttaaattgatatatatatttaatgtaattttaatttagatatatttttttaaggtatttgtttgttttatatttagatatttttttttattttgttatttttttatgatttgaaagtataagtaagtaagtaagtaatttatttatttttttagagatagggttttattatgttgtttaagttggagtatagtagttatacgtaggtgtgattttatataaagttttgatttttgggcgtaagtaatttttttgttttaggtttttgagtagttgggattataggtatttattagtaatttttttagttatatgaaagtttgttcgttggtttttttttttaagaatagtatttaggtgttttttagttatttgatagaagttttgtatttagtataaggatagatttttttagatgtttggtattataaaggatttttttttatttatttttttatttttgtaggagtttttatttttttttaaaggtttgtagagaatatggtacggtttgttttttttagttagagtatgggtagttattaagatatatgtatgtttgtgggttttgaggaaatgtaaagatttaaaaaaaaattttattttttgtgttagatttttgaaattttggttttttttttgtttattttttaaagatataaaaatgtttttgtttatttatgttttttttttttaaggatgtttgtagtatatattttagtgatagtttttgttttggaggttttagtgttgttaattttttttttataaagtttgtatttttatgtgagtgtagtttaatgagtagtagtttttttggaggtatttttttattataaatagtagatggagagaaggtagttttttgagggttttatttttatatttagttatttaaagggaggtaatgagggttaaatgagatcgtaaggttgaggttttaatttaataggattggtgttttttaggtagaggaatatatattagagtttatttttttgtttttaggtgtttagaggaaaggttatgtgaggatatagggagaaggtagttatttgtaagtaaggtaaataggtattattagaaattagatttgtgggtattttggttttttagtttttagaattgtgggaaaataaatttttgttgtttaagttatttagtttgtagtattttgttatggaagttttagtagattaatataggggttaatgggaattttttgtgttgtttatttagattttttgtaaatttaaaatttttaaaaaatagtttattaaaatttttaattgaaattagtattaaaatgaaattataattttattattattttgaagttatataatttatattaggattggtttttttttatggtatgtagtatatataattgtgtgtgtatgttttatttatgtatatttattaatttttttaatatggattgtattttgtaagttaggttttatcgatttgaatgtggaaagttgaatttatttatatttaaggtttattattattgatatgtgaaggtttatttttgttattttattaattaatttttggttgttttgtatattttttgtttttgtttttttttttgtttattattgtagtttgttggttttttgtagtggtaatatttgtatttttttttttttatttgtttgttttttttagtagtattttatatttttatgtgtttttattatggtagttattatttttttttttttggtataggattttgttaagtattttttttattggatttatttagtggtgataaatttttttagtttttttttgtttgggagtttattttttttttatttatgaaagatagttttgttgagtataatattttttggttttatttttttttttttagttttttaaatatattattttttttttttttcgtttgtaagttttttgttgagaaatttatagttagtttgatgggggttttttaataagtgattagatattttttttttgtatttgtttttagaattttttttttgtttttgatttttgatagtttgattatgatgtgtattggaaaagatttttttgaattgtttttatttaggaaattgtatttggatgtttgaatgtttttatatgggaaacgttatttgggtgtttaaattttttgttaggtttgagtagtttttagttattaattaattaaataagttttttattttttttattttttttttgttttttgagatattaaatatttaaatatttggttgttttatggtgtttcgtatgttatgtaggttttatttatttttttttattttgatttgattggtttattttaaaaaaatttgtcgttaaattttgaaagtttttttttaatttaattttttttttgatagggttttgtttttttatttaggttggagtgtaatggcgtaattttagtttattgtaatttttgtttttgggtttaagtaagttttttgttttagttttcgaagtagttgggattataggtatgtattattatgtttggttagtttttgtatttttttgtagagataaggtttttttatgttttttaggttgattttgaatttttgggtttagttaatttgtttattttggttttttaaaatgttgggattataggtataagttattgtgtttagtttaaaattttgttttttaatttttgtgggaatatagtaggtatatttatttatgggggtatatgagatattttgatggaggtttgtagtgtataataataatattatggaaaatagggtatttatttttttaagtatttattttttgtgttataaataatttaattatgtttttttagttattttaaaatgtataattaattttgattatagttattttattaaatattatatattatttattttttttatttttttgtgtgtatttattaattatttttatttttttttattttttaatatattttttatttattggtaattatttttttattttttatttttatgaatttaattgttttgatttttagatgatataaataagtgagaataggtgatgttcgtttttttgtgtttggtttattttatttaatataatgatttttagttttatttatgtttttgtaaatgataggattttattttgttttatggttgaatagtattttattttgtatatgtattatattttttttatttatttatttgttgatggatatttaggttgtttttaaattttggttattgtgaatagtgttataagatgggagtgtagatgttttttttatatgttgatttttttttttttgggtatatatttagaagtgggattattggattatttggtagttttatttttagttttttgaggatttttttagttgttttttatagtggttatattaatttatatttttattaagagtgtataagagtatttttttttttatattttttttagtagttattgttatttgttttttggataaaagttattttaattggggtgagatgatattttattgtagttttgatttgtatttttttgataattaataatgttgagtgtttttttatatatttgtttattatttatatgttttattttgagaaatgtgtatttaaattttttgtttatttttaattggattattagatttttttttatagagttgtttgagttttttatatattttttattaattttttgttagatgggtagtttgtaaatatttttttttattttgtaggttgtgtttttattttgttgatttttttttttgttgtgtagaagttttttaatttgatgtgtttttttgtttatttgtttatttttgttttggttgtttatgtttgtggggtggtattattttagaaattttttgtttaggttaatgttttgtagagtttttttaatatttttttatagtagttttatagtttgaggtattagatttagtttttaatttattttgatttgatttttgtatatggtgataggggtttagttttatttttttgtatatgtttatttattttttttagtattatttattgaagagattgttttttttttagtgtgtgtttttggtatttttgttaaaaataagtttattgtaggtgtgtggatttttttttgggttttttattttgttttattggtttgtgtatttgtttttattttaatattatgttgttttggtttttattgttttgtagtataatttgaagttcgataatacgttttgattttaattatgttttttttgtttaggatatttttggatttttaggttttttgtggttttatataaatgttaggatttttttttttatttttgtgaggaatgttattggtattttgatagagtttgtattgaatttgtagattgtttggggtagtatggatattttaataatattggtttttttagtttatgaatatggaatatttttttattttttggtgttttttttaattttttttattagtgttttatagtttttattatagagattttttatttttttggttgagttaatttttaggtgtttaattttatttgtgacgttgtaaagggattttaaaaattttttttttaagttgtttattgttgatatatagaaatgttttgattttttatgtggattttgtattttgtaattttattgaatttgtttattagttttaatagttttttggtggagtttttaggtttttttaaatataatattatattatttgtaaataaggataatttgatttttttttttttaatttaaatgttttttattttttttttttgtttaattgttttagttaggtgaaatttttttttttgtttgatttagtgtattgttgaagtttttgaatgtattttttattttatttaatagaggggttttgttgttttggttaggttgattttgaatttttggttttaagtaatttgtttgttttatttttttaaaatgttggaattataggtaggagttattttgtttggttattttttttgaatttttaagaaaagatttgagtgtataataagaatagttataaaagagataataataagtgttgataaggatgtggagaaattggaatttttatatattgtggttgagaatggaaaatggtatagttattttgtttttttgttttttgagatagggttttattttgttatttaggttggagtgtagtggtatgattttagtttattttaatttttgttttttcggtttaagtgattttcgtgttttagttttttaagtagttgggattataggtatatgttattacgtttagttaatgtttgtatttttagtagagacggggttttattatgttggttaggttgtttttgaatttttgattttatgtgatttattcgtttcggttttttaaagtgttggggttataggtttgagttatcgtattcggtttatagattgtatttatatgaagtatttagaaaaggtaaatttatgaagatagaaagtttattagtggtggtttggggttgagaatgaggattaattataaaaggtatgagagatttgttt

SEQ ID NO: 319 - DNA, 5216 bp, Artificial Sequence
  chemically treated genomic DNA (Homo sapiens)
gtataggggtaggatttgcgttaggaataaaggttttcgtgtttttttgtttaggtgtgtttttatggcgattggttaagtagatatttttttgagtagaagtaaaattgttttgttaataattttttgttcgagtgtttaattttttttaggattttgagcgttatttttaagagaaagaaaagaaagaaaggaaggaagaaagaaagaaagaaagaaagggagaaaagaaagaaagaaaagaaaagaggaaaggaggaagggaagagaggggagggggaaagagagaaagatattggtttgtgggataatagaaaggcgggataattcgaagtggggcggtggggggtttttagtttataggtagattttaaatttttttggttgataattggttgagtttttttaaagatttgaaattaatagaaaggaatgtttgggttaagataaaggattgtggagatttaagtttttatttgtagaggaaatttttaaattttaggttttagagagaatgggttgtaaaatgttttttattaaatttaaagtttgtgttgatgttaacggtagagaggtataatgaggtacgtttaatttttattttttattatggtttgaaacggttattcgggtttaattttgaaagagttttggttgaggaggaagtttatttagatggttgtggggggcggttttagaattttatttttgttttatagaatgtttattataatgattattatttttattttatatgtgatgaaaatgagaaagatattattattttatttttttgtataaaattgaatttttataatttttaggataaaattttttattaaatgtggagtgttattagtttattaggtattgaggaaatattagtgaataaaaaatcgtgttttttatatttaaaattggaattgtggtcgatttagttttatatggtttaatttttgtatatttttttaatttggatttattttttttgggattttttttttgttaataagttttgtttttttttttttttattttatttttatttttgggggaggttttcgtataagttgttttttttgtttgtattttttttttttttttttattagtattttttttttaatattatttttaatatgttaagtttagtgttatttatttagaattattgtattaatgatttagtttttttataattttttttatagttattattaagttatagtgtaattatttgatgttgtttttttttagatttttttggtagttttagaagattagggtttcggtggtatttaagaatttttataggaaatttttaatttttaaaaagttatataatttaggtaaaggtttaattaagtataaatttaggaaaaaggttatttttaaaattaattttttttttttgaatttaattttattttttggagttaattaatgaagtttgtaattttttttataaaatagtatgttaaaatatttataggttattattttattttttatatttttttttttagtatttatttagtttttggagagttatttattgagtatttgttgtgtattatgttttggttagggatagggtttggattttgagtttttttttatgtaattgtttggtttttttttttaattttttaattaaaaaaaatttatttttttatttttttaagaaaaatttttttatttttattttatttatttatttttttttttgagttagggttttgttcggttgtttacgttgtagtgtagtagtgtaattatggtttattatagtttggaatttagttttaaatgatttttttagtttggttttttaaagtgttagaattattggtatgagttattgtatttaatttaggttagtttttaagatttatatttggtttagtaaggtggtttatgtttataattttagtattttgggagatggaggtaggtggattatttgaggttaggagttcgagattagtatgattaatatggtgaaatttcgtttttattaaaaatgtaaaattaattaggtgtggtggtacgtgtttgtaattttagttatttaggagattgaggtaggagattcgtttgaatttaggaggtggaggttgcgatgagttaagattgtattattgtattttagtttgggtaataagagtgaaattttatttaaaataataataataataataataataaaatttatatgtgttttaggtggggaagatgaaaaaagtttttagttaaaagttatattttgtttagtgtttgtttagatagttatagttgtttaaattgtttttttgtatttatttgtttagtaatattgttaattttgtaagaattagttttatgttttgttttgtatagggttggttgtttttttttttagattatgttttttttttttattttttttttttaataatataagtttttggtttttttttttttaagagttttttgtattatggacggaagttttgggtttatgtttgttttatttattttttggagtattttagggatttgtttttgttatgtttgtgttttagggttttttattaattttagtattcggtagataaatgatagatatttgttgaattaagttgtgagttggagatttttgtagaattattattgttttttttaatttggaattttttatttagagtgttttttttaagatgatgaggtgttagattttagtggtttgagttttttgaaagtagagattttgagaaagaagattagttattaagattatattaaaaagatgtgtttttgtgttaaagattttatttataaataggtaatattattatttttattttatagaagggaggtttaagttttataattttagtcgtaaagttgggattttaagattggttatttgattttgagttagatataattatattttggtttttagggatattatagaggtttggtatggtattagggtatggtttagtgtattggggtatgtttaataggattcgtagggggtagtgatgagtttttttgtttggattggggataaatttgtagttattttttttttaattaaagaggaagtgggaatttaaaaaagattttttgtcgggtacggtggtttatgtttgtaattttagtattttgggaggtcgaggtaggtgaattatttgaggtcgggagttcgagattagtttgattaatatggagaaattttatttttattaaaaatataaaattagtcgggtgtagtggtatatgtttgtaattttagtcgttcgggaagttgaggtaggagaattgttggaatttgggaggcggagattgtagtgagttgagatcgcgtttagtttgggtaataagaataaaatttcgttttaaataaataaataaaagtaaaaaagatttttaggtcgggtgtggtggttttcgtttgtaattttagtattttgagaggttaaggcgggcggattatttgaggttaggagtgtttggttaatatagtgaaattttgtttttattaaaattataaaaattagtcgggtatggtggtgggtttttgtaattttagttatttaggaatttgaggtaagagaattgtttgaatttgggaggcggaggttgtagtgagttaagattacgttattgtattttagtttgggtaatagagttaaatttagttttaaaaaaaaaaaaaaaaaaaaagatttttatatagttttttttttagaggtttagggatgtggatttgtgagggttgttgtaaatgcgtagttttttattttttgggatatttgttgtttttttgttttgttttgtttgttgttttttttattttgttttgttttttgtttttgtttgttttttgcgaaattggtgagttattaattaatttttatttaatatagttttatttttttttttttagggtatagagattgtattgaggggagggtaggagagagtaacgtgtaagtgggaaaattgatttaaaatattttgttttataattttaggatagaaaatggatagtgtaagtgatttagagatttggttaatgtgtttttgttaaatatatttatttttaagaaagttagtattgttaggtatagtggtttacgtttgtaattttagtattttgggaggtcgaggcgggtggattataaggttaggagtttaagattagtttggttaagatgatgaaaatttgtttttattaaaaaatataaaaattagttgggtgtggtggtgggtatttgtaattttagttattcgggaggttgaggtagagaattgtttgaatttaggaggcggaggttgtagtgagtcgagattatggtattttattttagtttgagtaatagagtaagattttattttaaaaaaaaaaaaaaaaaagaaagaaagttattatttaattaaaggagtaaggaaaaaaaaaggaagggggaatttttttttagattaattttttttttttgaatttaattttattttttttggtgttaatagatgaggtttataattttttttataaaatatgtagttaaatatttgaggatatttagggatttggatttggtggtaggagattaatataaattaagataaggaagaagttaaagaaatgaattaagtagattttttgggatataaggtagggggattggggggttggatagtgtagagtatggtattggtttaaggtattgaggattattttttttttatatttattagagaaggtttaggttttcgagttaatagggtatttatcgtttggggcgtttgagttattaggatattgttaggagatatagaattttagatgttttgtagaattttttttgttacggtttttttttttgaaatattttttattgtaatatttttaggaaaggaagggggttggttcggaggaagagaggtggggaggtgattagggtttatagaggagggaattgaatgatattttaggattatataaattgttagaggtagtcgaagagtttataagtgtgaagtttggaagtcggcgggtgtcgttgtgtaggaaagaacgtaaagtatttttagagtttgttcggagtttagaggttcggaagatttatcgattatggtgagtgtagggttttggggtcgaacgcgtgttattcgggagttataggggttggatggggttttttagatttttgttttttttttagg

SEQ ID NO: 320 - DNA, 5216 bp, Artificial Sequence
  chemically treated genomic DNA (Homo sapiens)
tttggggagagagtagaggtttaggaggttttatttaatttttgtggttttcgagtggtacgcgttcgattttaagattttatatttattatggtcgataagtttttcgaatttttgagtttcggataggttttggaagtgttttacgtttttttttatatagcggtattcgtcggtttttaggttttatatttgtgaatttttcggttgtttttgatagtttatgtaattttgggatgttatttagtttttttttttgtgaattttgattatttttttattttttttttttcgagttagtttttttttttttttggaaatattgtaatgaaggatgttttagggagggggatcgtaataggaaggattttgtagggtatttagggttttgtgttttttggtagtgttttgatgatttaggcgttttaggcggtgaatgttttgttgattcgggagtttaagttttttttggtgggtgtgggaaaaggatgatttttagtgttttaggttagtattatattttgtattatttaattttttaatttttttattttatattttagagaatttatttgatttatttttttgattttttttttgttttggtttatgttgattttttgttattaaatttaagtttttgaatatttttagatatttaattgtatgttttgtggaagagattgtgaattttatttgttggtattaaggggggtagaattaggtttaagaaaaggaagttggtttaaagaaaaattttttttttttttttttttttttgtttttttgattaagtaataatttttttttttttttttttttttttttgagatagagttttgttttgttgtttaggttggagtagagtgttatgatttcggtttattgtaattttcgttttttgggtttaagtaattttttgttttagtttttcgagtagttgggattataagtgtttattattatatttagttaatttttgtattttttagtagagataggtttttattattttggttaggttggttttgaatttttgattttgtgatttattcgtttcggttttttaaagtgttgggattataggcgtgagttattgtgtttggtagtattaatttttttaaaagtggatgtatttaatagagatatattggttaagtttttgggttatttatattatttattttttgttttgaaattgtgaagtaaggtattttgaattagtttttttatttgtacgttgtttttttttgttttttttttagtataatttttgtgttttaggaaggaagggatgggattatgttgaatgaggattaattagtaatttattagtttcgtaaaaaatagataaaaatagaaaataaaataaaatgaaaaaaatagtaaataaaataaaataaaaaaataataaatgttttagagaataaggagttacgtatttataatagtttttataggtttatatttttagatttttggggaaagaattatatgaaagtttttttttttttttttttttttgagattgagtttggttttgttgtttaggttggagtgtagtggcgtgattttggtttattgtaattttcgttttttaagtttaagtaatttttttgttttagatttttgagtagttgggattataggagtttattattatgttcggttaatttttgtagttttagtagagatagagttttattatgttgattaggtatttttgattttaggtgattcgttcgttttggttttttaaagtgttgggattataggcgagagttattatattcggtttgaaagttttttttatttttatttatttatttgagacggagttttgtttttgttgtttaggttgggcgcgattttagtttattgtaattttcgttttttaggttttagtaatttttttgttttagtttttcgagcggttgggattataggtatgtgttattatattcggttaattttgtatttttagtagagatggggtttttttatgttggttaggttggtttcgaattttcgattttaggtgatttatttgtttcggttttttaaagtgttgggattataggtatgagttatcgtgttcggtagaaagttttttttaaatttttattttttttttaattgagaaagaagtagttgtagatttgtttttaatttaaataagaaggtttattattgttttttgcgggttttgttgggtatattttaatgtattgggttatgttttggtgttatgttaggtttttgtgatatttttgaggattaagatatgattatatttgatttaaagttagatagttagttttggaattttagttttacgattgaggttatgagatttgggttttttttttgtaaaatggagatgatagtattatttgtttgtgagtaaagtttttggtatagaaatatatttttttagtgtggttttgatgattagtttttttttttagagtttttgtttttagagaatttaggttattgaagtttgatattttattattttaggggaggtattttgggtggggagttttaagttaagaggggtagtgatggttttgtaaagatttttaatttatagtttgatttaataaatgtttattatttgtttatcgagtattagggttggtagaaagttttgggatatagatatgataaagataagtttttgaagtgttttaggaggtgggtagagtaaatatgaatttagaattttcgtttatagtgtagagggtttttaaaagaagagaaattaaaggtttgtgttgttgggggagaggggtggaggggaggaatatggtttggagaaaggaatagttagttttgtataagataggatatggggttggtttttatagggttaatagtgttgttagataggtagatatagaaaggtaatttgggtagttgtagttgtttgagtagatattgggtagaatatagtttttggttgggaattttttttattttttttatttggagtatatgtgggttttgttgttgttgttattgttgttgttttagatggagttttatttttgttgtttaggttggagtgtaatgatgtaattttggtttatcgtaatttttattttttgggtttaagcgagttttttgttttagttttttgagtagttgggattataagtacgtgttattatatttggttaattttgtatttttagtagagacggggttttattatgttggttatgttggtttcgaatttttgattttaggtgatttatttgtttttattttttaaagtgttgggattataggtatgagttattttgttgggttaagtgtgggttttagaagttagtttgggttaggtgtagtggtttatgttagtaattttagtattttgggaggttaagttgaaaggattatttaaggttgagttttaggttgtgataagttatgattgtattattgtattgtagcgtgggtaatcgagtaagattttggtttaaaaaaaaaaataaataaataaaataaaaataaaaaagttttttttggggaaataagaaaataaattttttttaattaaaaaattaaaaaaagaagttagatagttgtatgaggaagggtttaagatttaggttttatttttggttagagtatggtgtatagtaggtatttagtaaatggttttttaggggttggatggatattgggagagaagatatggaggatggaatgatggtttgtagatattttaatatgttgttttgtggaagagattgtagattttattgattaattttaaggggtagaattaagtttaagggaaagaaattggttttaagaataattttttttttagatttgtatttaattgaatttttgtttaagttatatggttttttaaaaattagaggttttttgtaaaaatttttaggtgttatcgggattttaattttttggagttgttaagggggtttgggaggagataatattaaataattatattataatttaatgatagttgtgaaaagggttgtgaagaagttgggttattggtataatggttttgagtaggtgatattggatttgatatgttgagaatggtgttgagggaaggatgttggtagaaagaaaagggaaggatgtaggtagagaaaatagtttgtgcgagagttttttttaagagtgggagtagggtggaggagaaaaagaatagggtttgttgataaagagaaggttttagaagaggtgagtttagattggagaggtatgtaggggttagattatgtagggttaagtcggttataattttaattttgaatgtgaggaatacggttttttatttattagtgtttttttagtgtttagtagattagtggtattttatatttggtgaaagattttattttaaaaattatgggaatttagttttatgtagagaagtgaaataatgatattttttttatttttattatatataaaatgagaataatggttattgtggtgaatattttgtaaagtaaaaataaaattttaaggtcgttttttataattatttgaatggattttttttttagttagggtttttttaaaattaaattcgagtgatcgttttaggttatgatgggaagtaggggttgaacgtgttttattatatttttttatcgttaatattaatatagattttaagtttgataagaaatattttataatttattttttttgaagtttaggatttgaaggttttttttgtaaataagaatttgggtttttataattttttattttaatttagatatttttttttattgattttaggtttttagagaaatttaattaattgttaattagaaaaatttaaaatttatttataagttggaagttttttatcgttttatttcgagttgtttcgtttttttgttgttttataaattaatgttttttttttttttttttttttttttttttttttttttttttttttttttttttttttttttttttttttttttttttttttttttttttttttttttttttttttttttttttttttttttaggaataacgtttaaaattttaagggaaattgaatattcgaataaaggattattagtaaagtaattttatttttgtttagaggggtgtttgtttggttagtcgttatgagagtatatttgaataaaggggtacgagagtttttatttttgacgtaagttttgtttttgtat

SEQ ID NO: 321 - DNA, 5145 bp, Artificial Sequence
  chemically treated genomic DNA (Homo sapiens)
tggtagaagttggttattgttatggtaatagtaaattgatatggtatattggtgagtatgttttatggaaagttgtttttatttatttttgttttagttagtttttaatttggtttagtgtttaagttttatttttagagttaagttttattttttattttagtgttattttaaaatatgtttttttaatatatggtttttttttgagtaaaaggttattatgaattagtagaggtagtaaaagttttaaaaatatggtataatattttttttttgtaaagaaaatttataatttttgaagaaaatagtcgtttgtaaaaggtattttttttttttgtattaggaagaggaggatttttaataatttttattaatggagaaggtattggttttaatttgtataataaattttattaaatatattttgttgtttggtatattttttttggttattgggtaatttgtttttttaatttagaagttttaaatcgttttttttttgtttagtttaatatattttataagtttaagttttaatatttttttgggttatttattattgggtgtttttatgtttatgagggatatatattttaattaattttaatgtgtttttttttttttaatttgtttttttttagtttggtttatagggttttagttagagaatttaagataagaagaggaaaaagattattttttattttttttataattgggatttgtttttgttatattttatagtttgtttatattatgatttatttaattaattttttttttttagatatttaaattgtttttaattttgtttttaaaatattgtagtatataaatttatagttaagtttagtatatagtttttattatttttttatgataaaattatttttgtggatttgttagaaatttataaatgtttgatattttaatttatattgataaattgtttattagaaattatatttatttgtaatttttttggttatatataagaatgtttatttatattattattaatattatgtttttattttttaaatgaagatgaaaaatgtatttatgttaaaattgatatttttttattaataaatagaaataaaattttttttttgtggattgttttttttatgattttgatttattttagttttaaggtgtttattttttttatgtttataagaaaaatttaatattaaaaatttaatgttggttaggtacggtggtttatatttgttattttaatattttgggaggttaaggtgggaggattatttgagtttaggagtttaagatgagtttgggtaatatagtgagatttttcgtttttataaaaaataaaaaaattagttaggtatggtgttatatgtttgtagttttagttatttaggaggttgaagtaggaggattatttgagtttaggaggttaaggttgtagtatgttgtggtgttgtggttatattattgtattttattttgagtaatagagtaagattttgtttttaaaattaaaaaaaaattgttatgtttttgttatgtattttgtaagtaatttgttttttttagtacgttgtttttaatttttttatggttttttatatagaaagtttttatattttatagagttaaatttattgattttttttttttttattgtttttgtttttgaagttatgtttattatttagaattgaattagttttagaggagtaaaattaatgttttaaatagaggaatagaaagttgttttttatatgttttatgaggaaagtgtgaggaagagaggataagcgttttttaaagttgagatgggttagaggatggttggcgttattttttttttattaggttttgatatattggagttggatggtagttggtgggttagttatttataaataggaagttttatgttgtttttttgggttggcgatatttttgaaaaaatacgtgtgttttaagtatttttttttaaaaagatattttttattaataaaaaaggtgtttatttttaaaattttaaattttatagaaataaataaaatgtgaaagaaatataaaattttgggattttaatttattatgttaaaaggaaaaattaagttgaaagttgagttatataagaaattgtttttttttgagtttttaagtagagagttatagataaaaagttgttgtttttacgggtagttattttatgtttattttattttaagaaagtgttaatttattgagtatgagaagaatataaattgattatttttttatttatttttttttttttgtaatatatggatttagtaatgtgattgtatttttttttttttttttttggttagtttttttttttaattgaaggttttgaaataattttgagaaaaaggtataaattatagattttttttgtggttttgtgtttttttttgtttttaatgttgatgaaataaatttttaaattgattgagatttgttttaaattttttttggtttataaaggtaagaagtgaaaattttattttagtttttttataatttaatatttgaaagataagtattgtaaaaaaatttagtattaatttttttaggtttttttttaatatatattttaataataatatagtatgttatggtatattggtatatttatagtatagtataaatatagtattatatataaaaaggattaattttatagatattgttttgtaatgtgttttttttatgtgatttattaaaagtatttttttatgttttatttttaggtttatgttatattattttgatggttatataatattttataatatggatatattataattttagttgtttgtaattttttattataaaaatgttataataaacgtttttgaatagaattttaaaatatttgtgtaattatttttgtgggatagattttttaaattaaaattattaggtgagaaaaagatataaattttaaagtttggtggaaatgataaatttttttttttagaaggtattgatttatattttttttgatgttgtatgagggtttatttttttatatatttatgttaataatgtaaattattattttttttaattttattaatttgatggtgaaaaatggtattttatagttaagatatatatatatatttttggttatattagattttttttgtaggtttgatattttttttgcgaaatattttttttgtaagttgattatttatattatttgtttattttaaaaattattttgtattgattggtaagaattattggtaagaatattttgaatattaataattttatatatattgtaaatattttgttacgtttttttattttgttttttatttttttatttgtatgtaaattttatttttttatattattagttgtgtttatttttttttttttattttggattatatgttatatgtagttaggttttttatatttaaattataggaatatttttttatattgtttttttagtattattgttattattttatttatttagttatttattttgagatagagttttattttgttttttaggttggagtgtagtggtataattttggtttattgtaattttcgttttttagatttaagtaatttgtttgttttagttttttgagtagttgggattataggcgtatattattatatttggttaatttttgtatttttagtagagatgggttttattatgttggttaggttggttttgaatttttgattttaggtgaggaggttcgtttcgattttttagagtgttgggattatagttgtgatttattattttcggtttttttttagtattattatagtatttttgtatttaaaattttaatttaattgtagtttattattgtggatgacgtttatataattatgaggtaaatatttggtttttttttatttagtaatagtaaataattgttttgatttaattttatttttttggtaattttttgatagataatatttatatttgtatttaaagttgaaaaagaaaacgagtattatttttgtaatttttatttattgtgatttaaagaattataattttgaaaatgtgttttggaagtttgttatggttatttttttttttaggtatttttttagggtatattcgtttttgtattattgtttgtttttttgtgttataaatttttgttttttttttttttttttgtttttttttatttatttttttttttaatttttttttttttttaattatttataatgttaattattttaaatgtttttgatttttttgttttggtagtttaattatattttatagtttttatgtttttttgttttggaataagtttttatttatttaattgtgaattttattagagttgtaaaatgtatgtcgaatataggatttggggattgtaagtatttatagttgatatttaatttttttttttttattataaaaacgattttagaatatgaaaaatatttttggagaaataaaaaaattaatttttttattattttatgggtttatattttttaatataattatatgggataaatgtttgtattttgttattggtttgtgaatatttatttatatttttatgtggttttgttagggatagtatatttaagtggataaaaggttgtgtggttgaatttggttttttgtttataaaagagtgatttttagtgatttatttagtttttttgtttttttttttttttattgagatgagaaaatttattttttttaatttttttgtgtgagaattaaaatgtagtaagaaaatatatatttataaatatatttgttttggtaaaggagtatattagaagggttggtttgtgcgcgtttttgttttttgtgtatgtgtattatgttttatgttattgtaaaagatgtaaagagaggtacgtggttaagttttcggggtgtggattttattagttttattttagttttttttgtatgaagagtttagaattaaaagaggaaattaatttttaagatgagttttttatgtaaatttgtagttagtttttttttgatttttaatgttttttttaaaggtaagtataagagttaaagaagttttaatttagttttttttgaaagtgatttttagtaatttttttgttttttatagg

SEQ ID NO: 322 - DNA, 5145 bp, Artificial Sequence
  chemically treated genomic DNA (Homo sapiens)
tttataaaaagtaaaagagttattgagagttatttttagggaaagttgggttgggatttttttgatttttatgtttatttttggaagaaatattgaaaattagaaggaagttggttataaatttatatggaaagtttattttaggggttggtttttttttttgattttgagttttttatgtaaaaggaattgaagtgagattggtggagtttatatttcgagagtttaattacgtgtttttttttatattttttatagtaatataaaatataatatatatatatagagagtaagagcgcgtataagttagtttttttgatgtgtttttttgttaaagtagatgtgtttatgagtgtgtgtttttttgttgtattttaatttttatataaaaaaattgggaaggataggtttttttattttagtgaaagagaaaaggaatagagaggttaagtagattattaaggattatttttttgtaaataagaagttaaatttaattatatagttttttatttatttaggtatattgtttttaataagattatatagaaatataggtaaatgtttataagttaatagtagaatgtaaatatttattttatatgattatattgaaaaatgtagatttataaaatgatgaggaaattgatttttttgtttttttaaagatattttttatgttttaaaatcgtttttgtggtgaaaagaaagaaattgaatattagttgtaaatgtttgtaatttttaaattttatgttcggtatatattttataattttagtgaaatttatagttagataaataaaaatttattttaaaataaagaagtatagagattatgaaatataattaaattattaaaataaaggagttaaaagtatttaaagtgattaatattataggtggttaagaaaaaggagagattaggagaaaaaataaatgagagggaatagggagagaaaaaaagaatagaaatttgtgatataaggaaatagatagtgatgtagagacgggtgtgttttgaaaagatgtttaaaaagagaaataattatgatagatttttaaagtatatttttagggttataattttttaggttatagtgagtaaaaattgtaaaagtggtgttcgtttttttttttaattttaagtataaatatggatattatttgttagaaagttgttaaggaaatgaaattaagttaaagtagttgtttgttgttattgggtaaaagaaagttaaatatttattttatggttgtatgagcgttatttataataatgaattatagttggattaaagttttaaatgtaaaaatattataataatgttaaaaggaggtcgggggtggtggattatagttataattttagtattttgggaggtcgaggcggatttttttatttgaggttaggagtttaagattagtttggttaatatggtgaaatttatttttattaaaaatataaaaattagttaggtgtggtgatgtgcgtttgtaattttagttatttaggaggttgaggtaggtaaattgtttgaatttgggaagcggaggttgtagtgagttaggattgtgttattgtattttagtttggggagtagagtgagattttgttttaaaataaataattaaataaataaaataataataataatgttaaaaggataatatagaaagatatttttatagtttgagtatggaaggtttggttatatataatatataatttaaagtaagaaagaaaagatgaatataattgatgatataaagaagtaagatttatatgtagatgaagaaataaggaataaaatgaaaaggcgtgataaaatatttgtaatatatataaaattattaatatttaaaatatttttattaataatttttattaattaatataaagtagtttttaaaatgggtaaatgatataaatgattagtttgtagaagaaatatttcgtagaagaaatattaaatttataagaggagtttaatgtgattaaaaatatatgtatatattttagttataaaatattattttttattattagattggtaaaattagaaaagatgataatttatattattaatatgagtgtgtggagaaatgaatttttatataatattagagggaatgtaaattaatattttttggggaaaggaatttattatttttattaaattttaaaatttatgttttttttttatttagtgattttaatttgagaaatttattttatagaaatgattgtatagatgttttaaaattttgtttaaggacgtttgttgtagtatttttgtaataaaaaattgtaaataattaaaattatggtatatttatattatgaaatattgtataattattaaaatagtataatataggtttaaaagtaagatatggaaagatgtttttggtaaattatatgaaaagagtatattgtaaaataatatttataggattagttttttttatatatgatattatgtttatattatgttatgggtatattagtatattatagtatattatgttgttattaaggtatgtgttggaaaaaagtttgaaagggttgatgttgaatttttttatagtgtttgttttttaggtattagattgtgagagaattgaaatgaaatttttattttttatttttgtaaattaaaaagaatttgagatagattttaattaatttagaagtttattttattaatattagggataaaaaggaatatagaattataggaaaaatttgtggtttgtgttttttttttaagattattttaaaatttttagttaaggggaaaagttggttagaggggaaggagggagggtatagttatattattgaatttatatgttgtaagagaaaaaaagtaggtaggggaatggttaatttgtattttttttatgtttagtaaattggtatttttttaagataaggtgaatatagagtagttattcgtggagatagtagttttttatttgtaattttttgtttaggaatttaaggaaaggtagttttttgtgtgatttaatttttagtttaatttttttttttggtataatgaattggggttttaggattttatgttttttttatattttatttatttttgtgaagtttaaaattttggaaataagtattttttttgttaataaaaaatgtttttttaagaaaggatgtttagggtatacgtatttttttaaaagtatcgttaatttagaggagtagtatggagttttttgtttgtgagtggttgatttattagttgttatttaattttagtgtgttaaggtttggtggagagaaggtggcgttagttattttttgatttattttagttttggagggcgtttgtttttttttttttatattttttttatggagtatgtgaagagtagttttttgtttttttatttgaaatattaattttgtttttttaaaattaatttaattttgagtgatgagtatggttttaagggtagaaataatgaaaaagaaagaggttagtagatttgattttgtaaaatgtgaaaattttttatgtaaaaagttataaaaaaattaaagataacgtattaaaaggagtaaattatttgtaagatatatgataaaggtataataatttttttttaattttagagatagggttttgttttgttgtttaagatggagtgtagtggtatgattatagtattatagtatattgtagttttgattttttgagtttaagtgatttttttgttttagttttttgagtagttgggattatagatatgtggtattatgtttggttaatttttttattttttgtagagacggggggttttattatgttgtttaggtttattttgaatttttgggtttaagtgatttttttattttggttttttaaagtgttgggatgataggtgtgggttatcgtgtttggttaatattaaatttttagtattaaattttttttgtaaatatagaaaagatagatattttaaaattaaaatgggttaaagttataaaaggagtaatttataaaagaaaaattttatttttatttattaataaagaaatgttagttttaatatagatgtattttttatttttatttgaaaaatgaaaatatagtgttgatgatggtgtaaatgggtatttttgtatatggttaggagaattgtaagtaggtatagtttttggtgggtaatttgttagtgtgaattagagtattaaatatttgtggatttttaataaatttataaggatgattttattataaggaaataatgaaggttatgtattagatttggttataaatttatatgttgtagtattttaaagataaaattggaaataatttaaatgtttaagagaaggaaattggttaagtaaattatgatatagataagttgtggaatatgataaaaataggttttaattgtaggagaggtgaaaagtaattttttttttttttttgttttaggttttttggttggagttttgtaaattagattgggaaaagataggttaagaagggaaaggtatattgaagttgattaagatgtgtattttttataaatatgggagtatttagtggtgagtaatttaaagggatgttagaatttggatttatagagtatattagattaaataaagaaaaagcgatttggggtttttaggttggggaggtaagttatttaatgattaggaaaagtgtgttaaataataagatgtgtttagtaaggtttgttatgtagattgaagttaatgttttttttattgataagagttgttaagagtttttttttttttgatataggagagggagatattttttataaacggttattttttttagaaattgtaaattttttttataaaagaaaaatattgtgttatgtttttaaagtttttattgtttttgttggtttatgatggttttttgtttaaaaaaaaattatatgttaaaaaggtatgttttagggtggtattgaagtaggaggtggaatttgattttggaggtggggtttggatattggattaaattgaggattagttaaaatagagataggtggaagtagttttttataaaatatgtttattagtgtgttatgttagtttattgttgttatggtaataattaatttttatta

SEQ ID NO: 323 - DNA, 5236 bp, Artificial Sequence
  chemically treated genomic DNA (Homo sapiens)
ttatgtattaaggaatattgaaagtataaaatgagattatggtgaatttttttttattgttatttttgtggtaagggaatgaatggtggggagagaagttaagaggagaatttgttttgttttagtgttgtattgttttttgaaatagaatattaagtttttttatttatatgtgaaaaggtttttaatatttataaataagggtattatattagttttaaaggatgattttgagtgttttgtttattttttatgtttgaggaatagtattatttttggttttgtgagtattattattttaggattaggtgttttggtattaatgagttgttatattttgagtagtggtgatatttaatagagtatgttttaaaatagtatttatggttataaattgatgagggtgttaattatttttgaaagtttagtatgtaaggagtttaattttttttttttaaatttagggagtataatattaaagagatgggaagtgaaaatttttagatttagtaattattgaggatggttttatttagataatttattgaagtaagaaagtgaggattaggagtagtagtattacgtaaaatatttatcgattttgatagaagttatataataaaaatatatttatgttatatatttataatttataaaattttagtgtattttttataaaatatttataatagaaaatattaaatatgtaatttaaagaagtgtaaattgtaaatatatttttggatataaattttagaaaataaagttaattaatataaggttaatatgatatggatttttaatgaattataaataatgaaaataaaatattatttgattattgtaaagtttaattttatatatgtatataaattatttataaaattaaaaagtagaaataatttaaatatttataaattgataagtggataaatttaaggtgatatatttatataatagaaaattaggtaattaaaaaaatgaaatatttttatgtgttatatatatgaatattgaaaatattatgttaagtgaaagaaattagttataggtgattatatattgtgtaattttatatatttgaaatgtttagaatgagaaaatttatagagatagaatataagttagtggttgtttagagtggaagaaggggaagaggattaaaattgattgttatatagtataggatttttttttgaggtgataaaaatatattagattatggtggtagttgtataatttatgtatatttatatgggtgaattgaatggtatataaattatattttaagaaaagttatatatataatttcggattagtgtgtttttgagttataatatttgtacgtaatttttaatatgttaattaaaagtaatttatgtttttatattagttgaaggaagaatgttgaggtattttaattttaattatttttttttatttttttattttttaaataattttaatttttttttgataattttgggtagataattttttttaaataaggataataaatttttattggtaagagttgtattttgttttaaagtatattttttagtttgttttttttttttttggtttatgtatagttagatgtaaaagtattaaaaatagtttttgttatgttgaaattttgttgatttggtaaatttaatgtttaaattagagaatttttttttttttttttatattgtaagttatttaatgtgatagtatagtatgatttatagaagtatagatttgtttacgattgtaggttgtgggtggattggagttaaggaagaaaaaaatggagtaagagatttatatgttttgaatttaaggtataagggtgagatttttaaatgttaaagtaatttggtattataataaaattgtatgtagtttgtaatataaaaatgttttaaaataatttaatagggataatttttagaatattagtttggtagttattattgttattgtaattgtataggaatttgggtgttattttagttaggattattgtggatgattttgttttttaagttaggaggatttttgaaatgagttttttttgttaattatatgtttagtatagttagggtttttgattgtttgaaagttttattattgttatttttttagtttttgttatttattgggaagttagagagatttttcgttgttttaggattagaagatttttttttttttttagtttttaaaaatttttttttttatttttttttttagttattgttttttttcgattttttagtatggttttttgaaagaatttaggtattagaaaattaaagtttagaggtaattttgtcgaagtaatttaatttttaattaagttatgtaaaaattttaaggggtaggggagtattatggtttgggaggaggagagaaaatagagtgagagtaaagtaaattatttttaatttaatttgttatattaggatttaatttttaatagtttattttaaatattttttagttatatagaataaattatgttatttaatttgttgttgaatgattttttattattttgggttgatattagttagaggtggtgattgtttaaggtttagttaaaggagtttattttgtttttttgttgcgttttttagttattttattagtatgagttattgtattttgtgttagtgtattttgtgtttttttttattgggttttgtattacgtttttattttattttaattattgggtttttgttagttaaatttgtattttatatgatatatttttttatttgtgttttattgtgaatattttttgttgtttttataaaattttttattattttgggttatttttattttttttatttgtagattgtatgatggttaatgattaggattataatatatttttgtaatgttaatatggtatttttaatagttattgttttgtggttataataatatattttggatatataagattgaagattaagttaatttatttttatttaaatgggtttatttttttttgatatttgtagtttagttgtagagtatgagtatgtgtatataggtgtgtgtgatgataataaataatgggggaaatatttgagttaatttttatttgggaagggaagttaaatttataattgttagatagattttttaaaattttaaaaagtttaaattatatgtttggattagtttattttggtgtaaaatgggatatttaaatttttgttttatttaagttatattagttatatttgtattttagaggtgttgttttttttttttgagttagttgtaagtaattttttaattaattgaatatatttttttttttttttttttgagatggagttttatattgttgtttaggttggagtgtagtggttagattttagtttattgttattttcgtttttcgggtttaagaggtttttttgttttagtttttcgagtagttgggattataggtatgttattatatttagttaattttttgtatttttagtagagatgaggttttattatgttgtttaggttggttttaaatttttgatttcgtgatttatttgtttcggtttttcgaagtgttgggattataggcgtgagttattatgttcggtcgagagatgtttttaaaaagagtaatcgtaaaaaagagtaggagaataggagtaaatgtaggaaatagaaagggaatgaagtagaattgaaagggaaagaataaatgaatatgaagtaagagagaatgttattaataaatattatgttgtgaagttatatttgtattatagagtttaggttattttttagaatgagaaggaatatggtagtttgaatggaaatttagtttatgtgagtgtattatttaatttattttagttttattttgtttttttgtaaagaaagggatagaatgattttaaggtttaataagatttttttttgatttaaaatttgagaattttatgaaaggttattttgtaagttaggtagtagttgggtaatttagttaggtatgtgtttatattttaaatatattttagaagtattttgtagagtttgaaaaggtttttgaatttgtttttaaaaaaaaaaaaaatttttaatatgagttgttttttggattttgttaaagtgtttttttttttttttgtaagagatttttgtttgtaaaagttatttgggaaatatttattataagtttttttgtaggatggaaattaagaaataataataattatatattttatgagatattatatattagattgataaatatatattaacgtagattatttaattttaatagaattagtatgaattaattgtaaatgataaattatattgtagttgaatgtgtagggaaaaaattttttagtaagagagtaatgttatggttgaaataagatattttttatattttatatttgttttaaattttttatatttgtagtttatttaaagttattaataaaattgaaagtaagatatttttattttaaaaattttatgttttaaatagtttttaggataagttatttaggtttgaatttagtatttatgaaaattagatttttttttaatagttattttaagtatggtgatattagagagtgttttagtataaaatttttgagaatttttttttatttatttatgttttttttatttttatagatagttttttaatgattagacgaattgattttttttgtgatttattagtttattttttgtaaaatttatgttttgttgttgatttgtgaataaggtatcgtaaataaaatatttgttattatatttgtttattatttaatggaaaatatattagttaatttatattttgttcgtaggagagttttagaaggggtgtggaaggttgtgttgggtggagaaattagatagtgaggatgtaattaagttgttgagataagggaagagagatgagggtgagagttttttttagataagattttaatatgttaattatgtgtagaaagaaaattaaaaaggaggaatatgaagaaatttagatatgatattattagttttgttattggtaggtattagaagtaagaaaagggagacggatcgaggaagttattttggtgaaataaaaagaaaagtatttgtttatttagaacgggtaaaatgatacgttttagtgggtgttttttttgtattttgatttttttgtattgatatttaagtttttgttttatgatttttttttaatgataga

SEQ ID NO: 324 - DNA, 5236 bp, Artificial Sequence
  chemically treated genomic DNA (Homo sapiens)
tttattattagaaagagattataaaatagaagtttaaatattagtataaaaagattaaagtataaagaaaatatttattgaaacgtattattttgttcgttttaaataaataaatgtttttttttttgttttattaaagtggttttttcggttcgtttttttttttttgtttttaatgtttattagtggtagaattaataatgttatatttgaatttttttatattttttttttttaattttttttttatatatgattaatatattgaaattttatttaaggagaatttttatttttatttttttttttttgttttagtaatttagttgtatttttattatttggtttttttatttaatataattttttatattttttttggagtttttttgcgaatagaatgtgggttgattgatgtgttttttattaaatgataagtaagtatggtaatagatgttttatttacgatattttatttataaattaatagtaagatatgaattttataggaaatgaattgatgagttatagaaagaattaattcgtttaattattggaaagttatttgtgaaaataagaaaagtatgggtaaatagaaaaaaatttttagaaattttatattgggatattttttaatattattatatttaaaataattgttaaaagaaagtttaatttttatgaatattgagtttaggtttgaatggtttgttttaaaaattgtttaaaatatggaatttttaaaataagagtattttatttttagttttattgatgattttggatagattataggtataaagaatttgaagtaaatataaaatgtagaggatgttttgttttaattatggtattgtttttttattgaagaattttttttttatatatttaattataatatagtttgttatttgtagttgatttatgttaattttgttaaaattaggtagtttgcgttagtatatatttgttaatttaatgtatggtgttttataaagtatgtgattattattattttttgatttttattttataagaaaatttgtggtgaatattttttagatggtttttgtagatagaggttttttataaaagaagaaaagaatattttaataaagtttaaagagtagtttatgttgaagattttttttttttttaaggataaatttagaggtttttttaaattttatagggtgtttttggaatatgtttggaatgtaaatatatgtttgattgaattgtttagttgttatttggtttatagagtgattttttatagagtttttaaattttaaattaaaaagaaattttgttgaattttggggttattttgtttttttttttatagaaaagtaaaatgaaattaaggtaagttaagtgatgtatttatataaattgggtttttatttaagttgttatgtttttttttattttggagggtaatttgggttttgtggtataggtgtaattttatagtatgatatttattggtgatatttttttttgttttatatttatttatttttttttttttagttttgttttattttttttttgttttttgtatttatttttgtttttttatttttttttgcgattattttttttaaaaatatttttcggtcgagtatggtggtttacgtttgtaattttagtatttcgggaggtcgagataggtaaattacgaggttaggagtttgagattagtttgggtaatatggtgaaattttatttttattaaaaatataaaaaattagttgggtgtggtggtatgtttgtaattttagttattcgggaggttgagataagagaattttttgaattcgggaggcggaggtggtagtgagttgagatttggttattgtattttagtttgggtaatagtatgagattttattttaaaaaaaaaaaaaaaaaagtatgtttagttgattaaaggattatttataattagtttaggaagagaaaataatatttttaaaatgtagatgtaattgatgtggtttgaatgagataggaatttgaatgttttattttatattaaggtgagttaatttagatatgtaatttaagttttttaaggttttaaggaatttatttgataattgtggatttaatttttttttttaagtgagaattgatttaaatattttttttattatttgttattattatatatatttatatatatatatttatattttataattggattataaatgttaaaaagaaataagtttatttaaataaaagtgaattaatttaatttttaattttatatatttagaatgtgttattgtagttataaaataatgattgttggagatattatgttaatattatagaaatgtattgtaattttaattattaattattatgtagtttataaatgaaggagatgagagtaatttagggtagtgaaagattttatgagagtagtagaaaatatttatagtaagatatagatggggaaatgtgttatgtggaatgtaagtttgattaatagaagtttagtggttgggatgagatgaaagcgtaatgtagagtttagtgggaagaggtatagagtatattggtataaagtgtagtggtttatgttgatggaatgattgaaagacgtagtaaaggagtaaaatgagtttttttagttgagttttaagtaattattatttttgattaatattagtttaggatggtgaaaggttatttagtagtaaattggatgatatggtttattttatataattaagaagtatttggagtgaattgttagagattaagttttagtatggtaggttaaattagagataatttattttgtttttattttgtttttttttttttttttaggttatagtatttttttgttttttgagatttttgtatagtttgattaaaaattaaattgtttcgataaaattgtttttgggttttagttttttagtgtttgaatttttttaggggattatgttggggaatcggaagagagtaataattgggaggaagaatgagggaggagatttttagaggttaggaaaggaagaaagttttttggttttagagtagcggggaatttttttggttttttagtgagtagtagagattaagaaggtgataatgatggggtttttagatagttaaagattttggttgtattagatatgtgattgatagaagaggtttattttaagaatttttttggtttagaaaataaggttatttatagtgattttgattggagtagtatttagatttttgtgtagttgtaataatagtgatgattgttaggttggtattttgaaaattgtttttgttaaattattttaaaatatttttgtattgtaaattatatataattttgttgtgatgttaggttattttgatatttggaaattttatttttatgttttgaatttaaagtatatgaattttttattttattttttttttttttgattttaatttatttatagtttgtagtcgtaggtagatttgtgtttttatgagttatattgtattgttatattgagtaatttgtagtataaggaaagaaagaaaagttttttaatttagatattagatttattaaattaataggattttaatatgatagaaattgtttttggtatttttgtatttgattgtgtatgaattaagaaagaagaaaataaattggaaagtgtattttgaaataaaatataatttttgttaataaaaatttgttatttttgtttaaaaaaaattgtttatttaaagttattaaaggagaattgggattatttgaagaataaaaaggtagaaggaaatagttggagttaaaatattttagtattttttttttaattggtatagaggtataaattgtttttaattagtatattaaaaattgcgtataaatattatgatttaaaggtatattagttcggggttatatatatagttttttttgagatataatttatatgttatttaatttatttatgtagatgtatataaattgtgtaattattattataatttagtatatttttattattttaaaaagaaattttgtattgtgtagtagttagttttaattttttttttttttttttattttaggtagttattagtttatgttttatttttatgggtttttttattttagatattttagatatatggaattatataatatatagttatttgtgattagttttttttatttagtatgatgtttttaatgtttatatatgtagtatataggagtattttatttttttgattgtttaattttttattgtatggatgtattattttaagtttatttatttattagtttatggatatttgagttgtttttattttttagttttatggataatttgtgtatatatatgaggttgaattttataatgattaaatagtattttatttttattatttatgatttattaaaggtttatgttatattaattttatgttaattaattttattttttaaaatttgtatttaaaggtatgtttataatttatatttttttgaattatatatttaatattttttattataaatattttataaggagtatattaaaattttgtaagttataaatgtatggtatagatatatttttattatatgatttttgttaaaatcggtaaatattttacgtaatattattatttttagtttttatttttttgttttaatgaattgtttagatgaaattatttttagtgattgttgagtttgaaagtttttattttttatttttttgatattatattttttaaatttggaaggagaaaattggattttttgtatattaggtttttaggaatgattgatatttttattaatttgtagttatagatgttgttttaaggtatattttgttaaatattattattgtttagagtgtggtaatttattagtattaggatatttggttttgaaatagtagtgtttataaaattagagataatgttgttttttaaatataagagatgagtagaatatttaaaattattttttagaattaatgtgatatttttatttataagtattgaaagtttttttatatgtagataagaaaatttgatattttgttttaggaggtaatatagtattgagatagagtaaattttttttttagtttttttttttattatttatttttttattataagaatgataatgggagagaatttattatgattttattttatgtttttaatattttttgatatatag

SEQ ID NO: 325 - DNA, 5883 bp, Artificial Sequence
  chemically treated genomic DNA (Homo sapiens)
  unsure 1678, 1758..1759, 1882: n is a or g or c or t
ttttaaaagaagatatataaatggttaataaatatgaaaaaatgtttaatattattaattattagggaaatgtaaattaaaattatagtgagatattattttatttttttgtaagaatggttataatttaaaaattaaaaaataatagatgttggtatggatgtggtgtaaagggaatatttttgtattgttggtgggaatgtaaattagtataattattatggaaaatagtatagagattttttaaggaattaaaagtagaattattgtttgatttagtaattttattattggatatttatttagaggaaaataagttattgtatgaaaaagatatttgtatatatatgtttatagtaatataattcgtagttgtaaaaatatggaattagtttaaatgtttattaattaataagtggataaagaaaatgtggtaaatatatatatgtatgtatatatatatatatatatatatatatatataaatgtatatatatatattatggaatattatttagttataaaaaggaatgaaattatggtatttgtagtaaggatatatgatgtattaagtaaaataaagtagtattataaaaaatttgtttagtattattatatttaggttatatatatatatatatatatatataattatataaatatgtatttattattttttattatatatttatttgttatagatattaaatagtaaattgttaaaaagtgtatatttttagaggatggttagattaaggagggatttttatttttaatttgtattatttaaattttatataataaacgtgtttttttttaataagttagtattttaaagatatttttattttgaaggaaaagaaatgaatagggaaattttatgttttgagaaataaataagagtaagattttgagatgttagagggaggtttttgaaggttatgggaaattttttaagagtcgatggtatgtagtgttttggggggttggaggtggtatggattaggaggttttgttgatttgatcgttatgtattttattgaaggtttaatatgttgttaaatttattttatagaaatttgttgtttgttgatttgttttttataatttgtatttattttataaagtaaatgttattatttagtaaaagtaagagagtttttagatgtttattttattgagatttttgttaatagaataagttttaggattaattttagaaagttttttgaaatgtaataatttaaggaaatatttattagtgttttattatatgtttattataaaaaaattgtataaaaagtttaaagtaaagattaaaaggtttttttttttttttattttattattagtttattagaggaaaaatgaggaatagttgtaataaataggaagaatttttttaggtattagttatgcgaatttaagtatatataaatttatttagatttaatagagattgttgtgttttaggaattagagagagagtagttttttgttatttatttacggagtatttatatatgttaagtgttatgttagtgagggtagatttaattaagaataaggggatatttcgcgtttgttattatagagttggtattttagatagtaggtagatatgagattagtaatataaataaagggtaattcgattgtttgtaattaaaaggaattngttgggtaggtcgcggtggtttacgtttgttattttttaaaggttaaaatttttttttttttttttgggggggggggggnnaaaaaaaaaggggggggtttttttttttttttttttttaaaaaacgcgggtcgattacgaagttaggagattgagattattttggtttaatgcgtgaaattttcgtttttattaaaaatatanattagtcgggcgtggtggtaggcgtttgtaattttataaatttttattttttttataattatttttgtatgaattggtgataatatatatttaattatagtatttttatgatgttgaggagggtgcgaatttggataacgtgattaaaaaaaaaaaaaaaaattttttttttgtggggggtttaaaaaaaaagggggttttttttttttttataaaaggggaaagggttttatttatttatttataaaaagtattaaatgttgttaaaaggtttatgtaatatgaattaggggttaaaattatgtttttattattttatatttagtttggatgaattttaaatatttatgaagtgttagttattataatgagattttattttttttggttaaattagaagttgggtattagaataatttattttttattaattttttttttttttgatgaaatgtaaagagaatgagataattgttaaagtaattttttgtcgataacgtttgatataatatgattgaagtgattttgaattttaattttgtttaaaatagagaattgtggttaggtattgtggtttatatttgtaattttagtattttgggaggttaaggtaagcggattatttgaggttaggagtttgagattagtttggataatatggtgaaatttaatttttattaaaaatataaaaattagttaggtttagtggtgcgtatttataattttagttacgcgggaggttgaggtataagaattatttgaatttgggaggtagaggttgtagtgagttaagattacgttattgtattttagtttggatgatagagtgaggttttgttttaaaaaaaagaatgtaagaacgtagtaaaataggttaggtatggtggtttacgtttgtaattttagtattttgggaggtcgaggcgggcggattatttgaggttaggagttcgagattagtttgattaatatggtgaaattttatttttattaaaaatatataaattagttgggtaaggtggcgggcgtttgtaattttagttatttggaggtagaggtaggagaattatttgaattcgggaggtagagtgtgtagtaagttgagatggttttattgtattttagtttgggagataagagtaaaatttttgttttaaaaaaaaaaaaaaaaaaagaatttaatattttaatgtaataaagtagagaatcgttgttatagtatttattaaagtgtgttttttattgataagtttaagtatttgtttgtttgttttttttgtttattttttagttattttggattttttttttgattatttttttttttttttagttttgatgttttggtttttattttgtaattcgtatattattttgtggatatgttttttttaaatttttttttaaaataatagtataaaggtagttataaattaattgttggtttttataaaaaattttattatattattaaaaattagttttattataataggatgaatattagattaatatttattattagagatgtagtttaaattgattcgggagaagatatttattgagttttttatttagtgtaattagttgttattatatatgtaaaattttataattataaagtattttagaaataaagtattgttaaatagttttaaatttattaaagtataaaaaatgtattgagtatatattatgtggtatcgtgtaaagtaatagagatgtttaaattaaaaggttattttttgtttttattaaagtatgattgaaagttcgttggagaatatagtttttatatagagttaaaatagtttttcgggtttataaatttaatgatttatatggtataattggttttagatataaatttatatgttagataagtaatgtagaaaaattaagaattaggaaataggaaaatagatttatatttttgttttgttgtaatttatttattttttttaattatttattaaatatttattgagagtttatgttgtgagagaaattgtattaggtgttggggaatatggtagtaaataagagagattatgtatgtgagtatgagtaggtggtttaatttttttatatttttaattttttttagatttaatgtttgaggtattttttagatttgaaatgttaaggtttgtaatagttttgtggagggagaagttgttaagtcgttttgggatttgaggatttattttttttttaaaggattagtttttgttttgattttaaaataattttgttatatagtttaaaaataatttggttaggtttttatttatattggggtaattttgacggtttggatgtggtaatttatgtttattagattttaaaggtaggaagttaaagttgggaaatggtggatgatttttattaatttatagttaggtagcggtttttattgagtagtttttttgtggttttatttagttttttaattaataacgtagcgttttttgtaggaaatttatcgtttgggttatttgttgttttttgttttaatgagttttgagaaaggattgttggttatgggattagaggttttatggggagggaagaattgtttttgatttttagtttttcgagcgggttttaaggtaataatttttttattatttagttttataattgtagtaaggaatagttttttttgtttgtagttgagatgatttttttaagggagaaaaagggatttttataacgaagagagggagagagagatgaagagggagggagtaagggagagagggaagaagggagaaagagagagagatttgaatatatattgttttaaggatgtaaaaaattataatttggaaaaggtttcgagtaattttaggaaaatgagttgttggattttttagttaatttgttttttttagttaatgaaaaagatagggtttgaggtttttttcgaaacggggtcggttaatttagttttttttacgagtttaagggtttgttatatttttgtttttttgaggattttttttacggagacggattatagtaagtagaggttgggggggggaaagacgaggaaagaggaggaaaataaaagttgttatttatggaagatataaagggtaagattaaaattgatttgatttgaatttttaagaaaaaaaaaatagaaggaaaaataaaagtttagattaaaaaaaaagtattgaaagtggattataggagtatttataaatatatttaagaaaattgataatgtggagtataaatgttgtatttttaaaattgggaatttgtttattgaggttttatttttagttatgtatgataatagattgtattttaggttttaaattttgtaaaaataatttttttatgatatgtttatttattttgtaaataattattgtgttatatagtaagagattgtatttttatttagttggttaaagtataaaattattgatatggtttggttgtgtttttatttaaattttaatttgaattgtattttttagaatttttataggatttagggggaggtaattgaattaagggggttggttttttttatgttatttttgtgatagtgaataagttttacgagatttgatggttttattaggggtttttgtttttgttgtttttttattttttttttgttgttgtcgtgtaagaaatgttttttattttttgttatgattttgaggtttttttagttaggtggaattataagtttaattaaatttttttttgtttttagttttaggtatgtttttattagtagtatgaaaatggattaatagtattagtagagtggggtattgttgaaaagatattcgaaaatgtggaagtaattttggaattgggtgttgaaataatttggagggtttagaagaagataggaaaatgtaggaaagtttggaattttttagagattgtgaatggtattgataaaaatattgatagtgatatgaataataaggtttaggttgaggtggttttagatggagatgaagatt

SEQ ID NO: 326 - DNA, 5883 bp, Artificial Sequence
  chemically treated genomic DNA (Homo sapiens)
  unsure 4002, 4125..4126, 4206: n is a or g or c or t
ggtttttatttttatttgagattattttagtttggattttattgtttatattattattagtatttttgttaatgttatttatagtttttaggaggttttaaatttttttatatttttttatttttttttgagttttttagattattttaatatttagttttaaagttgtttttatattttcgggtatttttttagtaatgttttattttattggtattattagtttatttttatgttgttgataaagatatatttgagattgggaataaaaagaggtttaattggatttatagttttatttggttggggaggttttagaattatggtaggaggtgaaaggtattttttatacggtagtagtaagagaaaaatgaagaagtagtaaaagtagaaatttttgataaaattattagatttcgtgagatttatttattattataagaatagtatgggaaagattagtttttttgatttaattatttttttttgggttttgtgggaattttggaaggtataatttaagttgagatttgggtggggatatagttaaattatattaatgattttgtattttaattagttgaatggaagtataattttttgttatatgatataataattatttgtaaaatgagtaaatatattataaggaaattatttttataaggtttgaaatttgaaatgtagtttattattatatataattaaaaatagagttttaataaatagatttttagttttgaaaatgtaatatttgtattttatattgttagtttttttaggtatatttataaatatttttataatttatttttaatattttttttttggtttgggtttttatttttttttttatttttttttttttaaggatttagattaaattaattttggttttattttttgtattttttataagtagtagtttttgtttttttttttttttttcgttttttttttttttagtttttgtttgttgtggttcgttttcgtgagagaggtttttaaggaaatagagatataatagatttttgggttcgtgggaggggttaaattagtcggtttcgtttcggaaggaattttaaattttgttttttttattgattagaaaggatagattgattgaggagtttagtagtttatttttttaaagttattcgaagttttttttaggttgtaattttttgtatttttgaagtaatgtatatttaaattttttttttttttttttttttttttttttttttttattttttttttttttattttttttttttttttttcgttatagaaattttttttttttttttgaaaaagttattttagttgtaagtaaaaaaagttattttttattgtaattatgaagttagataataagaaagttgttattttgaaattcgttcgaaaaattgaaagttaagaatagtttttttttttttataaagtttttggttttatgattagtaatttttttttaaggtttattagagtaaagagtaataggtgatttaagcgatgagttttttgtaggagacgttgcgttattggttggaaggttgggtggaattatagaggagttgtttaatgggaatcgttgtttggttatgaattgatgaaagttatttattattttttaattttgattttttatttttgaagtttaatgagtatgaattattatatttagatcgttaagattattttaatgtagatgagagtttgattaaattatttttaaattgtgtaataaaattattttgaaattaaaataagggttaattttttgaaaggaaggtaagtttttaagttttaaggcgatttggtagtttttttttttataaggttgttgtaaattttagtattttaggtttgaaagatattttagatattgagtttaaaagaggttagagatgtggagaggttaagttatttgtttatgtttatatatatggttttttttatttgttattatgttttttagtatttaatatagttttttttatagtatgggtttttaataaatatttgatgaatggttgaaaaaaatgaatgaattgtagtaaagtagaaatgtagatttgtttttttgttttttagtttttgatttttttatattgtttgtttggtatgtaaatttgtatttaaagttagttatattatataaattattaaatttgtgagttcgaaggattgttttgattttatgtagaaattatattttttagcgagtttttagttatattttaataaggataaaggataattttttagtttaggtatttttgttattttgtacggtgttatatggtatatatttaatatattttttatattttaataaatttggagttgtttaataatattttatttttgaaatgttttatagttataggattttgtatgtatgataataattaattatattgaatgaaagatttaatggatgttttttttcgagttagtttagattatatttttaataatgaatattggtttgatatttattttgttatgataaaattggtttttggtgatatgatgggattttttgtaaaaattaataattggtttatgattgtttttgtattattgttttggagagaaatttgaaaagagtatgtttataaaatagtgtgcgaattatagaatggaaattaaaatattaaagttagaaagagaaaagaatgattaaagggaagatttagagtggttgaggggtaggtaggagaaatagataaataagtatttgagtttgttaatgagagatatattttggtgggtgttgtggtaacggttttttattttattatattaggatattaggttttttttttttttttttttttgagataagagttttatttttgttttttaggttggagtgtaatggagttattttagtttattgtatattttgtttttcgggtttaagtgatttttttgtttttgtttttaagtagttgggattataggcgttcgttattttgtttagttaatttgtgtatttttagtagagatggggttttattatgttggttaggttggtttcgaatttttgattttaggtgattcgttcgtttcggttttttaaagtgttgggattataggcgtgagttattatgtttggtttattttattacgtttttatatttttttttttgagatagagttttattttgttatttaggttggagtgtagtggcgtgattttggtttattgtaatttttgttttttaggtttaagtgatttttgtgttttagtttttcgcgtaattgggattatagatgcgtattattaagtttggttaatttttgtatttttagtagagattgggttttattatgttgtttaggttggttttaaatttttggttttaagtgattcgtttgttttggttttttaaagtgttaggattataggtgtgagttatagtgtttagttatagttttttattttaaataaaattaaaatttaaggttattttagttatgttgtattagacgttgtcgataaaaggttattttgataattgttttattttttttatattttattagggagagaaagagttagtaaaaagtaaattgttttagtatttaatttttggtttaattaggagaggtaaaattttattatagtaattagtattttataaatatttgaagtttatttaaattgaatatggagtaatagaaatatagttttaatttttaatttatattatatgagttttttgataatatttaatgttttttatgggtaaataaatagggttttttttttttttgtggggggggggggggttttttttttttttaaattttttataaaaaaaaaatttttttttttttttttaattacgttgtttaggttcgtattttttttagtattatgaaaatattatagttaagtatatattattattaatttatataagaataattataaaagagatgggagtttgtgggattataggcgtttgttattacgttcggttaatntgtatttttagtagagacgggggttttacgtattaagttaggatggttttaattttttaatttcgtgatcggttcgcgttttttagagaggggggggggggggggtttttttttttttttttnntttttttttttttaaaaaaaaaaaaaagagttttggtttttggggaataataggcgtaagttatcgcgatttgtttagtnagttttttttgattgtaagtagtcggattgttttttgtttgtgttgttggttttatgtttgtttgttatttagaatgttaattttgtgatggtaggcgcgaaatatttttttgtttttggttgaatttgtttttattaatatggtatttggtatatgtgagtgtttcgtaaataagtggtagaaaattgttttttttttagtttttaaggtataataatttttgttaaatttggataaatttatatatgtttggattcgtatagttaatgtttggaaaagttttttttgtttattataattattttttattttttttttagtgaattgatggtggggtgagagggagaagagattttttagtttttattttaagttttttgtatagtttttttataatgagtatgtaataaagtattaataaatatttttttaaattgttatattttaaaagattttttgaaattaattttagagtttattttattagtaaaagttttaatgaggtaagtatttagaaatttttttgtttttgttaagtagtgatatttgttttataaagtaagtataaattataaaaaatagattaataaataataaatttttatgaggtagatttagtaatatattgagtttttagtaggatatatagcgattaagttagtagggttttttggtttatgttatttttaattttttaagatattatatgttatcggtttttgaaaaattttttatgatttttagaagtttttttttggtattttagaattttgtttttatttattttttaaaatatgaagtttttttatttatttttttttttttaaaatagaaatgtttttaaaatgttggtttattaaaaaaaaatacgtttattatatagaatttaaataatataagttaaaaatggaagtttttttttaatttaattattttttagagatgtatattttttaataatttattgtttaatatttatagtaaatagatatgtaatagaaaatagtgaatatatatttatataattatatatgtgtatatgtatatatataatttaaatatgatgatattagataaattttttataatattgttttgttttatttaatatattatgtgtttttgttgtaaatgttatgattttatttttttttatggttgagtagtattttatagtgtgtgtatatatatttatgtgtgtgtatatatatatatatatatatgtatatatatatatatttattatattttttttgtttatttgttgattgatgggtatttggattggttttatatttttgtaattgcgaattgtgttgttgtgaatatgtgtgtgtaagtgttttttttatataatgatttatttttttttgggtagatatttagtagtgggattgttggattaaatagtagttttatttttagttttttaaggagtttttatattgttttttatagtggttgtattggtttatatttttattagtagtgtaaaagtgttttttttatattatatttatgttaatatttattattttttgatttttaaattatgattatttttgtaggagagtaaggtagtgttttattgtggttttaatttgtatttttttgataattagtgatgttgagtatttttttatgtttgttggttatttgtatatttttttttaaga

SEQ ID NO: 327 - DNA, 7390 bp, Artificial Sequence
  chemically treated genomic DNA (Homo sapiens)
tgagtttttttgatagatgttattttagtatgtggatgtaagttaaaaatggaatgttgtagttttgtagttttgtatttttattagggaacgagtttgaaagagtagtaaagggaatcgggtgtggtggtttatatttataattttagtatttttggaggttaaggcgggtggattgtttgagtttgggagtttaagattatttttggtaatatggtgaaattttgtttttattaaaatataaaaaattagttgggagtgttagtacgtgattgtagttttagttattcgggaggttgagatataagtatcgtttgagtattagaagtagaggttgtagtgagtcgagatggtgttatagtattttagtttgggcgatagagtgagattgtgttttaaaaaaaaaaaagaaaagaaaagaaaaagaaagaggagtaaagggaaatttttttaaagggtagagtttttgttattgtacgtggttatttattttatgtggaaagagaagtggtttaatgttagaatatatagagatttatgggtagtggtgagtggtttgatttattgattaggggtttggaataagtaagagtagaagattggggatagaaaagtttggggaagatgtacgtgtatgggtttacgggagtcgttattagatgtgaagatttttgtgttatatgtgaatattaagtagagaatattcgtcgtgggagaagtattataatataaagtagaagaaaatgatttggttcgttaaagttaattagtttttgtttatggttattttaagatttaaatagtggggttatgaatgtagtagttatggtggtaatggtaaatgttagatttcggtataatagggtgagttgttatttataaaggttgatttagttattgttattgttaaaatagagtttagtgtagagtttttaatttggtattatcgttgaaggaaattaattagttattttttgataagaggattatattggattttttttaaattaaaatttggaaagggtttaatttattgataggataaattaatttatttgatatattttgggtatgagtttgatttttttatttgtagtgtttgagttagttttattatttaagagtttatatattgtttgattcgttagtattagattttttatagtattataatagattatgggatttattttaaaataaggatgtgttcgtggatatatgattatgggatttattggttttattatatattataatatttagaagttgttagtttgatggatttatggaatagtttttttaagatatagttaaggtattaatttagagatgatattttgttaggattgggtattgttttttaggatgtggtgtatatattaagttaatgattgttatatgatattatgtttttaaaaggtaaaacgtatgtgtgtaagagttaaaggttagaagtagggatatttatgtttattattatttttagtgatttatttaggaaatttgtgttttttgtttcgttaattttaggttttgagtttttaggggttatggtttttagagatagaatatttttattatagtatttattaaattttaagttatattattgttaagagattagtatgttaaaaaaaaaaaaaaaatgatttgtttttttagtagagtgaatttttttatatttgatgataaggaggaggtagggttgtagggataatttagatagaatttaagggtttttttggggtattttttagtgtaattttgatggtaaatgggtaagtgtagtagttataattcgaaaagattacgacggttaggggtttagattttttaagttatgttttttttgaggttagtagaggtgttaattgaggttaggagtaatttagaaaagggaataagtattgtttattagatgcgttttggggtaattgtgttaatggggttgtaatttgttttattaggaaattttttttttataagtttttttaaaaaaagagataattagaatttcgaaaaggttgtttaaggataggatgaaattattatatgaagcgaatggttttaagtagtgtaagtgttaaattgtatggatgttgtggttgtatttaggttattattttagggttgtttttttttttaattgttgggatttttgtatttagaggatttatagttgagtttttttaaagatattgtttttagtagaagtagttgttttatttaatttcgtagtttttttatttaatttcgtagttttttaatttataatatttgtattttttatggtttttttgtttaatttaggataatttaggataatttgggaaggtgattttaggttaagaattttttatggttttggttgaggtttttgatatgttttatcgtagtttatttttttttgttagatgttgttttttttttttttatagatgatgtttttgtgtttttttagagagttatttgtttaaatttttattttttttttttagaaaattcgatggatagtaatgtatatttatagatacgaaggtaattattaggaaaaaaaaaaaaaagttgaaaaatttaaaagttgttttttttagggagaagtgtaggggtgaagtaaggtagaataggggttattgttatatagtttttttatatgtattgtttttaatatgtacgtattatttttattattaaaattttttttattttggttaggtatggtggtttatgtttgtaattttagtattttaggaggttaaggtgggtagatcgtttgagtttaggagttcgagattagtttgggtaatatggtgaaattttatttttattaaaaatataaaaattagttgggcgtggtggtaggtatatgtaattttagttatttgggaggatgagataggaggattttttgagtttaggagggggaggttgtagtgagttaagatcgtacgattgtattttagtttgagtaataaagtgagattttatttaaaaaaaattttaattttttttatttgaatattataagaatttgatattgttatttatttttttaaaattatttgaatattttttatagttttaagaaaatttttaagaatttttaatatagtttgtaaatttttttttatttggtttttgttgagttttttattttttttattttttttatttttattttttgatagggttttgttttattgtttaggttggagtatagtagtataattatagttgattgtagttttaattttttgagtttaagtgatttttttattttagtttttcgagtagttgggattataggtgagtattattatattcggttaattttttgtatttttttgtagagatagggttttattatgttgtttaggttggttttgagtttttggttttaagtaatttgtttgttttggttttttaaagtattatatttggcgaattttttatattattttttatatttttcgttttttttgttatttgtcgtgttggattttttattttttttttttatttttggattttaaatatgttgttgtttttatttggaatgttttttattttatttggtttattgttgtttttttattaaattttagtttagatgttatttgtttagggggatttttttttttttattttattttagattattttagattttttttattatttttatagtatttgaacgtttttttttttagtattaattttttgaagttatttggggggttttttagagatgggattttattatgttgtttaggttggagcgtagtggttatttataggtataattatatttattgtagtttcgaatttttgggtttagttagtttttttgttttagttttttgagtagttgggaatataggtgtatattattatgcggggtatggttattggttatgaggttatttgtttaatttttatatttttttttttatttaagaggattatttattttgttttttttgtattattagtatttagtatataattatagtatagtagatagaaaatatgtattaaataagtgaattttattaaaatgttttttagagttttagttttgtaatttgtaatttagataatttgtttgagttttagtttgtttaagtataaaatggaaataaaaataaaaataatatttattttagagggtcgttttgaggattaaataagatatattagaaaagtttttagaacggtgtttggatatagtaagtatttgattaatgtatgtttaaatataaagaaaggttatattaatttatatttatattagtagattttgatattattattttttattttgtttaatattgagttttgtgtttttaaatatttttgtaaagaatataggtaaaaagtggtattttttttttggatttaatttttatggatttaagttaatatgtatttttaagttaataagttttgttaataagatggttgtattttgttgttttatgttagatttattatatagaaagtaaatgtttagtgtatttttttttttttgttagagtttatagaggaaggaagatttcgtaatgtggaggtatattgtattataattatttttaatggtaaaaattgtagttatttttgtgttaatttattatatggtttggatagttaaatgttatgtattttttatggtttttttaggtattgttagagtttttttgtttggttttttaggaaggttgtgggatttagttttttttaattagtttaggtggaggtttttgttttgaacgtttttaagtgaggtaaaattcgtaggtttagaggtttttttattttttgtgtggggtttagaaatttttttttttttttagttttaggtgtttgttttagaaaatggtgagttttttttttataaagttttttttttttattttagtattgggaataatggttttagggtttttatttttagtagatgttttgaaaaagttatttgttttgttttttttttagaagtagtaagtttgttggttttcgttattttagtaaagtaatagttttatgaaataaagatgtagtcgggtatttattggagagttttgggtttttgttttttattaggtgagtaggatggagtggaaagggtggtgtgtttttagatcgttggaaggtttatagttttatttggtattgtttagtggtattaaggagttttatttattagatgtaaggaattgtttgtgttatgttagggtgagggattagagttggggattaaagaaaaagataggttacgggtgtttgggagagcgttcggggagtaggtaaagaagagtagttggggtgattatagttattgtgagtagagaggtttcgttatttttaagtacgagtttattttaatttatttagttttttagaattaatttaaaagagattggaagagcgaagttttattttttgttttgaagagattagatatttgcgtttaaattttgtatagggtatatatagtaatttattatttttgagattataaaacgtttcgtaatttttagttttttttaagtgattaataatttttagtttattttatttttttgaagtaagatggattatgaattgataaataattaagagtatttttgtattttatatgagataaataatattaaaaaaagttgttatttattgttagatattgtgtaaagaaaaaattatttagacgtgttaattggtttaattttatttttgtttaggaaggaaggtgttatattttttttttaaaattttttttaattttgattatataaattgataagttttttttattttatagattaagaaattgatatttaaaaaagttaaataatttgttttaaattatatagtaagtgtcgaagttaatttgtgagattaggattgtttgtattttaaatggttgtattatatgaggtaaaatggttcgtgatggttttattttaaagatttagaaaatattattatagttggtgttttcgttttagatttatagtaacgatgtttttattttttgttttattttgggttttttacgttttgaatgtgtatataaattatttggggattttgttaaaaatgtagtttttgttttaaaagatttagattggaaatggagatttcgtatgtttagtacgtttttaagtttattaatttgttgttggttttaggaatatattgagtagcgaggggtaggatgtgatttttgtaaggagtggttaggtatttttttagagatttgtgttataaagtatgtttttttttaaaaaaaagaagaaggaggaggaggagaagggttaggtgtagtggtttacgtttgtaagtttagtattttgggggattaaagtgggaagattatttgagtttaggagtttaagattagtttgggtaaagtagtgaaattttatttttataaaaaattaaaaattagttaggtaaggtggtatatatttatagttttagttatttgggaggttgaggtggaaggattatttgagtttaggaggtcgaggttgtagtaagttatgattaagttattgtattttagtttggagtgttttaaaatagataaataaataaataaataaataaataaataaataaataaaagagatagtattaaagatttaattatttttagatatttggtattataggaatgtgtttagtttgttttggggataggaaagtggggattttgtttttttttgtgtagaggttttagtaaaagaaaggtttaggtgtgtagaaagtttttaggtaatgttagggaaattgattattgtaatgaatttagggtattgttgagtgagggtattttggagggttcggtggaaatgtggttaggttttttaatgtataggttttagttgatgagtaattagggttttaaatatttttatttttgttttaagtagaaaataaatggaaaaattgaattattagaaaagtagagttagagatggaataagaattttagtgtttgtatttaattaagagcgtgttttttttttatagatattaatgtttaaaatggaggtttgggggtaaaatttttttgttatgtttttagtcgtttaaaaaatggttttaattttttttgatttttgtttgttaaaaattgtgggtttatagttaatgttagatgttttttttttttatttttttttaaattttttgggaatttttggttaatattagtagtaagttttattgttttagggtgtagaaatggttgtgatttagtagtaagagggaaggatattagatgttattagtggttatattgtaatatagttttttttttgtttaggaatgtaggtatttataatatttattaatatttttttttttttatttattttttagt

SEQ ID NO: 328 - DNA, 7390 bp, Artificial Sequence
  chemically treated genomic DNA (Homo sapiens)
attagaaaataaataagaaaaaaaaagtgttagtaaatgttgtgggtatttgtatttttaaatagaaaaagggttgtgttgtagtatgattattgatgatatttgatgttttttttttttgttgttgggttatagttatttttatattttagaatagtggaatttattgttggtattgattaggggtttttaggaaatttggggggaaatagaggaaggaagtatttagtattaattatgagtttataatttttgataagtaggagttagaaaaagttaggattattttttggacgattagagatatagtaaaagaattttgtttttaagtttttattttgaatattggtgtttgtggaagaaaaatacgtttttggttgggtataaatattgggatttttgttttatttttggttttgtttttttggtggtttagtttttttatttgttttttgtttgagatagagatggaaatatttgaaattttgattatttattaattagggtttgtgtattgaagagtttgattatatttttatcgggttttttaggatgtttttatttagtaatattttggatttattataatgattagtttttttggtattgtttgaaagttttttgtatatttaggttttttttttattgaaatttttatatagggggagataggatttttatttttttatttttagagtagattgggtatatttttatgatgttagatgtttagaggtgattgggtttttgatattgttttttttatttatttatttatttatttatttatttatttatttatttattttgagatattttaggttggagtgtagtggtttgattatggtttattgtagtttcgattttttgggtttaagtgatttttttattttagttttttaagtagttggaattataggtgtgtgttattttgtttggttaatttttaattttttgtagaaatggggttttattattttgtttaggttggttttgaatttttgagtttaagtgatttttttattttggttttttaaaatgttgggtttataggcgtaagttattgtatttggttttttttttttttttttttttttttttttttaaggaaaagtatattttataatataggtttttaagaaaatgtttggttattttttataggagttatattttgtttttcgttatttaatatgtttttaggattagtagtagattaataaatttgagagcgtattagatatgcggaatttttatttttagtttgggttttttgaaatagaagttgtatttttaataagatttttaggtgatttgtgtgtatatttaagacgtgagaaatttaagatgaagtaggaagtggagatatcgttgttgtgggtttgagacgggagtattagttgtgatagtgttttttaggtttttgaaataaaattattacgagttattttgttttatgtggtgtagttatttagagtataaatagttttggttttatagattggtttcggtatttattatgtggtttaaaataagttatttaatttttttgagtattaattttttaatttgtgaagtagagaggatttattagtttatatagttaaaattaaaaagaattttaaaaagaggatataatatttttttttttaggtagaagtaggattaaattagttaatacgtttaaataattttttttttatatagtatttgataataaatggtaattttttttggtattatttattttatatgagatatagaaatgtttttggttatttattaatttataatttattttgttttaaaaaaatgaaataaattgaaagttgttggttatttgaaaaggattaaaaattacgaggcgttttatggttttaaagatagtgaattgttatatatgttttgtgtagagtttggacgtaagtatttggtttttttaaaataaggagtggagtttcgtttttttagttttttttgggttagttttggagggttgggtaagttggaatgagttcgtatttagaggtagcgagatttttttgtttataatagttatgattattttaattgtttttttttgtttgtttttcgaacgtttttttaggtattcgtggtttatttttttttttagtttttagttttaattttttattttaatatagtataaatagttttttatatttggtaaatgaggttttttggtgttattaggtagtgttaggtaaggttgtaagttttttagcggtttggagatatattattttttttattttattttatttatttgataagaggtagaggtttagaattttttagtgagtgttcgattgtatttttgttttatgggattgttattttattaagatggcggaggttagtagatttattatttttggaaaaaaagtaaaatagatgatttttttaaaatatttgttagagataaggattttggggttattgtttttaatgttaggatgaaaaaggagggttttataagagagagatttattattttttgaagtaggtatttgaggttgggaggggaggagggtttttgaattttatataggaagtagagaggtttttgggtttgcgggttttattttatttggaaacgtttaaggtagaggtttttatttggattggttgaagaaagttgggttttatagtttttttagaaggttaaataagaggattttgataatatttggaggggttatgaaaaatatatgatatttagttgtttagattatgtagtaggttggtataaaagtaattgtagtttttgttattaaaagtaattgtaatataatatgtttttatattgcggggtttttttttttttataagttttgataggaagagggagatgtattgaatatttgttttttgtgtggtggatttggtatggagtagtagggtgtagttattttattaataaaatttgttggtttgaaaatatatgttgatttaaatttataagaattaaatttaaagaaaaaatgttattttttatttatattttttataaaaatatttaaaaatataagatttaatgttgaatagggtaaagagtgatagtgttaaagtttgttggtatgagtgtgaattgatgtaatttttttttatgtttaagtatgtattaattaaatgtttattatatttaagtatcgttttaagagtttttttgatatattttatttaatttttaaaacgattttttaaggtaagtattatttttatttttatttttattttatatttgagtaaattaaggtttaggtaggttatttaagttgtagattatagagttgggattttagaaaatattttgatgaaatttatttatttaatatatattttttgtttattgtattgtagttatatgttgggtgttagtaatataggagaaataagataaatagtttttttggataaaaaaggaaatgtggagattaaatagataattttataattaataattatgtttcgtatgatggtgtatatttgtatttttagttatttaggaggttgaggtaggaggattgattgagtttaggggttcgagattgtagtgagtgtgattgtgtttgtgaatagttattgcgttttagtttaggtaatatagtgagattttatttttaaaaaattttttagataattttaggagattgatgttaagaaaaaagacgtttaggtgttgtgggagtgatagaagggatttaagatagtttggggtgggatggggaagagaaggtttttttgagtaggtgatatttaagttgaaatttgatggaggaatagtaatgaattaggtggagtggaaagtattttagatagaggtagtagtatgtttgaagtttagagatgaggaagagaaatggaaaatttagtacggtaggtaatagggagaacgaggagtgtaagaaataatataagaaattcgttagatatggtattttgggaggttaaagtaggtagattgtttgaggttaggagtttaagattagtttgagtaatatggtgaaattttatttttataaaaaaatataaaaaattagtcggatgtgatggtgtttatttgtagttttagttattcgggaggttgaggtgggaggattatttgagtttaggaggttgaggttgtagttagttatgattgtgttattatgttttagtttgggtaatagagtaagattttgttaaaaaataaaaatgaaaaaaataaaagagataggaaatttagtaggggttagatgggaagggatttgtaagttatgttagggatttttaaggatttttttagggttgtaggaagtatttaaatagttttaaaaaggtgagtgatagtattaaatttttataatatttaaatggaaaaagttggggttttttttagatgaagttttattttgttgtttaggttggaatgtaatcgtgcgattttggtttattgtaattttttttttttgggtttaagggatttttttgttttatttttttaggtagttggaattgtatgtgtttgttattacgtttaattaatttttgtatttttggtagagatagagttttattatgttgtttaggttggtttcgaatttttgagtttaagcgatttgtttattttggttttttgaagtgttgggattatagatatgagttattatgtttggttaaaatgaaaaaagttttaatgatggaagtaatacgtgtatgttaaaaataatgtatatagaagggttgtataataatagtttttgttttattttgttttatttttatatttttttttagagaaaataatttttaagttttttaattttttttttttttttttggtggttattttcgtgtttgtaaatgtgtattgttatttatcgggttttttgggaaaaaaagatggagatttgggtaggtggttttttgaggaagtataggagtattatttgtaagggagagaggggtagtatttggtagagagaggtgaattgcgatgagatatattaggagttttagttagagttatggggagtttttagtttgggattatttttttaagttattttgagttattttgaattgagtaaaggggttatgaaaaatataggtattatgaattgaggggttgcgaagttgggtgagggggttgcgaagttgggtgaggtagttgtttttgttgaaggtaatgtttttgaaagagtttaattgtgagttttttgagtataagaattttagtagttgggggagggagtagttttggagtgatgatttgggtgtagttatagtatttatgtagtttaatatttgtattgtttggagttattcgttttatgtgataattttattttgtttttaaatagttttttcgggattttggttatttttttttttggagaagtttataaaaggaaagttttttaatgggataaattatagttttattagtatagttgttttagggcgtatttgataggtaatgtttgtttttttttttggattgtttttagttttagttagtatttttgttgattttagggaagatatagtttgaggagtttgagtttttggtcgtcgtggttttttcgggttgtggttgttgtatttgtttatttattattaaaattgtattaaaaaatgttttaggggagtttttggattttatttgagttgtttttgtagttttgttttttttttattattagatatgggaagatttattttgttgggggagtaaattattttttttttttttttggtatgttggttttttggtagtggtgtagtttaaagtttaatgggtgttgtggtgaaagtgttttgtttttggaaattatggtttttagaagtttagagtttagagttagcgggataggaagtatagattttttaagtgggttattggaagtaatggtaagtatgaatatttttatttttaatttttagtttttgtatatatgcgttttattttttggagatatagtattatataatagttattggtttaatatgtatattatattttgaaggatagtgtttaattttagtagggtgttatttttaagttgatattttagttatgttttgaaaagattattttatggatttattaggttggtagtttttgggtgttgtggtatatgatagggttagtggattttatggttatatgtttacggatatatttttgttttaaagtgggttttatggtttgttgtgatgttatggaagatttaatgttgacggattagatagtatgtgaatttttggatagtagggttagtttaggtattgtaggtaagagaattaaatttatatttagagtatgttaaatgaattgatttgttttgttaatgaattgagttttttttagattttggtttgaaaagggtttaatgtaatttttttgttaagaaatgattggttggttttttttaacgatgatgttaaattggaggttttgtattgaattttgttttggtagtggtagtagttggattaatttttgtgagtgatagtttattttgttgtgtcgaggtttagtatttattattgttattatagttattatatttataattttattgtttgagttttgagatggttatggatagaggttagttgattttaacgggttaagttatttttttttattttgtgttgtggtgttttttttacgacggatgttttttgtttggtgtttatatgtgatataaagatttttatatttggtaacgattttcgtgggtttatatacgtgtattttttttagatttttttgtttttaattttttatttttatttgttttaggtttttaattaataaattaagttatttattattgtttatggatttttgtatattttaatattaggttatttttttttttatataaagtgaataattacgtataatggtagaagttttgttttttgagaggatttttttttattttttttttttttttttttttttttttttttttttttgagatatagttttattttgtcgtttaggttggagtgttgtggtattatttcggtttattgtaatttttgtttttggtgtttaagcgatgtttgtgttttagtttttcgagtagttgggattatagttacgtgttaatatttttagttaattttttgtattttagtagagataaggttttattatgttgttaagggtggttttgaatttttaagtttaggtaatttattcgttttggtttttaaaagtgttgggattataggtgtgagttattatattcggttttttttattatttttttaagttcgttttttagtgggaatgtaggattgtaggattgtagtattttatttttggtttgtatttatatattaagatgatatttgttaaggaagttta

SEQ ID NO: 329 - DNA, 9642 bp, Artificial Sequence
  chemically treated genomic DNA (Homo sapiens)
agtgtgagtttttttatttttatttattttttttttatttttgtttttttttttttaacgtttatttgatagatttggttattttttaatagagtttgtgtgtcggtagttagaagaattagagagagatattaatggtttagtagatgggattgtgagatttatttttttatatttttagaagtttgtatgagtgatatgaatatataagtttttttaatagttaaagttttaggagtttttaggagattgtaagagtaatttttagttgagattaaatttattattagttttattttttagttggtgtataagtttattggtatatatatatatatatatatatatatatatataaatatatttttatgttttgtttttttattaatttttagatagttttttagttttatgtttagtaaagtagaagatttttaaagtaaggagtagagtggtaatgatattagtgataatgatgttagttacggtggttggatttagttttatatagttttggtatattgtgggggaagggaggagagaggagaggttgagagtttttaagattagggaattattttttgttttttagggtaatttttagattttttatgttaaaatttaaattttaataagattttgggagaaaggtttggtgatgggtttgttatatttttttttattttgtattttaaggaatttttgggaagagttaagaagtaattttagtttttgggattttgaataaggtggtgggttaaattttttatttaattaaggttgtagtaatatgatttttattgttttgttttgttgagttaagtttttttttttattttgaaggtttttaaatttggtttgtattattataatagtgattttattttgtttagagaatagatgggtttattatatttttttttagttagaaagtttttatatttagaagttttatttattttaatttaaagggtttaggaagtacgtatttcgataatgaatttgtacggtagattttttgtttttgtatatatttgttttattatatttatatatttttcgtgggtttaggatgcgtttttttaggtttagttttgtaatgtttgagagtagtgtttttatcgttttttttatttatgtgatgttggtattgtaatttataaatattttgtttttaagtttttttataggtattttgaaggggtttattaaaggggaaaaaatattatagttggagatagttttttgatttgtattaagttttttgttttgcggaagtttatatttaatagagattatttttttggtttaggatagtttatggtttttattaagagagatagaagttataagaaaaagtttttagaaagttttttattaattgtaggggttaagggggatatgaggatgttatttaagtagaggataggttttggggttttggtgtaaaagaggattttttagagtaggattgatttaagtatttttttggaaatgaatttagattattgatgaggagtagggggagtacggattattgaagtatttggaagatgtggaaagatagaagaatatttttcgattggaaatgtttgtattttttttttaaggaaatatttaattttattttttagttatttataatatttttattttagttttttatttttatttttttttattgtttttgttttattgataattaagaaagcggggtttttaatattgaagttttttttagggttagggatggttgtgggtggagattagttggtttattagtttttgaattattagttaagtggtttagaacgggattagggtaaattttatgtatagttttttatttttggttagaaggaggagaataggaaaaaaattttattgaatttatttttagagttttttataagttaagttttgtgggagatttttagggttggaggtgagtgtagtaatattttagatgtagtgagtttttttgatagtttgagtatatttttataggttatagaggtattatagtttatgtttttaaatatagggaaaagtggaggttatatttatttattttgggttttatattaagttttaaatttggatataagagtattttttagaaaattttgaaatagttgttgtttatatttttgaagtaggttggaagtatatgtatgtatttttagggagatatatgtatattaaatgttttacgttttatagtcgcgttttttttagggatttgtttttagtggaaattttgagtgttttagtgtagttaattattaggtgattattggatttagtttgtttagtgttgaaggggtttttcggatatgggattttttattttaaaattgaaattggtaaattgagatgagttaaaattttattatgtaataattttttaaatttttttttcgttttgtttaatttaaagttaattttttttaaagtatttatataagtgttaggatatgtttttagggatgatataattatggttaaataaataagagttttgattttagaggttattaggtttaaaaggagtagtgtaggaagttgtgtttttatggttagttttagatttaggtatatacgtattgagttattttttgtagatttttggtttaaggttttttgagagatattttaggtttatatgtatttatggttggagttagttaaagttaagagtttgttttttagattttatgttatattttgtttttgtttttttgatatttttggggtgtttggtgaattgaagttagtatcgagaagtatttttttttttttttgagataaggttttataggttgtttaggttggagggtagtggtatgattatagtttattgaagttttgaaatttcgggtttaagtgatttttttgttttagttttttaaatagttgggattatagttgtgtattattatgtttggttaatttttttgttttttgtaaagatagagttttattatgttgtttagattggttttaaatttttggttttaaaggatttttttatttcggttttttaaagttttgggattattggtgtgagttatcgtgtttggtaagaaatatttttaagtgggttttatttttattagtaatgttttttttaggtttttttttttatttatttggagtagttttattttgcgagagaagggtagttagtattaggttagagagaaacgtgttatgttttattttttagcggaatttatttagtagataaagttaggttatcgaattattagtttgggtgagagttgtttttttttagttgatttataggtatcggaaagaggagagtgggggaggaattagaagatgtttgtttttttgttttttgtcgttgatggtgggaaatttttagagtgggggtgggttaggggtagggtaggaaggaagcggtgtaaattgttttatttttgagtagggagttggtagagaatatggaaaaggtggtttgaattttagcgtttttattgataatgtaattatatttatatataatttaaatattgttatatttcgaagttttttgagagaagtcgtcggttttatagcgtaagtcgtagtagttagattttttatggaggttgattttttttaggattttttattaggtagttagggatattagatttagtagttttttgttagtgggaggttgggttttagagattttagttagagatttgaattttgggtttaatattgtttatttgtggggtttgggttagttataaaattttttagagttttattttattagtattattattaggatttaaataagatatttgtatggtgttttacgtattatatgtgtttattaaggggtagttattaataataatataattgattgataggtaatattgagtttttcggtgagataaatggattttttttttttgtggtttacgaggatttgaaattttttacgttgttgtagttagattgttatttatttggggatagagttatgtttgttttgtttattgttgtattttgtgtttggtatataacgggagttttgtatatttttgttggtttattgattgattggttgagggagataggggtttgagattttggatatttagttcgggttttggtttttgaaaatgtgttggtttgttttcggaattgttttatttattgttttttaggcgttttttttatgattttaaaagaatagtgaaattaggtgtcgtgttttacgtttgtaattttaatattttgggaggttgaggtaggtggattataaggttaggagttcgagattagtttgattaataaggtgaaatttcgtttttattaaaaatataaaaattagtcgggtttgttggtacgtatttgtaattttagttatttaggaggttgaggtaggagaatcgtttgaatttcggaggtggaggttgtagtgagttgagatagcgttattgtattttagtttgggtaataaagtgagattttgttttaaaaaagaaaaagaaaaaaaaagtgaaaaaaatttttgaatgaaggtttggattgaggtggttttttatttggaggtttagttttaagtatttgagagttttttttaaatttattatttatagtaataataattagtaataagtaataattggttacgattttaataattaatgatagggatatttattttttttatgaagaaacggttttaggattattttttatttagtatttattgcggttttttgtgtaagatgagtttttgagtgggaatttagtattttttttttttttttttttattatttttattttttttaacggaaaaataaaaggtatttgtatttgtagttttgttgaggtttttgttgtttatatttgtagtagagggtggaggttttgggtttttgtttttttttaaaggttttagttttaatagtgatgggtggagttagtttagttgttgtataggttggttggttggttggttgttaagggttgttttacgtttttgtcggaggatagagattgatatggaataggggaagggtttggttgtttttattttggttattatttttttttaaggtaagggtttattaggggtttggaagtttggggaagggtttaagggaagagtttattattagtgagataggaatattggtatttttaatttttagtttatttttgttgttattttagagtttaaagaagggtaaaatggaggtttttaattgttttttgttagagagaaatagtgttttatggaggagaaggaatttttgtttttgaaaaatgtaaatagagtatttaaatggttgaagagaggattttgttatcgttattttagatttgaatgtagtttaaaagggtataggttaagaaattaaaaggaaaaagtatatgttttttattttagagttgggggttagtagtcgatttaggaaatgtttatttatttagttgggtagttggttaattggttaataaagatgggtgagattttaatatgtgatatgttatgaggaaataaaaatgaataaaatatttatgttttatagaatttatagttttattggagagattagtttttatggtgttagattgagtgtatagtatagtatgggtgtttgtatgaatattttattggattatttaataggaagtggatgaattgggttgatgtttggagtttggatattttgggaaagttaaaattatggaatttgttgaagttatataagtattatgtgaggaagagggagttgaagatggaatagtgagggtattaattttaaggggtagttagagaaaaaaaaatattttaggaaagagataaaaggagaattaaagagttgaaataattaaatgtatgtattattttggaaattaagagagtagagagtttttagaagaagagaattattaagagtataaaatgttaaagagagtttattaatataagaatatatttaaaagtttaagtttgcgggatgtggtagaatatgtattatgggtgatttagtatagttttagtagggtattgtgagtggaagttaagtgaaaattggtagaaggtgaaggttaggtgatgaggttagtaagtgtagattattttttaaagatatttggatgaggagggagaaaagattgggtggtaggtagaggaggaagtagagtttaagaataaatgtttttgagggtgagagaaatttgagtatatttttaggttaaaggagaagatgatgagtagagtaaggttttggagttgatggtggaaggatagagttaagagtggggttaagagtatagagaggaaggtaacgttattttttaagattaggagaaaggaagtgtaaacggtattggttataaataggtttataaagggaaaggaagttaaaggagaaaggataataataattttcgtgttttaaaaaatttaggtgggaggtaatgttatttgttgaaattgagttgggtgatgatcggttgggagatttgaagaggatagtgagagtttagaatagaattatttttgagagaaatgtaaggaaaagttaggtaaagataatataggttgaggagtaatttttaagtttgggtgaggtggttgtatattatggaaagagtatttgagtttagtagtagaaaatttgagttttggatttagtttggatattaatgagttatgtgtatttgaataatttttttattgtttgggagtttttatgttagttaatttagaaatgtggtagggacgggtatggtggtttatgtttgtaattttagtattttgggaggtcgaggtaggtggattatttgaggttaggagttcgagattattttggttaatatggtgaaattttatttttattaaaaatattttaaaaattagtggggtgtggtggtgggtgtttgtaattttagttatttaggaggttgaggtaggagaattgtttgaatttaggagatggaggttgtagtgagttaatacggtgttattgtattttagtttgggcgatagagtgagatttcgttttaaaaaataaaataaaaaaaaaagaaatgtggttatatgaatttttaagttttaaaaggaaattttatttagatatgtaatattaaaagatgttaattagttaggtatagtggtttatggttataattttaatattttgggaggttagggagggaggattatttgagtttaggagtttaagattaatttgggtaaaatagggatattttgtgtttataaaaattacgaaaattagttaggtatgttggtatgtatttatgttagttatttgggaggttgaagtgggaggattgtttgagtttaggagtttgaggttgtagtgagttatgattttttttttgtattttagtttgagtgatagagtaagaaaaaaaaaaaaatttgttttaaaaaaaaaaaaaaaaattatgttaatgattagtgtaatttttttttttgaatttaatttagaatgaggggtttttgttttttttcggttttttgattaggtggttaggagaaaaattagttagaaatttttttaattgtttgttttgtttttttttttatttgtttatttatttatttgtatatttatttaataaataaagtttttattatgttttagatattgtattggatattgtttaaaaataatttcgttttgtatgaggttttaagatagtttattttttgtatttttattatattttgatttatgatcgtttttttttattatatatattttatttttagttatattattttttttgtttttttttaaagttgtattttatttagttattttttttatttagaatgattttttttatttggtatatttttgtttattttttaaggtttagataaatgtcgttttttttattaagttttttttgatttttatttttggataaaattaatagtttttattttttttttatatgtagttatataagtattaaaagataatgtatatattttattaaattaattgtatatatgttttaatttttttattttatttataaattttggaagtagtagttgattttttatattagtattttttttttttataatatttaattattttaggttataatagttttcgttaaatgtttggattaaatttaattgaattgaatttaagtgttagatttttgtaatatgtttattatgtaattttattattttaaggttttgtttgtttgtttgtttgtttttatttttttgagatagttttaatatttaggttggagtgtagtggtgtaattttggtttattgtaatttttattttttaggtttaattattttttttattttttgagtagttgggattataggtgtatattattatgttcggttaatttttttgtattgtttgtagagatagggtttcgttatgttgtttaggttggtgtttaatttttgggtttaggtaatttgtttattttagtattttaaagtgttgggattataggtgtgagttattgttgttagttaattttgagttatgagatagatttgaggattaattgaaaagttaatttttttgggatatttagggtttttataataaaaggattattaaggttgaatattttataaggaatttagtttaaaggttttggatagtgtatatttattttttgttagggtattagttgtttaagaagtagagtgttttggattggataggtaatatttttatttatatatattataatataattttgatgttaattttttaaattagtgttagattttataggttaagagtatggtttttaattagattgtttttattttaaatgttagttataagtttagggtattttagattatttatatttttgataaattgtttgtaattttaaggatttttatgattttttttattgataatttgttagaataatttatagaatttaagaaagtgttgtattttttattttagttttattaaaaaataaaataaaattagaattagttaaatgaaaagggtaaggtttatgagggtttcgaatatagagttttcgtgtttttttttcgtggaattagaatatatcgtttttagtatttttttatattttgttagtatattgatgggtttattaattaggaagttttattaagtttttattgaggtatttttatataggtatgattgattgaattattggtcgtttgattgattttaatttttaggatttttttttggggttgatattattagttttaaagttgtaatttttttattatatggttggttttgattagtattattttgagttattgttatgtataaatttaggtatggtttaaggatttattatagataataaagttatttttgttatttatgaaattttaacggttagaaatatttttttaggatattaggataaagatgagataaattgtttattattattttgaatttaattgagtgatttagtttataattcggaaaattaagtatagatattattatttttatggatttggatttttttttattttggttttaaataattatggaaatattttagggtatttgaataattttatgtttagttaatattttattttttttttgtttttatagg

SEQ ID NO: 330 - DNA, 9642 bp, Artificial Sequence
  chemically treated genomic DNA (Homo sapiens)
tttgtaaagatagaagagagatagagtattagttgggtatggagttgtttagatgttttgaagtatttttatggttatttgaggttaagatgaagaaagatttaaatttatgaaaatggtagtatttatatttagtttttcggattgtagattaaattatttaattgaatttaaggtgataataaataatttgttttatttttgttttggtattttgggagggtgtttttaatcgttggaattttatgagtgataggagtggttttgttatttgtggtggatttttagattatatttgagtttatgtatggtaatgatttaggatggtgttggttaagattaattatatggtaagaggattgtagttttgaaattagtggtattagttttaggaagggattttagagattgagattagttaagcggttaatgatttaattaattatgtttatgtaaagatattttaataaaaatttggtggagttttttggttggtgaatttattaatgtgttggtagagtgtgggagagtgttgggggcgatgtgttttaattttacggggagagggtacggaggttttgtgttcgggatttttatagattttgttttttttatttagttggttttgattttattttattttttaataaaattgaaataggaagtatagtatttttttaaattttgtgagttattttagtaaattattaatgaggagggttatgggaatttttaagattgtaggtagtttgttagaaatgtgagtggtttggggtattttgaatttgtagttggtatttaaagtgagggtaatttggttgggaattatgtttttaatttgtagggtttgatattaatttggggggttagtattagaattgtattgtagtatatgtaagtaaggatattgtttatttagtttagaatattttgttttttgagtagttaatgttttggtaaggagtgggtgtgtattatttaaaatttttaggttgagttttttataaaatatttagttttggtgatttttttattataaaaattttggatgttttagggaagttagttttttaattagtttttaaatttgttttataatttagagttgattggtagtagtggtttatatttgtaattttagtattttgggatgttgaggtgggtagattgtttgagtttaggagttagatattagtttggataatatggcgaaattttgtttttatagataatataaaaaaattagtcgggtatggtggtatgtatttgtagttttagttatttaggaggtgggaggaatggttgagtttgggaggtggaggttgtagtgagttaagattgtattattgtattttagtttaggtgttaaagttgttttaaaaaaataaaaataaataaatagataaataaaattttagggtagtagagttgtatggtagatatattatagagatttggtatttgaatttaatttaattagatttaatttaaatatttaacgaggattattatgatttaaaataattagatattatgaaagaaaagagtgttgatatgaagaattaattgttgtttttaaagtttatgaatgaagtgaaaaaattaaaatatatatgtaattaatttaatagaatgtatatattattttttagtgtttatatgattgtatatgaaaaaagggtagaagttattaattttgtttaagggtgaggattagggaaagtttaatagaggaaacgatatttgtttgggttttgaagagtaagtaagaatatattagatagagaaagttattttgagtagaaagaatagttgaataagatgtagttttggaaaaggataagagaggtagtgtggttagaggtggagtgtgtgtgatagggagaggcggttatgagttaaagtataatggaaatataagaagtgaattgttttagaattttatgtagggcgggattatttttgaatagtatttagtgtagtgtttggaatatggtaggaattttatttgttgaatgaatgtgtaaatgaataaatgagtaaatgggagaaaaggtaagataaatagttaaagaggtttttaattagttttttttttgattatttggttagaagatcgagagaagatagagattttttattttaaattggatttagggaaagagattgtattgattattgatatagtttttttttttttttttgaaataaattttttttttttttttgttttgttatttaggttgaagtgtaggggggggattatggtttattgtaattttaagtttttgggtttaagtaatttttttattttagttttttaagtagttggtataagtgtatgttaatatgtttggttaattttcgtagtttttgtagatatagggtatttttattttgtttaggttggttttgaatttttgggtttaaatgattttttttttttagttttttaaagtgttgggattatagttatgagttattgtgtttggttgattgatattttttaatgttgtatatttgagtgaggtttttttttaggatttaagagtttatatagttatattttttttttttttgttttgttttttgagacggagttttattttgtcgtttaggttggagtgtagtggtatcgtgttggtttattgtaatttttattttttgggtttaagtaatttttttgttttagttttttgagtagttgggattataggtatttattattatattttattaatttttaaaatatttttagtagagatagagttttattatgttgattaggatggtttcgaatttttgattttaggtgatttatttgtttcgattttttaaagtgttgggattataggtatgagttattatgttcgtttttgttatatttttggattggttggtatgagaatttttagatagtggaggagttgtttaagtatatatagtttattggtgtttaagttggatttagagtttaggttttttattgttgaatttaaatgttttttttatgatatgtagttattttatttaggtttgagagttgttttttaatttgtgttgtttttatttgatttttttttgtattttttttagaaataattttattttaaatttttattgttttttttaagttttttaatcggttattatttagtttagttttagtaggtggtattgttttttatttggattttttagaatacggaagttgttattgtttttttttttttagttttttttttttttataaatttatttgtggttagtgtcgtttgtatttttttttttttggttttagagggtaacgttgtttttttttttgtgtttttgattttatttttgattttgtttttttattattaattttaggattttgttttatttattatttttttttttagtttagaaatgtgtttaagttttttttatttttaaaaatatttatttttagattttatttttttttttatttattatttagttttttttttttttttatttaaatgtttttaaagaatagtttatatttgttgattttattatttgatttttattttttattaatttttatttggtttttatttataatattttgttgaaattgtgttaaattatttatgatgtatattttgttatatttcgtagatttaaatttttaaatatatttttatattagtgggttttttttaatattttatatttttggtaattttttttttttagaagttttttatttttttggtttttaaggtagtgtatatatttgattattttagttttttgattttttttttattttttttttggaatgtttttttttttttaattgttttttaaaattggtgtttttattgttttatttttagtttttttttttttatatagtatttgtgtgattttagtaaattttatggttttaatttttttaggatgtttagattttaggtattaatttagtttatttattttttattggatagtttaatggagtatttatgtaggtatttatattatattgtatatttagtttggtattatgaaaattaatttttttaatgagattatgagttttgtagagtataagtgttttatttatttttatttttttatggtatattatatattagggttttatttatttttgttgattaattggttaattgtttaattgagtgaatggatattttttaggtcgattgttagtttttagttttgaagtagggaatatatattttttttttttagttttttggtttatgtttttttgggttgtatttaaatttaagatggcggtaatagggttttttttttagttatttaagtattttgtttgtattttttagagataaggatttttttttttttatgggatattgtttttttttagtagagaatagttaagagtttttattttgtttttttttgaattttaaggtgatagtagaggtaggttgaaggttagggatattaatatttttgttttattagtgatgggttttttttttgagtttttttttaggtttttagatttttagtaggtttttattttgaagaagaatgatagttaggatgaggatagttaggttttttttttgttttatgttagtttttgtttttcggtaaaagcgtggagtagtttttagtagttagttagttagttagtttgtgtagtagttagattggttttatttattattgttggggttggggtttttgagagaaggtaagaatttagagtttttattttttgttgtaagtgtgagtagtaggggttttagtagggttgtaggtgtagatgttttttgttttttcgttaaggagggtgaaggtggtggggaagaagagggagagagtgttggatttttatttagagatttattttgtatagggaatcgtaatggatgttgggtgggagatggttttgggatcgtttttttatgagggagataaatgtttttgttattagttgttaggatcgtagttagttgttatttgttgttagttgttgttgttgtaggtaatgaatttaggagggatttttagatgtttggggttggatttttaaatggaaagttattttagtttaggtttttatttaggaattttttttatttttttttttttttttttttttgagatagagttttattttgttgtttaggttggagtgtagtggcgttattttagtttattgtaatttttattttcggggtttaagcgatttttttgttttagttttttgagtagttgagattataggtgcgtgttagtaagttcggttaatttttgtatttttagtagagacggggttttattttgttggttaggttggtttcgaatttttgattttgtgatttatttgttttagttttttaaagtgttgggattataggcgtgagatacggtatttggttttattatttttttgagattatgaaagaggcgtttggaaggtaataggtggaataatttcgaggataggttagtatatttttaggggttagagttcggattgaatgtttaggattttaggtttttattttttttagttagttagttagtgagttaataaaaatgtgtagagttttcgttatgtgttaggtataagatatagtagtgagtaagataggtatgattttgtttttaggtaagtgatagtttaattgtagtagcgtgaagagttttagattttcgtaggttataggggaaaaaggtttatttgttttatcgggaggtttaatattgtttgttagttaattatattattattaataattattttttaatgagtatatatgatgcgtgaggtattatgtaaatattttgtttgaattttaataatggtattaatggaataagattttgaaaaattttatggttggtttaggttttataggtaggtagtattggatttaggatttaaatttttggttggggtttttaaagtttaattttttattgataagaagttgttagatttggtgtttttggttgtttagtgaagggttttgagaaagattagtttttatgagaaatttagttgttacggtttgcgttatggggtcgacggttttttttaaggggtttcgagatgtggtagtgtttaggttgtgtgtaaatgtggttgtattgttaatagggacgttaaagtttaggttattttttttatattttttgttagttttttgtttagagatagagtaatttatatcgttttttttttattttatttttagtttatttttattttgaaaattttttattattaacggtagaaagtagagaagtagatattttttagttttttttttattttttttttttcggtatttgtgagttagttaggggagggtagtttttatttaggttgatagttcggtgatttggttttatttattggatgagtttcgttgggagatggaatatagtacgtttttttttggtttggtattggttatttttttttcgtaaggtaaggttattttaggtgggtgggggaagggatttgagagggatattattgatgggagtgaggtttatttgaaagtgttttttgttaggtacggtggtttatattagtaattttagagttttgggaggtcgaagtgggaggattttttgaggttaggagtttgagattagtttgagtaatatgatgagattttatttttataaaaaataaaagaattagttaggtatggtggtgtataattgtagttttagttatttgagaggttgaggtaggagggttatttgagttcgggattttaaggttttagtgagttgtgattatgttattgttttttaatttaggtaatttgtgagattttattttaaaaaaaaaaaaaagtgtttttcggtgttagttttagtttattaggtattttaggggtgttaggagggtaggggtaggatgtagtatagagtttgggaaataggtttttggttttgattgattttagttatgggtgtatgtgggtttagaatgttttttagaaggttttaggttagagatttgtagaaaatagtttagtacgtatgtatttgaatttgggattggttatgggagtatagttttttgtattattttttttaggtttgatggtttttggaattaggatttttgtttgtttggttatgattatgttatttttggaggtatgttttagtatttatgtgaatgttttaagagaagttaattttaggttgagtaggacggagggaagatttgaggggttgttatatggtaggattttaatttattttagtttgttaattttagttttaaaatggaaagttttatgttcgaggaatttttttaatattaagtaaattgggtttaatggttatttaatagttggttgtattagggtatttaggatttttattggagatagatttttgaagaggacgcgattgtaggacgtgaagtatttgatgtgtatgtgtttttttgaggatatatgtatatatttttaatttgttttagaagtgtgagtaatagttgttttagggttttttagaagatgtttttgtatttaaatttgggatttagtgtgaagtttaggatgaatgaatgtagtttttatttttttttgtgtttggaggtatagattgtagtgtttttgtggtttgtggagatgtgtttaggttgttagaggaatttattgtatttggaatgttgttgtatttatttttagttttaaaagttttttataagatttgatttgtgaggagttttagggatggatttaataaaattttttttttgtttttttttttttaattaagggtggaaaattgtatatgggatttgttttggtttcgttttggattatttggttgataatttaggggttggtaaattagttggtttttatttatagttatttttggttttgggaaaggttttagtgttgagagtttcgtttttttggttgttaatggagtaggggtaatgaggaaggatgaggataagaagttgaagtgggagtgttgtagatggttgggaagtggaattagatgtttttttgaagaaaaaatgtagatatttttaatcgaggaatgtttttttgtttttttatattttttaggtgttttagtggttcgtgttttttttattttttattagtggtttggatttatttttaggaaggtgtttgggttaattttgttttgaggggtttttttttgtattaaggttttaagatttgttttttgtttgaatggtatttttatgttttttttgatttttgtagttggtggggaattttttgaaggtttttttttgtgatttttgttttttttgatggaagttataaattgttttggattaggaaaatggtttttgttaagtatgagttttcgtagaataaagggtttggtgtagattaaagagttgtttttaattgtgatatttttttttttttagtgagtttttttaagatatttatagaggaatttgaggatagagtgtttgtgaattgtaatattagtattatatgggtagagggaacggtgggaatattgtttttagatattataagattggatttgggaaaacgtattttggatttacgaggaatatataggtgtaatgggatagatatatataaggataaagaatttatcgtgtaagtttattatcgaagtacgtgttttttgaattttttgggttggaatggatagggtttttggatgtgagaattttttggttagagagggatatggtgaatttatttgttttttaaataaagtgaggttattattgtaatggtataagttagatttggggatttttaaagtggaagagagagtttaatttagtaagatagagtagtaggggttatgttattgtagttttggttgggtgagaggtttggtttattattttgtttaaggttttaaaagttgagattattttttggttttttttagggattttttaggatgtagggtggaggaaggtgtggtaagtttattattaggttttttttttagggttttattgaagtttgggttttggtataagagatttaagggttgttttaggaggtagaggatggttttttgattttaaaggtttttaatttttttttttttttttttttttttatagtgtgttagagttgtgtggagttggatttagttatcgtggttggtattattgttattgatgttattgttattttgttttttgttttgggagttttttgttttgttggatatgagattggaaggttgtttgggggttagtggaagagtagagtatgagagtgtgtttgtgtgtgtgtgtgtgtgtgtgtgtgtgtgtgtattagtgagtttatgtattagttaaggaatggggttggtggtaggtttagttttagttgggagttatttttgtaattttttaaagatttttagaattttgattgttgaaagaatttgtgtgtttatattatttatgtagatttttgagggtgtgggagggtggattttatagttttatttgttaggttattgatgtttttttttggtttttttagttgtcgatatataagttttgttgaggaatgattaggtttattaggtgagcgttgaggggaaggaggtaggaatgaagggagggtaagtggggatagagaggtttatatt

SEQ ID NO: 331 - DNA, 6237 bp, Artificial Sequence
  chemically treated genomic DNA (Homo sapiens)
tatgtagtagtattttattgtggttttaatttgtttttttttaattattaatgatgtttagtatttttttatttgtttattggttatttatttatttttttttgggaattgtttatttaaattttgtgtttatttttttattgagttgattattttattattgagttaaaatagttttttatatattttggatataagttttttgtttgatgtatgtgtttggatataattttttttagtttatggttttttttttatttttttattgttgttttttaatgaataaagtaaaaatttttaattttgataaagtttagtttattaatttttttttttatggtttttattttttgtgttttattataaatattttttttttatgttttattttagaaattttatagttttgggttttatatttaggtttatgaattattttagataatttttgtgtatggtatgaatcgagggttaattttttttttatgtggatatttagttgttttattattatttgttgaaaagattattattttttgttgaattttttttgtatttttattgaaaattaattgattatatatgtttaagtttatagtattttaagtattgtatgataattatattttttttattgtttgatatttggtagggttattttattttttttatttttttttgtaagaatttttttaattatttttgtgtttgttttagtattatttttgtattgagatataatttatataatataaaatgtgttattttaaagtgtatattttaatggtttttagtatatttattttgttgtatattattattattgtttaattttagaatatgtttattattttaaaggaatttttatagttattgatagttttaattttttattttttttattttttggtaattattaatttgttttttatttttatgaatttgtttattttggatattttatataaatggaattatatattatgtaattttttgtgtttggtttttttcgtttagtataatgtttttaagggttattttagttgtagtatgtaatagtgttttattttttttgatggttgagttatattttattgtttggatacggcgtatttgtttatttatttttagttgtggttattcgaattgtttttagtttagggttattgtgaataatgttgttatgaatatttttttataagtttttgtgtgagtttaggttttcgatttttttgggtatatatttaggaatagaattgttgggttatatgatattatgtttaattttttgaggaattgttaaattattttttataagggttttattatttatataatttataaaaatgtatgagaattttagtttttttatatttttattaatatttgtattgtttgtttttttattttagttattttagtgggtgagaagtggtattttattgtcgttttgatttgtatttttttaatgattaatgatgttgtatatttttttatgtgttaattggttatttgtatgttttttttggagaaatgtttatttatatttttggttaatttttaattgggttatgttttttattgttgagttataggggttatttatatattttgaattttagatttttattagtatatttataaatgtttttttttattttgtgggttgggttgtttttttatttttttcgtttttttttttgtttttttttgttattatattttatgattttttgtgaataaagtattgtttagaggataagtattgtaagtattaatatcggaattagtgaaaataattagtatagattaagtttttaagtgatatttttttagaaatgtatgtgtataggttattgaagattatttataagtaattggttttggaaaagtataatttttgaagaatttttttgttttgtgagagtgatttaatatgaatgaataaaatatatttttgtagttgaattgaaaataggtatatttttgttgttgaattttaataattttattttttttaaaaatttatatagagtataattattagtgtttttttgaacgtgttatttttttaaaatttatatagttattttaataatatttttaaagatttaagtatagtatttttataaagtttttttttttaatatgttttttaaagtttttttataaaatgttttgttttaaaatagtcgtttttggaatattttatgatgtagagttttatttatgtatgttggttgttttaagttattttacgtaatggtgattcgatgattaatgtggtaagagtgaatataagataatgtaagtatggattattagttatgttgaaatttagattttttgaggatgtaaaagagaattagtaagtatgtattttttaagttgagtaaaagttaaataaatatatatcggatagaaataaataataataaaatttttatggttttgttgattattgtggtgtttaattgattttattttaagatttttttatatttagttttttttttttatttaaggtgtagtaaattatttttttgttaataatgtatgtttggattttattttggttgtgtttgtattgtagttaatggtttaagtttttaaggttattgttagtattttggtatatgggggttttttgttgtttttgttgttttgttgattgttaaagaatttaggttaataatgttattatttatatttatgagttatttgttgttggttgttatttgttgttttttaagttttttttggaatttaattgttttttgtttgtttgtttgttttgttttgtttttggtttggaatttagaagatatttatttaataaaatattaggtgataattttttaagaattttaatagatttaaatattttgtttttaatatgggtgagttaaaattatttatattatataaaagttaagtatgtttttattattattttttagataataaaattttttttattttcgtgtttatggggaattatgtattttaaggttttttatacgtgggaggggagaatttgtttaggaattttttgaagttagtatttattaagaaatgggtatttgggatgattatattatatgagtatttttatgaagcggatatttttattttaggttttaatgtttttgatttagtgagagaaaagttaaaggtttgaaggttttttttgatttttttaggattaaagtttttaggaatgataattattttttgttggatgttgaaacgtaaaataatttgagttgtgattttattgtatttttttagaagtgtattttttaacgaaggtagagaagatatatttgtttaggttggatttttagtggtttttaaagggttatatgtaattatgataatgttatgttgttggcgaaattttaaaagttttggttgggtgtaatatgggtggtatttaatttcgttgttgattggtttgggtttgagttttgggttgttttggatgagttttagttggtttgttgttaaaattggatatttcgagggattttattaagttagtatttttataagttttcgaagttttttaagtggtatatagatttgatttgtgatataattatttgttatttttatttatagggtagattttgttttttggtttagcggttatgggtattttagtgatgtaaagatttatataatttagttggaggattttgagtattttttttaggttcgggtagattagttttgggttgtgatttgtagtttatagttttttatagtagaagatattttttttttgtatttttttttttgttattttttttttgatggtttttttagttgtgtttttattttggtatatgtaggttttattagtgtgttagtattttagattaatgataatttttattgatgaagatttagattaaatgtagagatagattatttgggttgtagtgatatttttatttattatttatttgttgtgtggttttgagtaagttatcggtttttttaggggttaatttaggttttgagtaggtattaagtttgatgatgggaatgttgtttttattatttagaggtatgcggtgatttgtaggatttattttttttatagtgttttttgatgtataaaaatttttaattgtgatgaagtttaatttattaattttatgttggattgttgtgattttggattattggttatttttgtatattaattttttttatattaattttggaattagtttaatttgttttaaaattttttgttggtatttttaatgaaatagattgattaattaagagagaatggtggtttttttaaaagagagttttttattaaagaagggtatgtttttttatttatttaagttttttcggcgttttttagtaatgttttaaagtttgttttatatagatatattataatttttagacgaagtttatgtttaggttttaatgttttattattgtaaattattttggtgtttaaatgttgataattaatataagtgtttaaaatattatgtgagttatagtattttatataatgatttaaatttaggttaagtttagatttgtaattttagatttattttagttttttgttttatagataaggaagttgaagtttagagatgttgagtgattgatttaacgttatatagtaagtaggtggtaggtagagatgttattaaagtttaaggaatttgtttttatatttgttttggattttaatttagggttttgttattttgttagttattataaaatatttgatagtttaggaaaatagtaaatgtttttatatttatcgagaatttgtatttgtttagagatggattttattaattaagataggaattagataagaattattttttttaaaaaaaggagtattaaaataatggttaaatgagagaaaaagtaaaatttagatagatagatatatatatatattttaaatttttaaatttttagggttttttgtttgtgaatcgaaagggggagtgcgaattttttggttttgtcggtaggtgtttttttaaaggttttatagttttttattttttggggaggtagttgtagaataaaattagtagagatttttttttttttaatcgtttcggttatcgttgttttagtttttgttttttagtttttttttgagggaaaggataagatgaagtggaaggcgttttttatcgcggttattttgtaggtatagttgtcgattataggtagggtcgacgtgtcgacggtagggaatttttagaaattttttgtgtatgtgtaggggagtgggtgtgggtagtggagggtggtgaggggttggggttttttttaaattttgttttttttaaattaatgggtaagtgagtagtgaggggttcggttcggtgttggtatttgtttcgttatagtcgagttgggtattagtttagagttagttgttagaatatatagtttttttaggtatagatttttcgagtgataagagaggaaggaagaaggaagtaagagagtaatcgaggtaggtttagggtagagaaacggagagggagtgttttatagaagttggataggatcggaaaatgttagttaggttatgtttcgtgttgcgacgttttagtttttttagttttttttattttttggttggtttcgttatttagtttttttttttttttttttgttaataaagaagattttgttggttagttaaggttatggtttgaaatattttaatgggttcgggagtaagtggggtaattaaggaggagaggggtataggtaggaagtatcgggtggtagtttttatagcgttttcgttattttatggttaagcgttcgtgtttaggtttagttttgttatggttgtttttatatttacgtttgggattgtcgggtgacgtattattttaggtttcgtgatttattttagtttgttttttaggcggttatttagtttagttagagggttcggtattgatagaatacggggtagatgagacgatgtgtttggttaagttattattacgagtagcgtttagttaataagagtgtttgttttttattttattttcgatcgtgggagtttagttttgttgtaagtttttagtttttattatgttttttagtttaggtaatgaggaagaaaattagtgaaaagaggataggataaattgtttagggggattagtttcgtggtatttttttgagaagtggggtaggttgaat

SEQ ID NO: 332 - DNA, 6237 bp, Artificial Sequence
  chemically treated genomic DNA (Homo sapiens)
atttagtttgttttattttttaggaagatgttacgaggttgatttttttgagtagtttgttttgttttttttttattggtttttttttttattatttgggttagaaaatatggtggaagttaaaggtttgtagtaaagttgggtttttacgatcgggaatgaggtgaggagtaagtatttttgttggttgggcgttgttcgtggtggtgatttaattaggtatatcgttttatttgtttcgtgttttgttaatgtcgggttttttggttgggttagatggtcgtttaaggggtaggttggggtgagttacggagtttgggatggtgcgttattcggtagttttaggcgtgggtgtggggatagttatgataaggttgagtttagatacggacgtttggttatgaggtggcgaaggcgttgtggaggttgttattcggtgttttttgtttgtgttttttttttttttggttattttatttattttcgggtttattggagtgttttaggttatgattttgattgattaataaaattttttttgttggtaaaggaagaaagaaaggggttgagtgacggagttagttagagggtgaaagaagttgaagggattagaacgtcgtagtacgaaatatggtttggttgatatttttcgattttgtttagtttttgtgaaatatttttttttcgtttttttattttgggtttgtttcggttgtttttttgttttttttttttttttttttttattattcgaaaaatttgtatttggaggagttgtgtattttagtagttggttttgaattgatgtttaattcggttgtgacggagtagatgttagtatcgggtcggattttttattgtttatttgtttattgatttgaggagggtaggatttgaaggagattttagttttttattattttttattatttatatttatttttttatatatatataaagagtttttagaagttttttgtcgtcgatacgtcggttttatttgtaatcggtaattgtgtttgtaggatggtcgcggtgaaaagcgttttttattttattttgtttttttttttagaaagaggttgggaggtagaggttgaggtagcggtggtcgggacggttaggagaaaaggagtttttgttggttttattttgtagttatttttttaggaagtggaggattgtggggtttttgagaaagtatttgtcgatagggttaagaaattcgtattttttttttcggtttataggtaggaagttttggaggtttgagggtttggggtgtgtgtatgtatttgtttgtttgaattttgtttttttttttatttgattattgttttaatgtttttttttttaaaaaaaataatttttatttaatttttattttgattggtaaagtttatttttaggtaaatataagttttcgatggatgtaagaatatttgttgtttttttagattgttaaatattttatggtggttggtaaaatgatagaattttggattagagtttaggataaatgtagagatagattttttgggttttagtgatatttttgtttattatttatttgttgtgtggcgttgagttagttatttaatatttttagattttagtttttttatttataaagtaaagagttggagtagatttgaggttgtagatttgaatttggtttgaatttggattattgtgtgaaatattgtagtttatatagtattttaaatatttgtgttagttgttaatatttaaatattagagtaatttataataataaaatattaaaatttagatataaatttcgtttaaaaattgtaatatatttatatgaaataaattttaaaatattgttgaagaacgtcgaaaggatttgggtaaatggaaaggtatatttttttttgataggaagtttttttttaaggagattattatttttttttaattaattaatttattttattgaaaatattaataaaaagttttagaataagttaagttgattttaaaattgatatgaaaaaaattaatgtataagaatagttaataatttaaagttatagtaatttaatataaaattgataaattggattttattataattaaaagtttttgtgtattaaaggatattatgaagaaagtgagttttgtaaattatcgtatatttttaagtgatggaaatagtatttttattattagatttggtatttatttagagtttaaattgatttttaagggggtcgatgatttatttaaggttatatagtaagtaggtggtaggtagagatgttattatagtttaagtagtttgtttttatatttagtttgagtttttattagtgaaggttgttattggtttggggtgttgatatattgatgaagtttatatatattaaaatgaagatatagttggggaggttattagggggaaaatagtagaaggaaaggtgtagaggaaggatattttttattgtggaaaattgtgggttataaattataatttagagttggtttgttcgagtttagagaggatgtttaaggttttttagttagattgtgtggatttttatattattgaaatatttatggtcgttaagttagaagataaaatttattttataggtgagaatggtaaatggttatattataagttaaatttgtgtgttatttgggagatttcggaagtttgtaaagatgttggtttggtgaaatttttcggagtatttagttttaatagtaggttagttggagtttatttagaataatttaggatttaaatttaagttagttagtaacgaggttgagtgttatttatattatatttaattaaaatttttgaaatttcgttaataatatgatattgttatgattgtatatagttttttggggattattaggaatttaatttggataaatatgttttttttgttttcgttaaaggatgtatttttaaaaaggtgtaataagattatagtttaagttattttgcgttttaatatttagtaaggggtggttgttatttttaaaagttttaattttgaaaagattaaggaaaatttttaggtttttgattttttttttattgaattaaggatattgaagtttggagtgaaaatgttcgttttatagaaatgtttatgtggtgtgattattttaaatatttattttttgatgaatattgattttagagagtttttgaatagattttttttttttacgtgtggaggattttagggtgtatagttttttatggatacggaaatgaaagaggttttattatttgaaaagtggtgatggaaatatgtttaatttttgtatagtgtaagtgattttaatttatttatgttaaagataaaatgtttaaatttgttgaaatttttaggaaattattatttaatattttattagataaatgttttttgggttttagattaaaaataaaataaaataaataaataaataaaaaataattagattttagaaaagatttgaaaggtaatagatgataattagtaataagtaatttatgaatgtgggtagtaatattgttagtttgagttttttagtagttaataggataataaagatagtagagggtttttatgtgttagggtgttggtagtggttttgaggatttgaattattgattgtaatatagatatagttaagataagatttagatatgtattattaataaaaaagtgatttgttgtattttgagtagggagagagggttaagtgtagaaaagttttaaaatagagttaattaaatattatagtgattaataaagttataaggattttattgttgtttgtttttattcgatgtatgtttgtttagtttttatttagtttgaaggatgtatatttgttggtttttttttgtatttttagagggtttgagttttaatataattagtggtttatatttatattgttttatatttatttttgttatattgattatcgaattattattacgtgaagtggtttgaaataattaatatatataaataaaattttgtattataaagtattttaaagacggttattttaaaataagatattttataaggggattttaggagatatattgaaagaagaggttttataaaagtattatgtttaagtttttaagagtgttattgggatagttatgtgaattttgagaaaatagtacgtttaaaagaatattggtaattgtattttatgtaaatttttaaagagaataaaattattagaatttaataatagagatgtatttatttttagtttaattatagaaatatattttatttatttatattagattatttttatagggtaagagagttttttaaaaattatgtttttttaagattaattgtttatagataatttttaatgatttgtatatatatatttttgagaaagtattatttaaaaatttgatttatattgattgtttttattgatttcgatgttaatatttataatgtttgttttttagataatattttgtttataagaaattatgaaatatgatgataaagaaagataaaagaaagaacgaagaaagtgaaaagataatttaatttatagaatgaaagaaaatatttgtaaatatattgataagggtttaggatttagaatatataaataatttttatgatttaataataaaaaatataatttaattaaaaattggttaaagatgtaaatagatatttttttaaagaagatatataaatggttaattagtatatgaaaagatgtataatattattagttattagggaaatataaattaaaacgatagtgagatattattttttatttattaggatagttaaaataagaaaatagataatataagtgttgataaggatgtggagaaattggaatttttatatatttttgtgggttatataaatggtgaagtttttgtgaaaaataatttggtagttttttaaaaagttaaatatagtattatgtgatttagtaattttatttttagatatatatttaagagaatcggaaatttaggtttatataaaaatttgtaaaggaatgtttatagtagtattatttatagtggttttaaattggaaataattcgaatggttataattaggaatggataagtaaatgcgtcgtatttaaataatgaaatatgatttagttattaaaaagaatgaagtattgttatatgttgtaattgggatgatttttgaaaatattatgttaagcggaagaagttaggtataaaaggttatatagtgtatgattttatttatataaaatgtttagaataaataaatttatagagatagaaagtaggttagtagttgttaggggatggggagagtggggaattgggattgttaatagttatgagggtttttttgagatgatgaatatgttttagaattggatagtggtgatggtgtgtaatagagtgaatatattaaaaattattgaagtatgtattttaaaatgatatattttatgttatatgaattatattttaatataaaaataatgttaaaataaatataagaatagttaggaaaatttttgtaaagaagagtaaagagagtgaaataattttgttagatattaaataataaaaggggtgtaattattatatagtatttagggtattatagatttaaatatatatggttaattggtttttaataaaggtataagaaaaatttagtaggaaatggtagtttttttaataaatggtggtagaataattggatatttatatggaaaaaaaattgattttcggtttatattatatataaaaattatttaaaatggtttatagatttaaatgtaaaatttaaaattataaaatttttggaataaaatataggagaaaaatatttgtgatagaatataaaaagtaaaaattataaaagaaaaaattggtaaattggattttattaaaattaaaagtttttgttttgtttattgaaagatagtagtaggaaaatgaaaaagaagttatagattaggagaaattatgtttaaatatatatattagatagaggatttatatttagaatatgtaaagaattattttaatttaatagtaaagtaattaatttaataagaaaatgggtataaagtttgaatagataatttttaaaagaagataaatgaatggttaataagtaagtgaaaagatgttaaatattattagtaattaaagaaaaataaattaaaattataatgagatattattatata

SEQ ID NO: 333 - DNA, 6095 bp, Artificial Sequence
  chemically treated genomic DNA (Homo sapiens)
gttaaaaatttatatttttaagtttgttattatttaagtttaggaattgttttatttgtatattattttaatttttaaaggtttgcgtaaaatttattttgtggttaatatggatttatttaaaaaatttagttgtatttttttttttgggatttttagggtgtagtagttatattaatttttttatttattataatttgaaagttttattaattttaaaggtttagttttataattatatttggttagtttgagattaatttttagaggttatttattttttatgaagattgttttttagttattggtttatttagattttattaataattatttcgtaagagttttttttattattgtttatttatatgtgtagaatttatattgtgaatatgaattaaggatgaatttttttaagagttaaggtttaattggaatgttattttttttttattgtgttagattattttttttttgggaagttgtttcgtgaaataattaaatattgtttttttaaaagagtttgtgatttgttgtatttgtaatttttgaattttatgatttagtttaagattttttagttttttattttatatttttgtttatatttggtttagatttggtttttttttgttcgagaggaataggatttattattattagttagaagttattagtttttaatattttagtaaagaattttagtttgttagagtgagtaatgttttgtttgtatttaagtttttttgaattagttattttaaataggatgttattgtttgtatttatttagaaattgttaagttgtttatgtgtttttttttattagtttatgtgatttttgaaatatttttatgcgttttgatgggagggaaaaaaaataatagttttttatatatttatgtaatgtttatttatggagtatagtgtatatgttagggattgagagttgagtatgtgttggtattttagaaggatatgtttttgtttttaggtagtttagaggttattgagttttattatgaggtaggtatattaggaaatggttttgatgtttttttttattgattatttataataaattatgggaaaggtttgattatttttgttttgtggttgggattatcgaaatttttagaggttaagttattttttgataagggggaaagttaatgtttagatttggattttttcggtttaaggttgttgattgaattttggattttttttaaatagtgtaatttcgtgttaatttaaattaatttaagttttttttttagttttttatattttatggtttggtttagaaagaaagatggtgtaatatataatagatattaagtatttaagagtttgggaagggtttgtgtgattagtggtgtgggtagggtgtttttagaatggaaagtggatgagaggggagtttaaagaggtgatttaggaatttttaaaggtggattttgatttagtaagttattaggtttgttatttgaaatgagttatttgtggtatgggggtaaatgattttagttttttattaaattatcgggaagtaagtaaataaaataattttcgtttttggggagaataattttaattatagtttttagaatttgtatgtttttttatagtttgtaaagtatttttatatttatattttttttggtggaattgtttattgtattaatggagaagggattaggatttgatatggtttagtttgttggtttttatatattttttaagaataattatttgttaaaatgtaattttatgtaatagtttggtatataaaattgatgtaagtggaatttttgtggttgggatggggtttggggagggagaggtatagtttattttttagtttttattttgattattaggtttgtttttgaggggtttttaaggaatttttaggttttatgaaatatagtaagatagatattgtttttagtgattttttacgttattttatttttttgttttaagaaaaggaagttgaaatttttggaggttgtatgaggtgaaaaaagttgttttttgttttgtatttttgtgtatggaatttattagggttggtttttttatatgagtagggattgaagttttatttgggagttagtttgtttttagttgttttaagaaataaagtgtttttttggttatagatagtagtagtaataatttttttttgcggattggtagtattttttaagtatttgttttttaggtggaagttacgggttattgtttttattttagacgggcggttttttgagttatggtatgttagtttttgagtggttgaggattagatttagataaggattttttagttttaaatattttttttgaaaatgtaagaggagtagtttttagttaaatagaatttttataattgaaaaatttatatcggattagatagtggtagtggttgtataatattgttaaagtattatacgttattgttataaatatttttaaatgggtgaaatggtaaattttatgttatgtatattttaatataataatgataataattttaattaagtacgttgtttttttattttttatagggttaagtttaaattttttggtatagtttatattttgtagtttttatatttgtaattttatgtttgttatttttttttagtttttttatttgatttatgtttagattagtttatattgttttttattttttggataagttatgtttttttatttttttatgtttaaatataattttgtttttagtaatgatagtaaatatttatttaaagtgtttattgtatgtatatgtagatataaatttacggtttaatatatgtagggtttttgagttatttaatttttattaattttatgaagtaatagaattgtaatagtaataatagatattattattaagtttattttatatttgagtaaattgagttaattgttttaggtaaggttatataattaagaagtagttataatagggtttggatttaggtgttttagtttttgaatttatgttgttcgttattatattgtattgtttgtggatgatttatttgtttttgtagttttatttgaagaatttttttttttttttttttgaggtttgttttaaatattattttttttgtgaagattgtttggtgttttttaggagagagtgtgatttttttttttaggaatggtagtattttaaatatatatattttgtagtatattttattttgtatggtaatggtttgtttgtgagttttatttcgtattagagggtgagggttttgaagatagcgttaggttttatttatttcgatattttataatatttattatatgtttgatgaatgaatgtatagggggatggttgggtgtattttttttaattttttaattttttgaaataaataataaaattttatttttttttagaagttttggtatggttttttttattttgttatagttattgataattatttttattttttgtgtaatttattaggtaagaagtttatgtagatttatttttagtagtttatatgataaataaatattgcgtttgatttttaaatattaaattatagtatattatagatagatatagagttattatttaaagtatgatattttaattttaaaaggttttttttgaagaatattataaattttttttttttttaagatttgttgggtaggaaagatgggagaaaatgaattaatgtttatatagaaaggaggataatgggggtaaaaataatagatgaacgtatgggtggatgagagaatggataaaatgataggtggatatgttgattttggatagatgggaaatgagtggatatattaataaatagatatgtgggtggatgggtggagaagaggatggtggatggttgtggttttatgaagagatgtgaaaaaggaagtgtggaatgatggatgagaagttgtatgggaagatgaatagaagaataggtggttgaataaattaaaaggtgtgtggttggatgaatgaatgagtgggatgatagatggatttaagtggttagtggatggataggaggatggatggatgtgagagttttagaaggatataaggaaagatgggtggatagatggatgggcggatggaaggatatttaggaggatgaatgagtatgtgtgtggagagaggtgtttatttatattggtttgaatatatgggttagttgagttaaatgttagttttatgataggttattagtagttttttttgagttgttttgttaagaagttaaaatttatttaagttatgtggatttgttattgaggggaaaaagaatgagttttttttttttttatttggaagatttattaattttttattttttattttttattgtgggtacggaggtattgcgttatttagggtaagatttcgttttttttttagttttttttttaggatatttaatattttgtgaaatttagagattttgttttagtcggatttagagaaatttagcgggaaaggagaggttaaaggttgaatttaatggtgtaaggttttacggttcggttattttttgttttgacgtcgcggggttagcgggagaagaaagttagtgcgtttttgggcgtaggggttagtggggttcggaggtataggtatttcgcgatattttaggtttttcgatttacgtttttggtagtttcgattatttatagttttagtagagtacggggcgggggtagaggggttcgttcgggagggttgttattttttaaaatttttgcgggttgtttagttatagttttttttgtttgggtgtgtttttcgttcgtttttttttttcgttttaggttattgtttttaatttcgaataaaaattgtagttaattttcgaggtagttttattgtttagcggattttagtttttgttaggttcggttcgttattttcgtttcgtttttcgtcggtttttgtttcgcgtttagggattttttagtttttttcgttcgcgtttttcgttcgtttcggatattatggataagttttggtggtacgtagtttggggattttgtttcgtgtcgttgagtttggcgtagatcggtgagtgttcgtcgtagtttgggtagtaagatgggtgcggggtgtttagcgcggattcggcggtagttttttcggttgagtcggttttgggggattggagttaagtgagttgtttgcgaagtgtattgggtttcggaaagtagggttgggatttgcgttaaatcgttggagaatgtgtttgtggaagtattatttggttgaaagaaaaagagaaagagaagaaagtttgttgggtaggttgtcggcgcgtagttttgggcgaggtcgttagagttgtagtatatggtagaaagtaatcgttttttcggatgcgtatagtcgttgtttggattaataggtttttgtgtttaagggttcgttaagttttatcgggttgtgtttaggtagggtagagttgggcggggtagagattggggttggaatagggcgagtggttgttattaaggtggttatagaagggattataattttaagtgtgagattagttggtaatgggttttttagaaaggggttttgggtttttttagttttttattgagttttgttttaaagtttatagttcgtagtgttattgttattttagcgttgtggaagtttgaattagttttgcggtgaggttttgggttttttatgagattttagtttgtgatagggagtatgaatatgagaggtaattattggattagttgtttggtttttattattttttgtttttgttaattagtgtggggaaattttaatagtaaggtggtttatattttttgtttggtagttttagagtagagagaagagttttgatattagggtaatattagggattttggagttagggttttaatattttatttaaatagggttagtgttttgtggtggttatggaggggaggggttgcgtgtaaggtatattttagtacggtttaattttaagtattttttttttttgtttatgtatgtatagataattatatggtcgatttgtttatcgttggttaaaattaat

SEQ ID NO: 334 - DNA, 6095 bp, Artificial Sequence
  chemically treated genomic DNA (Homo sapiens)
attaattttggttagcgataagtaaatcggttatgtaattatttgtatatatatagataaagaaagagaatgtttggagttgagtcgtgttagaatatattttatacgtagttttttttttttatagttattataaagtattgattttgtttggatgagatattggagttttagttttagggtttttgatgttgttttggtattaaggtttttttttttgttttgaggttgttaggtagggaatataagttattttattgttgagatttttttatattgattggtagaagtaggaggtggtgaggattaagtagttggtttagtggttgttttttatatttatgttttttattataggttggaattttatgggagatttaagattttatcgtagagttggtttaagtttttatagcgttaaggtggtagtgatattgcggattgtaagttttggaataaggtttagtggggagttgggagaatttaggatttttttttggaaaatttattgttagttagttttatatttggaattgtgattttttttgtgattattttgataatagttattcgttttgttttagttttagtttttgtttcgtttagttttgttttgtttagatatagttcggtggggtttggcgagtttttgggtataggagtttgttagtttagataacgattgtgcgtattcgggagaacggttattttttgttatgtgttgtagttttagcgatttcgtttaaaattgcgcgtcggtagtttgtttaataaattttttttttttttttttttttttttaattaaatggtgtttttatagatatattttttaacggtttagcgtaaattttagttttgtttttcggagtttaatgtatttcgtagatagtttatttgattttagttttttagggtcgatttagtcggaggggttgtcgtcgggttcgcgttgagtatttcgtatttattttgttgtttaggttgcggcgggtatttatcgatttgcgttaggtttagcggtacgaggtagagtttttaggttgcgtgttattaaaatttgtttatggtgttcggagcgaacggagggcgcgggcgaaaggagttggaggatttttgggcgcggggtaggggtcggcggaggacgggacgaggatggcggatcgaatttggtagaggttggggttcgttgggtaatgaggttgtttcggaagttggttgtagtttttattcgaggttgaaaatagtgatttaagacggagggagggagcgagcgaaggatatatttaagtaaggggggttgtgattaagtagttcgtagaggttttaagaagtagtagttttttcgggcgggtttttttgttttcgtttcgtgttttgttgaggttgtaaataatcggggttgttagggacgtgggtcggggaatttggagtgtcgcggggtgtttgtgttttcgagttttattggtttttgcgtttagagacgtattggtttttttttttcgttggtttcgcggcgttaggatagaggatgatcgaatcgtaaaattttgtattattgggtttagtttttggttttttttttttcgttaaatttttttgaattcggttggagtaagatttttgggttttataggatgttggatattttgggagaggagttggagagagggcgaggttttgttttgggtggcgtagtgttttcgtgtttatagtggggagtgaggggtggggagttggtgaattttttaagtggaaagagggagagtttattttttttttttttaataataagtttatatggtttgaatgaattttagttttttggtagaatagtttagggaaagttattgatggtttgttatagggttggtatttggtttagttaatttatgtgtttaagttagtgtgaatgggtatttttttttatatatatgtttatttatttttttaaatatttttttattcgtttatttatttatttatttatttttttttatgtttttttggggtttttatatttatttatttttttgtttatttattaattatttaggtttatttattattttatttatttatttatttaattatatattttttaatttatttaattatttatttttttatttatttttttatataattttttatttattattttatatttttttttttatatttttttataaaattataattatttattatttttttttttatttatttatttatatatttgtttattgatatatttatttattttttatttgtttaagattaatatatttatttattattttatttatttttttatttatttatacgtttatttattatttttgtttttattatttttttttttgtgtaaatattaatttatttttttttattttttttatttagtagattttaaagagaggaagagtttgtaatattttttaggggaagttttttgagattgaaatattatattttgaatgataattttatatttatttataatatattatggtttaatgtttggaaattaaacgtagtatttatttgttatgtgaattattaaaagtaaatttgtatggattttttgtttggtgagttatatagaaaatgaaagtgattattagtggttgtggtaagatgaaaggaattatgttaggatttttgagggaaggtaagattttgttatttattttaagaaattgaaaagttgagagaaatgtatttagttatttttttatgtatttatttattagatatgtaatgagtgttgtggggtatcgaggtaaataagatttggcgttatttttagagtttttattttttggtacggaataaaatttataagtaggttattattatgtaaggtgaaatatgttgtaaaatgtgtgtgtttggggtgttattatttttagagaagggagttatatttttttttggagaatattaggtagtttttataggggaagtgatatttgaggtaggttttaaaggaaaaggaggaggaattttttagatgaaattatagggataagtaagttatttataggtagtatagtgtagtgacgaatagtatggatttaggagttagaatatttagatttaaattttattatggttgttttttagttgtgtgattttgtttaaggtaattagtttaatttgtttaagtataaaatgggtttaataatagtatttattattattattataattttattattttatagaattggtgaggattaaatgatttaaaagttttgtatgtattaagtcgtagatttatgtttatatatgtatgtagtaagtattttaaataagtgtttgttattattattaaaagtaaaattgtgtttgagtatagaaaagtgaaagaatatggtttgtttagagaatagagagtaatgtgagttgatttgaatatagattagatgaaggggttgggggaagatagtagatatgaggttataggtatggggattataaggtgtaagttatgttagggagtttgaatttgattttgtaggaaataaggaggtaacgtatttagttaaaattattattattgttatgttaaaatatgtataatataaaatttattattttatttatttaaaagtgtttatagtagtgacgtgtagtattttaataatattgtgtaattattattattgtttagttcggtataaattttttagttgtggagattttgtttgattaaagattattttttttgtatttttaggaagagtgtttgggattgaaaaatttttgtttggatttagtttttagttatttagaagttggtatgttatgatttaaagagtcgttcgtttggaatgaagatagtgattcgtaatttttatttgaagagtaggtgtttggaaaatgttgttagttcgtaggaaaaagttgttattgttgttgtttgtgattaagaggatattttattttttgaaataattgggggtaaattggtttttagataaggttttagtttttatttatgtgaggaaattagttttggtaggttttatgtataagaatataggataaggagtagttttttttattttatgtaatttttagggattttagttttttttttttggagtaagaaagtgaagtgacgtggggagttattaggaataatgtttgttttattgtgttttatggaatttggaggttttttagagattttttagaagtagatttagtggttagagtaaaagttgaggagtaagttgtgtttttttttttttaggttttattttaattatagaagttttatttgtattagttttatatattagattattgtatgaaattatattttgatagatgattatttttaaaaaatatataaaaattaataaattaggttatattaagttttggttttttttttattagtgtagtaaataattttattaaggaaaatataggtgtgaaagtgttttgtaaattgtagaagggtatgtaaattttaggggttgtaattaggattattttttttagaagcggggattattttgtttgtttgtttttcgatagtttggtgagggattgaggttatttgtttttatattataaatgatttattttaaataatagatttggtgatttattgagttaaggtttatttttgggaatttttggattatttttttgagttttttttttatttattttttattttaaagatattttgtttatattattggttatataaattttttttaaatttttagatgtttgatatttgttgtgtgttgtattatttttttttttaagttaaattatgggatgtgggaaattggaaaggaaatttgaattgatttgagttgatacgagattatattatttgggaagaatttagaatttaattagtagttttggatcgagaaagtttaggtttgagtattggtttttttttttattagaggatgatttaatttttgggagtttcggtaattttagttataaaataagggtaattagattttttttatagtttattatgagtagttagtgaaagaagatattaagattattttttggtgtgtttgttttatggtgggatttaatgatttttaagttatttgagaatagggatatgtttttttggggtgttagtatatatttagtttttagtttttaatatatatattgtgttttataaataagtattatataaatgtatgagggattgttatttttttttttttttattaaagcgtataggggtgttttaggaattatatgaattggtgggaggaaatatatagataatttgatagtttttaaataaatgtaagtagtgatattttatttggggtgattggtttagggagatttgagtgtaaatagagtattatttattttggtagattagggttttttgttgaaatattggggattgatggtttttgattggtagtaataaattttgtttttttcgagtaaagaaaagttaaatttaaattaaatgtgagtaggagtgtgaaatggaaagttgggagattttgggttgaattatggaatttaaggattataaatgtagtaggttatagatttttttaaagggataatatttaattattttacgggatagttttttagaaaaggaatgatttggtatagtaaagaaaaaatgatattttagttaaattttaatttttaaaaaaatttatttttagtttatatttatagtgtgaattttatatatataaatgagtagtggtgaaaaaagtttttgcgaaataattattagtaaagtttaaataaattagtagttgggaagtaatttttatgaaaaataaataatttttaaggattagttttaagttaattaaatgtgattatagagttgagtttttaggattaataaggtttttaaattatggtaaataaagaaattggtgtggttgttgtattttggaagttttaaggggagagatgtaattggattttttagatagatttatgttagttataaaatgggttttacgtagatttttggaggttaaaatagtatgtagataggataatttttagatttggatgataataaatttagaaatgtgaatttttgat

SEQ ID NO: 335 - DNA, 15674 bp, Artificial Sequence
  chemically treated genomic DNA (Homo sapiens)
tttattatatttttaagttatgtttaaaagttaatttatattatttttaatattttcgttttataaatgagaaaataagtgtttagaaagtttaaataatgtgtttaaggttaataggtagtaagtggtttgatttataatttaaatttaggttaaagtgattttgtatattatatattatattgtaagtttttttgattgattcgatatacgtaggtttttattaggtattatgtttgattttggagattgtgatggttaattttaggtattaatttgattggattaagagatgggtgttaaattattatttttgagtgtgtttatgagggtatttttagaggatattggtatgtgagttcgtggattgagttggggagatttttttttaatgtgggtgggtattatttaatcggttgggggtttggatagagtgaaaaggtagaggaaaggtttttttgtttttttttttggagttgagatatttttttcgttttgtttttggttattagaattttaggttttttagtttttgaattttgagatttgtattagtggttttttggttttttaggtttttagttttagagtgagaggtgtattaagggtttttttggttttgaggttttttagtttggataattatgttattggtatttttgtgtttttaggtttatagatggtttatcgaggaacgttttagtttttttaattatatgagttaatttatttatttttttattttattagttttgtttttttagagaattttaatatagatatgtaaatatatttaggataaattttattttttttaagttaatgtgatagaagaggaaattattatgtagaaataaatatttattgatatattttgttagtagtatgaataaagtattatgggagagataattagatttatgaaatgatggagaattatggtaaagaggaaaagtagggttgagaaaggttttttggaggaagtgatatttgattttggttttgaagaatgagttagaattttttgagttgaggagtaaagaagaaaatatgagggagtattatgagaagtagagtaaatagcgtaattgaagtataaaagtttgaaagtagtatagtttaggtatggaataatttagtgttgttagtgttgtttgattatgtaatagatgttagtttgtattttattggttagaagtattaataagtgaagaattttaattataaaaaaaagtatatatttagagatattaagaagaaagagataatattttgaaattataattagttgatgattgataagttaaaattaggaatttaatgatgttaagaatttttaatatgttaggttagttttaaggttagtttaatagttttatttatatatgttggttaggtacggtggtttacgtttgtaattttagtattttgggaggttaaggcgggtggattatgaggttaggagatcgagattattttggttaatacggtgaaattttatttttattaaaaatataaaaaattagtcgtgcgtagtggcgggtatttgtagttttagttattcgggaggttgaggtaggagaatggcgtgaatttgggaggcggagtttgtagtgagtcgagattatgttattgtattttagtttgggcgatagagcgagattttgttttaaaataaataaataaataaaaaataaaagataaaatatatgtttatataatatttttttatgttaggtgttttgttagatattgattgaagatatggtttttgattttgagaggtttatttatttatttagttatttatttatttatttattttatttatttttttaataacgatttgttgagtatatattatgtgttaggtaaaggggttagtagtaaagaagatttatatggtttttttttttattgagtttatagtataggaaatagttattattgaatacgaagatagttatataaatataattttaataaaagatggtaattgatatgtattaaagtaagattaaaatatagagaagtgtatttaatttatattggtattattatgggttttgatttattgtgggattttttgttgttatgtttttttacgttgaaagatgtatttggttttatataaagtatagattatgagtaggtaggtatatatagttttaagttaattttttggggtattaggagatagtattgttttatgtcgttgtatgatatattattatggggtaaaatatttgttgaatgaagttataataaggatataattgtatttatataaatatttaaagatattattatattaatatttattatgtggtaggattttgatgttgtgtggggaggaagataaaagtagatgtatcgttgagatagaaatgagggtaagggaaattttttatgtattgagagaggaagtttgtgaattttttcgttggttatggagttagggagattttagtttaattatcgtttttttttgagtttgtgattaagttttattttttttatttataaaggtgataagagtgatttttttaagtttatttatttgtaaaggggaaattgtagtaattttgttattatagggtaaaaagaaaaaaggatgaaaattagaataagggagagagataagagagagagtagtgttatttataattgtgggtaaagtgtttattatttttttttttttttgtttttttattttaaaaagggagattataatatttattttttttgaggttgttatgaagattaatttaggtgatatagttaatgtgtattttttgtgtttaaaatattttaatatgtattattttttttttttttatttaagaaattttttatatatagataagatgagtttaatatttaaattaaaatgttttgaaaagttaaaaggtaaatttttaaaatgattaaatattgaaaagagtttaaggttattttagagagaggataattaaatttaggtaggttgttttggattgttttttttgggatatgtttgtttttgttttattattaaaatatattttagttagatttttaagagtagtagtggttatttaggtggttttttattttattttttgtataaaaagacgttaagtatatagtttagtagtttttagtgtaaaatagaatattattcgatttttatttttgaaggttggggatagttttttttagttattttttagttttaggggggttggttggtattagggatagttgatagttttatttagttaattagttgttttgtgatatataatgtttttaatgtttaaagtttggtggatgatttttttgtatttatataagtagtagttggaggagaatcgatgagtttttttggttgtttcggggtgttaaggttgttatttaaattattattattataattattaattattgttttagtgagatgtttgttaggtaattgtttttattttttaattattaaaaaagtaattaaattttattagagtaatgtttgttttacgtcgtattaatatatttattaaattttttttgtttgtcgagtttaatggaaagttttggaggagggaatatttaaaatgttttcggatttaaaagaattgataatgttgtggggaagaggtttatataaaaaagtaattataggaagaagttcgatagtatataatatattggtatagagtgttatagatagtgttatttttatacgttggattttatttttgtggtaatgggatgtttgggaggagtcgtattgtgtagaggatttggagaagtggggtattgtggtgggaaattgtttttttttttaggaggtaggaggaaaataattaaggaggtggataggatgtgtattttattagagtagttattagagtttgattttttgataagagagtatattagttaggataacggttaaaagtatttttaaaagatttttgttttaggatgaatgatgtggtttgtgtgatttagcgataaatttaaaagttttgtttttattgtggtttgcggttatatttcgaatttattttttaagtatgttaaatttaagcgtagcgtagagggttgtatatggggtagttataaattaagtttaataattttgttggtggggatgtgttggatacgttgttaatgtttgtttgcgataatgttcgttagtttcggtggtggcggtgtttataggtaataatgtttattatcgtgaatggaatttgtttgattaattttgattagaggatgaaaatattaaagaattaagtgagaaagagggaagagaatcgtatagggaagagtagagcgagtagacgagtcgaacgtagagttcgcgaggggcgagtggaagttttttgcgggtaggtattcgattatcgttttgttttgggcgtggcggtttcgggtttagggatcgtttcggcgttagacggtcgcgttcggaggaaacgggcgttggtgaaagtttaggtgttttggtttacgcgcgtagtcggacgtcgggtttagggagagacgcgggttggggcgggacgggattcggtttttgaagcgcgagggtgggagtgaaagtaaagaggagaaaagtagagagagaggatagtggggtttagcgtcgcgcgaaaggtaggaatcgattcgcggataggaacgggtgtaatgaggttttcggcgagcgtgggaatatagggtttagttttttgcggcgggcgagtacgcggattttaggggcgggcgggtgcgataggacgtgatttggaagcgcggcgcgtgttatcgttttggagtaggtattcggttttcgtggagcgggtaggcgggtttcgggtttggagtttgcgattggggagggcgtcgcgttaatagtagcggttgcggggcggggtcgagtgcgcgtgcgcggttttcgcgggcggggagtaggcgggggagcgggcgggaagtagtgggagcgcgcgtgcgcgcggtcgtgtagtttgggtagtgggttttgtttgtgacgcgcggcggcggtcggttttgtttgtaacggcggcggcggttgttgtttcggatatttgcggcggcggcggcgatttcgcggcgggcgcggagatgtggtttttggtagcggcgttgttgttgggttcggcgtgttgcggtgagtggtttttcgtttttagttttgcggttgttgtcgtttcgttttcgcgggcgtgtgggttgcgttttagttagttcggcggcgttttgaagagggtggtcggggcgtagaatattcgggttttgagcgttcgaagtgtagacgtgggagggttttacggggaatcgggcgttttttttttttttttttttttttttttggtcgtttttttttttttgggtgagagcggggtttattttttttattcggttttttatttttaaatgtatatatataggaagattttaaatcgcgtatttcgcgtaaaaattaattagtaagaaagggcgcgattagaggtaaggggttgtagttgttagggatttttttttttcgtatttttttttttttttagtgtttagacgtatttggggttgagggagggagagtgggagggttcgggttttttgcgatggaagtgcgtattttggcgaagtcggtgagaaggggtttttgtcgtttgttttttatatgaatataggagcgaagaggacgtaaaggatataattaagttttatttttaatttagtatttaattagaagaatttttcggtcgtgtaatttttgttgtcgtttttaattttaaaaataagtttgttggaaattttttttttttcgtgatttttacgttttattagttatttgtatatattttaaattgtacgttgaagttttttttattttatttgggggaatcgttttaaaagtaatttggttttcgtttgaaataggaagatagtaatttttagttaaaatatgtgtagtagaatgggatttggtgtttttcgagtttaaagaatttttatttttttatttttatttcgagtttttggaatttatttcgtttttgtaaaacgtgtgtttcgtttgtaaaaattgagtaaggaatagaaatattcgtagttttatagtgagtgtttgttatattttatatttatagagttttttgtgaatttttataagatttagaatttagtttgagtattagtgatagtaattgttatatttattttagaatgttaaattaattcgattttaaattgattattagtttcggtgtgtcgtttttaaaggtttgtgattttaggtatttttaagatgtttttaagtttttgtttattattttttttttttttcgagtattttggatgttgggattgtgaatttaggttttcgttatttaaatggttgatgttagtgttttttgttattacgtttagtatgtttgttgtttttattattattatagttaaaataatattgtttttagagatgtgttgtataatcgtataataattttagaacgtttttatattgaattagatatgaagtgatatagtattatttatttaaattgtttaaaaagtaaaaagtataaattatatattatttttaaaataggtaggttagatttaaattacgtagtttagaattgttggaatggtattttgagtgataggatttatgttaggttttttttagtaatagttaatattatgtaattagtattcgtttatatataattttaatgtgttcgaatttttagagttatcgaatttagaatttatagtattttattttatttagttaatattaatttaatattaaagtaaaatataggtattatgtagttgagttgtgttaagtgtggattgtaaaataggatagtatttgttataaaatatgtttttgtatgtgtttaatatatagttttaaaaggatatgtatgaagaaagatgttttagtatataggtagttataaattaagggtttgagagattgattttagaatttagaatgagtaagaaagtgatggatttgtatatttatttgtattgaagtttgattttgtttttagtttcgttaattaagtttcgggaattagggattttttttggtattttttatagtgttagtggtttttgtggtaaaagaagttattttagatatttattttatgtaattataggtaaattggaaggtattttaatggtatgtaagatgtgaaatgaattattatgttgtattttattttgtttttatttatgtataattatattttgtttaaaagtgtatagttttagtggtatttattagttagtaaataaaattttaaataaataatgatggtgttgtgaattgtttttttagtggttgaatgatttttttttgtttaaaatgagttgtttttttttttaaattagggtatatatgattaaataaaatttttttttatcgtttaagtttagtagtaatttggtttgtttaaataaaaatgtttttttttaaagaatatattatttttaattataagttgttattttaaggaagtaaatgtttatttaaaagtacgtatttatggggtcgttttagtagtttagaggtagtgttttttaaagtattatattaaatgtttattattaggatatttgtttatgttgttatttgtgttttggtagatgttttatttttgttattgagttgtttatggagatttgaaaggttaagttttaaagatgagagatagatgattttttttttaaattgatatatattttaaatttaaaataattacgtatattcgtaaaattagatttgtattttatagtatgaatttagttatagttagtatataggtattgtttttaatatagtaatgttttttttgtggtataatttttaattattttttttgttttaggtttttgtttatttttttatataagataaatatttttatttttatattttattttttagtttgattttaataatatcgttttgggttattataaagttatttttattttgtatattagtgtagatattttttttgtgataaaaagaataagaataatagtgtaggattagttttgttaaatttattgtagtattaaagtagaaaatatagagtatttaggaaatttgattttgatatatttagattaagataatagaatttgggttttttttttttacgattatatagtgttgaaatagaaattaagttatatttatttttgaatattttattttaaatttatggagtagttgtataagatttagaatttggttaattttatggtttgagatttagattaggagaattaatgtgtatatttgaatatatattatatttgtaggttaaaaggtaaagtaaggggtttggttagtttaaggtttgttaaaattatttttttttattttaagtaagtatgagtttatattatatattaagtagtttgtaaagttttttttggtatatagataaattttagatagtatgttagtatgttttttaatgatttaagatgtagtatatagatagtagggatattttgtttttatttttttatggtatttaggtgtttgttaaggttataattttggatgttattgattttaaattgttttgttttttttaattttaagttggttttttttatttttataaggttatttttaaatttattagggggattgcgttgggttagaattaagtataatttgtggatattttattttattttagatttttattttagtgtttattgaggagagatttgattttattttttttgtacgtaatttagtgtagttagagattttagttttttaagttagatattagttttaaggggtaaaagtaggtaggattgttttttggtatgtgtttttattgatgatttttgtttttttatttaagaggttgttgagattttttattttatttttgaatatttatttttagtagataattaattttttattttattgtaaaaaatagtggtgtgtggtttggattttttttgttttttttttattattattaaattgatttataatattttagataattttcgttttattttttttcgttatttagttttagaagaaaatttatttatttttttaacgaaaggataatttgtttattatttttttatttttattattttggagatttgtttagttagtataattttttagttttgtattttagatttttttttttttattgatttttttttcgtagtttgtatatatgattaaattttattttatattaaaaaataaaataaaaaattttaagaattaaaatgtttttgtttttgtttttgtttgtatattgttagttgttgttttttttgtttttttatattgttaaatttattgtaaaagaattattgttatttaatatattttaagtgtttgataaagttattttgttttttttttattttttaaatatagtgtgtattagattttattagtttattgatagatggaaagatattttttttaaatatttaagttttttttttttataattagtttattatttaattagttatatatattattttggtttataattttaatttttttttttttattttttttgttttttataattaatttttgttgattattgtaagttttaggttttttttttagttgttttttatttggattattgtagtagtttgttaacggatttttttttttttttttttttgttgtttttagttttttttttatattgttgttaatgttttttttttaatgaaattaaatttgagtggtttatagttgtttatgttattaagtttaaatttagtatgatatttaaggaagttttttagaattttttttatttattttttttaattttattttttagagtttatttaaataattttttgtttttagttttttattttttttatttggttgtatacgttattttgtttagaaagtttttttttttttataatatttttatttattttttaagatttagtttaaatattattttttaggaagattatttatagatatatttttgtgatttttaaggaatttttttatttaattatataagtgatttgagattttttatgaaaatatgtagttttatgattttataattaagtttatataagtgagaagtagtggtaggtttttttgaaatatagaagaaaaatttatttttttttatatgatttttagattttttttttatggaatttatattttaaattttttatatttataaggaaggtattgaattttattttttggattttgtgttagatttttaggatattaaatgaagatagtgttttattttttgagtttggagagattagttaagtaaaatagtaattatatagtagtaggtatagtgataatatttgaatataaggtaatgggagtaataaggaggggaagaatataattgagtaatggtagggaaggggaataagattgaataatttaattgtgttttagtaggaagagtaaaagttagtaaattgtagttgttatttattgagtatttgttgtatatgtgaaaggtgatataaaaatatgttattttattaaattttaataatatttttatgaggtatatattattattatgtatattttatagatgaggaaattgaggagtagaggtaagtaatttgtttaaggttatatagttaagaagtatatgaggtgaattttaaattagggtcgattttttaatgtgtgtatttaattattatatattttatgtatttagtggggtaatagtgtataatagttaagaggttatttaggtttgaggaatagtatgtgttaaggtatggggatgagagtgtatttgtatagttatggaattgtaataacgttattatgattggagtttagtgtggaaatgagggagtataggaggtggggttggaaaggattttgaaggatttcgtttgtattttatgttaatgtatttagaatttagtttgaaaagggttgagggtgttgttaaagtattttaggtaaaggagtgtatatttgtatttagaatagttattttgggaattgtagaaaatatattagggttaggatggagaaattttgaggatggaggtagggagttggttagaagggtatggtagtagttcgaggggggaggatgagtgtttaatttatttatttaatagatattggatttaggaattattaattaggttgaatttattaagaattttttatggttaaggagagggagtaatttaatgtgatttttaggtttaggtttggtttattggtagatgatagaaaatattttagtaaagtgatttaggttgagggtaagaagtgggggtacgtaagtttttggatatattgattttgaagtaattgtattatatttaagtggaagtgtatagtagatagttggttgtttaatatttgtagtttagaagaaaggtagtgtatgatttagttttttatttaaaagtttgtaggtgaagaaaattatgggagttagggaaaatattagggggtagagggtattgaatttgaagtttttagggatattaatatttagtgtgagttaaggaatagattttaataaagaaagtaaattaggatggggtggataaagtaggaggaaattcgtaattaggagatattatggaggttaagagagaagagtaagaaagagattgtttattggtttaagaattgtggaaaagttaagatagaaagtgaattatgtatatttgattttttataagggattggtggtgattttggtaagagttgtagtaatgaagaagtaggggtgaatgggtggaggttacgtaatagatttaaggagtgaattggaagtgaggaaatgtttatagattgttaatttgggatgttagggagagagaaagtatgagggattttttttaagttggtaaatatttaagtaatttttaaagatatatataaaaataatattttgtaaatggaatgggggatgtgggaggttgataattaattaaggaaagtcgttgaggagattgatgggtatggaggtagaaatggaaattagtttttaggtgatgggatttattttagaaaaggaagtaaaaaaaaaaaaaaggtgtggatagttggggttataggtaggtttatagggaaggagtattggaagttttaggatttttttttgaaggttttagtttgtattaagaaatagggagagaggattgttggagagtatgggataaagggtagaagggagtaatttaagagttgttaaaaagaagcgaatatttatatgaaatatgtaaaatggtaaagattgaaggttcggaggagtagggattatgatatttttttgtttttgtttattagtaatatgaatttttttagaaatttgtaagattaattatttttttgtttatttataaggacgttgtttatgtagaaaagataatatttgtaattttgtattatatatttattatcgtttatttgagaattgtaagtttttaaaagataataattatatttttttattattatatttttatattttattataatattttattataggtaatttttgataaatgttgattgtatttttaaaatttttaatttgaatttgtgtgttgtgattattatggattgagttttttttgttattataaagtttttttttagattatgatatgagatggtttgggttgatagtttatatttattaatatttgtatagttttaatgaaggttttaagtttaatatttttggtatttgatataaaattatttttttattttatttgttaatttatttataattttggtattatttttggttatatttgtttgttgttatttgatttagattgttataagtatattttgtttatttagagtttttttatttatgttaattatttgtgtttttttatttgttttttatattttaaatagtttttttattttgttgttttatgagaagggagtaggtaaaaggaaaaaattttaaattagatagttttattatttaatagttttttaatgtatttttatagagattgaagttgtagttaatagttagagtgatatttttggtttgtttttatttattaattattagtgtaaaggttatttaaattgtggtttatttaggttaattttattgttatttttattaatagtatttattttatttaaattgttttagttataaaatgtttttattgtaataaataatgtagtataattattgttttttgtatttttttgaaaatttattttttaaatatatgttatgaaatggtggattgtttattaattattttttatttatttaattaaagtttttgtaaaaagttttataggatgattgagttttttattcgtattttttttttttaagaataattttttgaaagttaaattatgatttatataaatataaaatgaatatgtgttaaagattttattttattaattaattaataagtaaattagtaagaaggtaaaatttttttaaaagaaaattggaaaaatagatatatttataggtaattaagaatgtttaaatgaatttgttaataaatgtaaaattggttaatatttttagggtagtaaaatgtagttttttggaatttttttttttattaggtggaaattaattgtagaataagatttatttttatttgtatggatagtaatttatttgaattatttttagttttttataatttatgaaattgtaaaatagtttagttaaagttagtgaaaggtataggtttttatagagttagataattttaaagcgtttgttagatattgtttagtatttgattgaaaggatatttagtagtttttgtattttttttaaaatttttattatattttttgatatttttttttttttataatttgaatatttttatttttttatttttttttggtatattatgtttttttttttttagtgttttttttttaggggaaataatttataattttaaagttttaaagaatgtaacggaagtttaggttttgttttgggttttttagtatttgggtggttagaaatgtagaaaattgggaagaggtgagttgtggatgtttataatataggtttagattgtaattttttagaaatataataatttggattagttaaagagggtttatattattatattaaaatgttagattatttagtttttatagtattattttatatttttatagtatagtattgtttagagagtatttgtcgttatgttttttatgttaatgtttaatatagttttgtgaagtagttcggtgtttgtttttgatttttttatttaagagatttttttattttagagagtaaattaaggtatagaaaagtgagttgtttaaggtagtatattaaaaaggggtagaaatagtatttttatttaggtgttttgaatattgtttagtatttatattttagtatgtatttttgtatttaatttatggggtatttattgagtaaatatagtgtttttataatagaaatattttatgtttttgatttttattttagtttatgtagaagtaaattttaagtgtgaattattaataaagttgatattttatttatatttgttagtaatttgtgttttgtttttgtttatgttttgaggggaaggttaagtagttatttaggtaaaagagttgttgagtggttgaagaatatggaagataattataatttttatatatttttgtatattttagttgaataatgagtgattatatttatttatttagtgttttttttataaggtaataattggtagtttattttattgagaagcgtagataggatgtttattagtagtaattgtttttggttttaatttgtattttatttagtttttttatcgttttgtggttttttggaggaagaatatttataatatatatttggagattgttgttttgtagtgttaatgaaatgtgggggtgggaaaatgttatttaagatttttatataaaatgtttattgttgtttatattttgttatgggaaagtagttatagataatgttttttttttttttattagtattttaagattttttattttagtggaaagatatgatttgatttattttatttattttgtatattaaagtatagtagaatttgttattttttttggaaatgtagtataaggataaagataaattttatattagtttagtaagttttatttagtagtgtgttgaagttgagattgaataaaatatttggtttggttttttgtttaaaattttattttgataaggataatatttttttatatatattagtaggtagtaatgattattttaaagtttttaaagttagatattatatttgtatgttttaatatagttgttgaatttatttttaagatgtatgtaatgtatattttgtattattgagaatgaataaagaaaagttataatgatgttttttagttgtgtaagttaatattaaaatataatttgtttgtatattttatttaataggttttttttattgttatattgtttatttaagtgaataatggaaatgttgttgtttattttaaggatttgtaatatgtttaagattttatagtatagatttttataattaatgaaatattttttttttttttttttagg

SEQ ID NO: 336 - DNA, 15674 bp, Artificial Sequence
  chemically treated genomic DNA (Homo sapiens)
tttggaaaggaaaaagaaaaatgttttattaattatagaagtttgtattgtaagattttaggtatgttataaatttttaagataaatagtaatatttttattgtttatttaagtaaatagtatagtaatgaagaagatttattaggtgaaatatgtaaataaattatattttaatattaatttgtatagttggaaggtattattatgatttttttttatttatttttaataatataaagtatatattatatgtattttgggaataaatttagtaattatgttggaatatgtaggtgtagtatttggttttggaagttttgaagtaattattattgtttattgatatatgtagaaaaatattgtttttattaaggtaaaattttgaatagaaaattaaattaaatattttatttagttttaattttaatatattgttaaatagaatttgttgaattgatatgaaatttatttttatttttatgttgtatttttaaaaaaagtggtaggttttattgtattttaatatataaagtaaataggatgaattaaattatatttttttattaggatggaaaattttaaaatattaatgaggaaaaaaaaaatattatttgtggttatttttttatagtaaaatataggtagtaatagatattttgtatgggagttttgaatgatatttttttatttttatattttattgatattatagaataatagtttttaaatgtatattatgggtattttttttttaagaaattataaaacggtgaaaaagttaagtaagatgtaagttgaaattaagagtagttattgttaataagtattttatttacgttttttaataggataaattattagttgttgttttatagaagaggtattgggtaaataaatgtaattatttattgtttaattaaaatgtataagaatgtgtaggaattgtagttgttttttatattttttagttatttagtaatttttttatttaagtagttatttggttttttttttaaaatataaataaaaataaaatataaattattaataaatataaataaaatattaattttgttaatagtttatatttaagatttatttttatataaattggaataaaaattagaggtatagaatgtttttattgtaagaatattatgtttatttaataaatattttatgaattgaatgtaaggatgtatattggaatataggtattggataatgtttaaaatatttgagtaaaaatattatttttgtttttttttaatatgttgttttaagtaatttatttttttatgttttggtttattttttaaaataggaggattttttaagtaggaggattaaaaataaatatcgggttattttatagaattgtgttgagtattaatatggaaaatatagcggtaagtgttttttaaataatattatgttgtaaaaatgtagggtgatattataaaaattagataatttggtattttaatgtaatgatatgggttttttttgattagtttaaattgttatatttttgggaaattgtagtttgaatttatattgtgggtatttatagtttatttttttttagttttttatatttttagttatttaaatattaggaagtttaaggtaaaatttggattttcgttgtattttttaaaattttggaattgtgaattattttttttgagagagaaatattgagggagagaggatatagtatattagagaagaataaaggggtgaagatgtttaaattataaaggaaggaaagtattagaaaatatggtgaagattttgaaagggatataaagattattgggtatttttttagttaagtgttgggtaatgtttaatagacgttttggaattatttgattttatagaagtttgtgttttttattgattttgattgggttgttttatagttttataagttgtagaaaattgagagtaatttaaatggattgttgtttatatagataaaaataaattttgttttgtaattgatttttatttggtggaagagaggattttaaaagattatattttattgttttgaggatattgattaattttgtatttattagtaaatttatttaggtatttttgattgtttataaatgtgtttgtttttttaatttttttttaaaagggttttgtttttttgttagtttgtttgttaattaattagtgaaataaaatttttgatatatgtttattttatatttgtatgaattatggtttgatttttaagagattatttttaaaaaaaagaggtacgaatgaagaatttagttattttatgaaattttttgtaaaggttttaattaagtaagtaagaagtagttggtgaataatttattattttataatatatgtttagagaatgaatttttaaaggaatatagaaagtaataattatattgtattatttgttataataaaaatattttatagttgaagtaatttaagtagaataaatgttattagtaaaaataatagtaaaattgatttggataaattataatttgaataatttttgtattagtaattaataaataagggtaggttaaaaatattattttagttgttaattataattttaatttttataaagatgtattaaaaaattattaagtagtaaaattgtttgatttggggttttttttttttgtttattttttttttataaaatagtaaagtgaagaaattatttaaaatgtagagagtaaataaagaaatatagataattaatatgaataagaaaattttgaataaataagatatgtttatagtagtttaaattagatagtagtagataaatgtaattaagagtaatgttagagttatagataaattagtaaataaaatgggaaaatgattttatattaaatgttaaaagtattagatttgaaatttttattggaattgtataagtattggtgaatatagattattagtttaaattattttatattatagtttagaaaagagttttgtagtggtagagaagatttaatttatggtggttatagtatataagtttaggttagaaattttaaaaatgtaattaatatttgttaagaattatttgtgatgaaatattgtgataggatgtggggatatagtgatgaaaaaatatagttattattttttaggagtttataatttttaaatgggcgatgataagtatataatataaggttataagtgttattttttttgtatggataacgtttttatggatgggtagaagagtaattggttttatagatttttaagaaaatttatgttgttaataggtaaaaatagaagaatgttatagtttttgttttttcgggtttttaatttttattattttatatattttatgtaaatgttcgtttttttttaataatttttaaattatttttttttgttttttattttatattttttaatagttttttttttttattttttaatataaattgaaatttttagaggagaattttgaagtttttaatattttttttttataaatttatttgtaattttaattatttatattttttttttttttttgtttttttttttgaaatgaattttattatttgaaagttagtttttatttttgtttttatatttattagtttttttaacgattttttttagttgattattagttttttatattttttattttatttataaggtgttgtttttgtgtgtgtttttaaaaattgtttgaatatttgttaatttaaaaaaaattttttatattttttttttttttagtattttaaattaataatttataagtatttttttatttttaatttattttttaaatttgttacgtggtttttatttatttatttttatttttttattattatagtttttgttaaagttattattaattttttgtgaaaaattaaatatgtatggtttattttttgttttgatttttttatagtttttgagttagtgggtagttttttttttgttttttttttttggtttttatggtattttttgattacgaatttttttttgttttgtttattttattttagtttgttttttttgttgaaatttattttttgatttatattaaatgttagtgtttttaagggttttagatttagtattttttgttttttagtattttttttgatttttatggttttttttatttgtaaatttttaaataaaaaattgaattatgtattgttttttttttaaattgtagatgttggatagttaattgtttgttgtgtatttttatttggatgtaatatagttattttaaagttagtatgtttaaaaatttacgtatttttattttttatttttagtttaaattattttgttaaagtattttttattatttattagtgaattagatttggatttaagaattatattagattattttttttttttagttatggagaatttttagtaggtttaatttaattaatagtttttaaatttaatgtttgttgaatgaatgaattagatatttatttttttttttcgaattattgttatatttttttaattagttttttgtttttatttttaaggtttttttattttggttttgatgtattttttatagtttttaaaataattgttttaaatgtaaatgtgtatttttttgtttaagatattttaataatatttttaattttttttaggttaaattttaagtatattagtatggaatataaacgaggttttttaagattttttttagttttattttttgtatttttttatttttatattaagttttaattataatgacgttattgtaattttatgattatgtaaatgtatttttatttttatgttttagtatatattgttttttaaatttaaatagttttttaattgttatatattattattttattgagtatatagggtgtataatagttaagtgtatatattaaggggtcgattttagtttaagatttattttatgtattttttagttgtataattttaggtaagttatttatttttgttttttagtttttttatttataaaatgtgtatagtgatggtatatattttatagagatattgttaagatttaataagataatatgtttttgtattattttttatatatatagtaagtatttaataaatggtagttatagtttgttaatttttgttttttttattaaagtatagttgagttgtttaattttgttttttttttttattattatttaattgtattttttttttttttattgtttttattgttttgtgtttaaatgttgttattgtatttattattgtgtaattattattttatttaattgatttttttaggtttagaaagtaagatattgtttttatttggtattttaagaatttaatatagggtttagaaagtaggatttaatattttttttgtgaatgtaaaaagtttaaagtataaattttatagaagaaaaatttaaaaattatgtgggagaagatagattttttttttgtattttaagagaatttgttattgttttttatttgtatagatttgattatgaaattatgaagttgtatatttttatggaaaattttaagttatttgtatggttggatagaaaagttttttaaaaattataagaatgtgtttatgaatgatttttttagagggtgatgtttaaattgggttttaaaggatgagtaagaatgttatgggaaagaaggggttttttaggtagagtaacgtgtatagttagataaagaaagtgaagaattgaaagtagagaattatttaggtgagttttaggaaatgaggttggaaaagatgaataagaaaaattttaaagggtttttttgaatgttatgttgagtttagatttgataatataaataattgtaaattatttagatttaattttattaaaaaaaaaatattgatagtagtgtaaaggaaggattgagggtagtaagggaaaagagaaagggagattcgttaatagattattgtaatagtttaggtaaagaataattggagagaagatttaaaatttatagtaattaatagaagttagttgtgggaagtaggggagataaagaggggaaaattaaaattgtgaattaaaatagtatgtgtagttagttagatggtaggttaattatagagaaaagaggtttaaatatttggggagaatatttttttatttgttaatggattagtgagatttgatgtatattatgtttgagaaatgagagagaaataagatggttttattaagtatttaaaatatattaagtggtagtgatttttttataataaatttggtagtgtaagaaagtagagaaggtaataattgataatgtgtaggtaggaataagggtaaggatattttggtttttgaggttttttgttttattttttaatatggggtaaaatttgattatgtgtgtaagttacggggaaggagttaatggagagggaaagatttaagatgtaagattgaagaattatgttgattgagtaggtttttaagatggtagaagtgaaaaggtggtagataggttgttttttcgttggaaaagtgagtaggtttttttttgaagttggatgacggaagagaatgagacgaaggttatttaagatgttatagattagtttagtaatggtgggagggaagtagagggagtttaaattatatattattattttttgtagtagagtaggaagttaattatttgttgggaatggatgtttaggaatggagtaagaagttttagtagttttttaggtaaagaagtaaagattattagtaaagatatatgttagaaagtaattttatttatttttgttttttagaattagtgtttggtttgaagaattggagtttttagttatattgggttacgtataaaaaggatgaagttagatttttttttaatggatattaaaataaaggtttggggtagagtggggtgtttataagttgtatttagttttgatttaacgtaatttttttaatgaatttaaaagtggttttataagaatggaagaggttaatttagaattaaaaagggtagggtagtttaaagttaataatatttagaattatggttttaataagtatttaagtattatgagggaataaaaataagatatttttattgtttatatattatattttaagttattaagagatatattgatatattgtttgaaatttgtttatatgttaaagagggttttgtaaattgtttggtgtgtagtataggtttatatttgtttgaaatggaaaaaagtggttttgataggttttgaattagttaaattttttgttttattttttaatttataagtgtgatatatatttaaatatgtatattaatttttttaatttgaattttaaattatgagattgattagattttgagttttatgtaattgttttatggatttggaatgaaatatttagaggtgggtgtagtttgatttttgttttaatattgtataatcgtaaagaggaaaaatttagattttattgttttagtttaggtatattagaattaaattttttgggtgttttgtattttttattttagtattataatgagtttaataaaattgattttatattattatttttgttttttttattatagaagaaatatttatattagtatataaagtgaaagtaattttatgataatttaagacgatattattaaaattagattgagagataagatatgaaaatagaaatgtttattttgtataaaaaggtaggtagaaatttaagatagggaaagtgattgaaaattatgttataaaaagaatattattatattaaaagtaatgtttatatattagttatagttgaatttatattatgaaatgtaaatttagttttgcgaatatgcgtgattattttggatttagaatatgtattaatttggggggaaagttatttattttttatttttagaatttggttttttaaatttttatgaataatttagtgataaagataaaatatttgttaaaatatagatgatagtatgagtaagtgttttaatggtaggtatttagtgtaatgttttaaaaaatattgtttttagattgttggggcggttttataaatacgtatttttaaataggtatttatttttttaaaatggtaatttgtaattaaaaataatatattttttaagagaaaatatttttatttaaataagttaaattattattagatttagacgatggaaaaaaattttatttaattatatgtattttgatttaaaaaaaaaaataatttattttgaataaagaggaattatttaattattgaaaagatagtttataatattattattatttatttaaagttttatttgttagttaataaatattattgaaattatgtatttttaaataaagtataattgtatatgagtgggggtagagtggaatgtaatatagtaatttattttatattttgtatattattaaggtgttttttagtttgtttgtaattgtatgaaatgagtatttgagataattttttttattataaaggttattaatattgtagagggtgttaggaaaggtttttgattttcggggtttaattaacgaaattgaaagtaaaattaaattttaatataaatgaatgtatagatttattatttttttatttattttagattttaaagttagttttttaaatttttggtttataattatttatgtgttgagatatttttttttatatatgtttttttgaagttatatattaaatatatataaaaatatattttataataaatattattttgttttatagtttatatttaatataatttaattgtataatgtttgtattttgttttaatattaggttaatattaattaagtaaaataaaatattataaattttgaattcgatgattttagggattcgaatatattaaaattgtgtgtaaacgagtgttaattatatgatattaattattattaaagaaggtttaatataaattttattatttaaagtattattttaatagttttaaattacgtgatttaaatttaatttatttgttttaaaaatagtatatggtttatattttttattttttaggtagtttgaataaatgatattgtattattttatatttggtttaatatgaaggcgttttgaaattattatgcgattatataatatatttttgaaagtagtattattttagttataatgatagtaaaggtaataagtatattaaacgtgatgataggaaatattaatattaattatttagataacggagatttggatttatagttttaatatttaggatgttcggggagggaggaaagtggtaagtagagatttaagggtattttggaaatatttaaagttataagtttttaggaacggtatatcgaggttaataattagtttaaaatcgaattaatttagtattttagaataaatgtaataattgttgttattggtgtttaagttgaattttgaattttataaaagtttataaaaggttttatggatgtgaagtgtgataggtatttattgtagagttacgaatgtttttattttttgtttagtttttatagacgaagtatacgttttataaaagcgaaatggattttaaaagttcggggtgggggtgggggggtggaggttttttgggttcgaaaaatattaaattttattttgttgtatatgttttgattggaggttattgtttttttattttaggcgaaaattagattatttttaaaacggtttttttaaataaagtgggaaaaattttaacgtataatttagaatgtatgtaagtggttgatggggcgtgagggttacgagaaaggaagagtttttagtaagtttatttttaggattaaaaacgatagtaaaaattatacggtcggaagatttttttgattgaatgttgagttgaaaatgaaatttaattgtgttttttacgtttttttcgtttttatgtttatgtgggaggtaaacggtagaaatttttttttatcgatttcgttaaaatgcgtatttttatcgtaagaggttcgggtttttttatttttttttttttaattttaaatgcgtttaagtattgagaagggagaggggtgcgaaagaaggggatttttagtagttgtagttttttgtttttgatcgcgtttttttttgttagttaatttttgcgcgaggtgcgcggtttggagtttttttgtgtgtgtgtatttggagatggagaatcgggtggaggagatgagtttcgtttttatttagggggaagaagacgattagggaaaggaagggaggaagaaggggggcgttcgatttttcgtggggtttttttacgtttgtatttcgggcgtttagggttcgagtgttttgcgtttcggttattttttttagggcgtcgtcgggttggttggggcgtagtttatacgttcgcgggggcgaagcgatagtagtcgtagggttgggagcgaggagttatttatcgtagtacgtcgagtttagtaatagcgtcgttattaggggttatattttcgcgttcgtcgcggggtcgtcgtcgtcgtcgtaggtgttcggagtagtagtcgtcgtcgtcgttataggtaggatcgatcgtcgtcgcgcgttataggtaggatttattgtttaggttgtacggtcgcgcgtacgcgcgtttttattgtttttcgttcgttttttcgtttgtttttcgttcgcgagagtcgcgtacgcgtattcggtttcgtttcgtaatcgttgttgttgacgcggcgttttttttagtcgtaggttttagattcggggttcgtttgttcgttttacggaggtcggatgtttgttttagggcggtggtacgcgtcgcgtttttaggttacgttttgtcgtattcgttcgtttttggggttcgcgtgttcgttcgtcgtaggaggttgaattttgtgtttttacgttcgtcggggattttattgtattcgtttttgttcgcgggtcggtttttgtttttcgcgcggcgttgggttttattgttttttttttttattttttttttttttgtttttatttttattttcgcgttttaggggtcgggtttcgtttcgttttagttcgcgtttttttttggattcgacgttcggttgcgcgcgtggattaggatatttaggtttttattagcgttcgtttttttcggacgcggtcgtttagcgtcgaagcggtttttgagttcgaggtcgttacgtttagggtagggcggtggtcgggtatttgttcgtagggagtttttattcgtttttcgcgggttttgcgttcggttcgtttattcgttttgtttttttttatgcggttttttttttttttttttatttggttttttagtgtttttattttttgattagggttaattaaataagttttatttacggtggtaaatattgttatttgtgaatatcgttattatcgggattagcgagtattgtcgtaaataggtattagtagcgtatttaatatatttttattagtaaggttattgagtttggtttgtgattgttttatgtgtagttttttgcgttgcgtttgggtttaatatgtttgaaaaatgggttcgaaatgtggtcgtaagttataatagggataaggtttttgaatttatcgttgaattatataggttatattatttattttgaagtaaaagttttttaaagatatttttaatcgttattttaattgatgtatttttttattaaaaagttaggttttggtggttgttttaatggagtgtatattttgtttatttttttgattgttttttttttattttttgggaaagaaagtaattttttattataatattttatttttttaaattttttatatagtgcggttttttttaagtattttattgttatagaaataaaatttagcgtatgaaagtggtattgtttatgatattttgtattagtgtattgtatattatcgagtttttttttgtaattgtttttttgtgtgaattttttttttatagtattattaatttttttaaattcgagagtattttaagtatttttttttttaagattttttattgagttcggtaaatagaaggggtttaataaatgtgttgatgcggcgtgaggtaggtattgttttagtgaaatttgattgtttttttaatgattgaaaaataaaaataattgtttggtagatattttattaaaataatggttaataattatggtggtaatgatttgaatggtagttttgatatttcgaggtaattaaagggatttatcgatttttttttaattgttgtttatgtggatataaaagaattatttattagattttgagtattagggatattgtgtattatagagtagttggttggttaaataaggttgttagttgtttttgatattaattaatttttttaaagttgaagagtgattagaaaggattgtttttaatttttagaggtggagatcgggtgatgttttgttttatattgggagttattgagttatatgtttaacgtttttttgtgtagaaaatggaatgagaggttatttgggtgattattgttgtttttgggaatttagttggggtatgttttggtggtggggtaaaagtaggtatattttaggagagatagtttaaagtagtttgtttaggtttgattattttttttttgagataattttaagttttttttagtatttaattattttaaaggtttgttttttaattttttaaagtattttaatttggatgttgagtttattttatttgtatgtaaggagttttttgggtagagagggaggggataatatatattagaatgttttgaatataggaagtatatattagttatattatttaagttaatttttataataattttagaaaggataaatgttatgatttttttttttgagatgaggaaataaagggaaagaggaatggtgagtattttgtttatagttataagtgatattgtttttttttttgttttttttttttgttttggtttttatttttttttttttttattttataatagtaaagttgttatagttttttttttatagataaataaatttaaaaaaattatttttgttatttttatagataaggaaagtgaggtttggttataagtttagggagggacggtggttggattgaagtttttttgattttatggttagcgaaaaaatttataaatttttttttttaatgtataaaaaattttttttgtttttatttttgttttaacgatatatttatttttatttttttttttatataatattaagattttgttatatagtaggtattgatatgatagtatttttaaatgtttatgtagatataattgtatttttattgtaattttatttagtaaatgttttgttttatggtggtgtgttatgtaacgatatgagatagtgttgttttttggtgttttaaggggttggtttagaattgtatgtgtttatttatttatagtttgtgttttgtgtagggttagatgtattttttaacgtaagggaatataatagtaaaggattttatagtaaattaaggtttatgataatgttagtataagttaagtgtatttttttgtgttttagttttattttggtgtatattagttattattttttattgaaattatgtttatatagttgttttcgtgtttagtaataattgttttttatattgtaagtttaatgaggggagggattatatgagttttttttattgttagtttttttgtttgatatatagtatgtatttaataaatcgttgttaaaagaataaatagaatgagtgaataaatgaatgattgaatgagtaaataaattttttagggttaggaattatatttttaattagtgtttgataaagtatttagtataaaagggtgttgtgtaaatatatgttttattttttattttttgtttgtttgtttgttttgaggtagagtttcgttttgtcgtttaggttggagtgtagtggtatgatttcggtttattgtaagtttcgttttttaggtttacgttatttttttgttttagtttttcgagtagttgggattataggtgttcgttattacgtacggttaattttttgtatttttagtagagatggggttttatcgtgttagttaggatggtttcgattttttgattttatgatttattcgttttggttttttaaagtgttgggattataggcgtgagttatcgtgtttggttaatatatgtgaatgaaattattgaattaattttggagttgatttgatatattagaggtttttagtattattaaatttttaattttgatttattagttattagttggttgtagttttagagtattatttttttttttttagtgtttttgaatatgtgtttttttttgtaattaagattttttatttgttaatatttttggttaatggaatgtaaattaatatttgttgtatggttaggtaatattagtaatattggattattttatgtttggattatgttatttttaggtttttgtgttttaattacgttgtttgttttgttttttataatgtttttttatgtttttttttttgttttttaatttagagaattttagtttattttttaaggttaagattaaatattattttttttaagaagttttttttaattttattttttttttttgttatgattttttattattttataggtttagttattttttttatgatgttttgtttatattgttaataaaatgtgttagtagatatttgtttttatataatagtttttttttttattatattagtttggagaaaatgaaatttgttttgagtatatttgtatgtttgtattagggttttttagagagatagaattaataggatagagagataggtggattggtttatgtgattaaagaggttgagacgtttttcgatagattatttgtaagtttggagatatagggatgttagtagtatggttgtttaaattggagggttttagaattagggaagtttttggtgtattttttattttaaggttgaagatttaagaagttaggaggttattggtgtaagttttagagtttaaaggttggagaatttagagttttgatggttaaggataggacgagaagggtgttttagttttaggagagagagtaagagagttttttttttgtttttttattttatttagatttttagtcggttagatggtgtttatttatattgaaggaggatttttttaatttagtttacgaatttatatgttaatattttttggaaatatttttatagatatatttagaaataatgatttagtatttattttttaatttagttaagttaatatttaaaattaattattataatttttaaagttaaatatagtgtttggtggagatttacgtgtgtcgaattaattaagaaaatttatagtgtggtatgtagtatatagagttattttagtttaggtttgagttataggttaagttatttattatttgttaattttggatatattatttaaattttttgagtatttgtttttttatttgtaaagcgaagatgttaaaaataatataaattaatttttgaatatggtttgagaatgtaataag

SEQ ID NO: 337 - DNA, 6076 bp, Artificial Sequence
  chemically treated genomic DNA (Homo sapiens)
tttattaaattattaatattattttttataggattagaaaaaaattattttaaaatttatatggagttaaaaataaatagttaagataattttaagtaaaaagaataaagttggaagtattatgttatttgattttgaattatattataaggttattataattaaaatagtatggtattgatatagaaatagatgtatagattaatggaatagaatagagagtttagaaataatgttgtatatttataattatttgatttttaataaagttgataaaaataagtaatatggaaaggattttatatttaataaatggtattgggttaattggttatttatatgtagaagattgaaattggattttttttttatattatatattaaaattaatttaagatggattaaattttaaatttgaaatttaaaattttaaaaattttgggaaataatttaggaaatattattttggataaaggttttggtaaagatttgatgatgaagatgttaaaagtaattgtgataaaaataagaattgataaataaggtttaattaaattaaagagtttttgaatagaaagggaaattattaatagagtaaatagatagtttggagtatgggaggaaatatttgtaaattatgtatttgataaaggtttaatatttaaatttataagaaggttaaattaattaataagtaaaaattaaataattttattaaaaagtgagtaaaggatatgaatagatatttgttaaaggaagttatatatgtagttaataggtatatgaaaaaatatttagtatcgttaattattagaaaaatgtaaattaaaattataatgagatattattttatattagttaaaatgtttattattaaaaagttaaaaaataataggtgttggcgaggttttagagtaaagagaatgtttatacgttgttggtgggaatgtaaattagattagttagtgtggaaaatagtttggaaattttttaaagaatataaaatagaattgttttttgatttagtaattttattattgggtatatatttaaaggaatataaattgttttattataaagatatacgtatgtgtatgtttattatagtattttttataataataaagatacggaattaatttaaatgtttattaatgatagattggataaagaaaatgtggtatatatatattatggaatattatgtagttataagaaagaatgagatgatgttttttgtagtaatatggatgtaggtggagggttttattttaagtaatttaatgtaggaagagaaaattaaatattgtatatttttatttataagtgggaatttaatattgagtatatatggacgtaaagaagggaaaaatagatattagggtttatttgagggtggagcggggaaggagggagaggattaaaaaattatttgttggttattatatttattttttgggtgatgaaataatttgtatattaaaattttgttatatgtaatttatttatataataagtttgtatatgtacgtttgaatttaaaatgaaagttaagaatgatgttttatagtattttttttaaaattttatttttagagtttataagtaaaatttaatgtattattagttaattttaattttttatttgaagtttttaattttataatttttataaaatttatgttttttaaattttaatatttttatatatttaaataattttgaaataaatttggaagttttatttgtatttttatattttaatagtgattattttttaataataaaatagaattatttatttagaaggtttttgaaaaaggtttaaatgggggttaaatataaaatgtttatgtgagtatttgtttatttagaatgtattttggtaaatacgattgtatagtagtagagtatttataatttgtattttcgttattcgtttggttaagtttaagttttttaaatttttagattttattattatttatgatggtgattaatatatttcgtattgagaagattaagttatgagtttgagtttttgttaaatgttttttttaatttagtttttttaaagtttttgagcgtttttttgggttatttaataatatggggttttttgatattgttttattttttatttgtttttgtttttgtttttttaaatgaattttaaatatttgatggttagaaatagaattaatttttaataaaattttataggtatgggtataagtgggtacgttgttttttattaaatttttaaatttaggaaatagttatttttagttgttcggtatttggaataattttttttagtgaaatgatggaaagaggtatatttaaggaaaaatgttttgtattaaaatggttatttattttgttgtgaataatttgttttgagatagttttttcgatatttttaagatttttttttatttattatttttttttttgtagatgtttagtttatttattttttttttttttttattttttttgtttgttttaaatttttggtttttttaatttgtaggttttatattatttgaaattatttaaatatttatagaatattttttatgtgttagatttaatattaggtattaaaaatatagttatgagtaagattatttaatatatatagagtaatatagaatttatagagtttttagtttagtggggaaaataatgaaaaataaggaatgatagagggtggaggaatgtttgtgggtaatgggagtagagagtaggagtaattgtttttgtttggagggttttttggtgttatgatgggggatgagtaaggaattaagtgaataggtgagaggatattttagagagagttcgtgagatagaattagattgatttgtttaagtaattaaaaggaattttatatttagtgttatttagtgtgaggagattttgggggtggggtcggggaagaaatagtcggttgagagttttaagttggggagttatgtgattaaatttgtattttagaaggttttttttttttttttttgaggatagattgaagaaatatttaaggtggttttgaaggatattgggattttgtaatataggtaaaagataaagattaatgtaatttttatggggttggagagaggtggtttggtttgagaaatatttaggtaaaagtataattgataggatttggtggttgataataggtggtggtgtgggagagagagtagtttaagaggatatttggttttttatgaacgtggttgaaaggttagttaggttttttttggatggtggatatggtgggaggagtaggtttgagtgtggggatgttaagttaattaaattgaagttggatattggatttgaggtgtttgggagagagtggagtttaaaggagagattatggtatttatatagatttgtgaatttttggaatagatagatagtaattagagttattagaatgggtgagataattaggaaaatatgagtttagttagaagtttttttttagttttattattttagggatttgtaagtatggtagtagttttgagtgagggttagtgattttagtcgaggtgtagagattttttaatagtattttttaaagtgtagttatattgaaaaattgttttttaagagaaattatatatatatatatatatatatatatatatatattatatagttttatgtttagataagtttggagaaatttatatattattttttttgtttagagaatattaaggattgataagttttgtagtaaagatttttttatttttatttaatttagttttttttataagatagttttggttggagattattttggatttgaatgttttagggtgaaggaagcgggagatagttagtttttttagaggtatgttcgtaagttagtatcgtagagtgtatttatttgtttatttataagatgaaaatattggggtttagtgattgtttttaagttttatagttagttagtgatatatttgggttgttatatatttttttgatttaatttaagaaaattttagtgatgtagtatagtgaaattagaaatatattttttaaaatatattgattatagtgttttttaaaaggttttttttgtgattttgaattttaattttatttttgatatgttttagttgtatgagtttgggtaaattttttaatttttttgagcgtttgtttttttgtatataaataaggatgtaatagtaattagtaggattattattaggtgttattattaataaattgaggttgatagattgagatttgtttaagattttatagttaaaagagataaagttggaattgaaatttagatttttggttttaaatgtggtgttttttgtattaattaaattatttttattagtgtttttgggattatgttttggggatttattttaagatagttttgttttcgagatagagaagtttgtaaatggtgtttaatttaagtttagagattggttgaagttagatagagggagtatgaggagggggtagagaatttttagaaagatattttaaagtttcgggtttagaaaatgtttagaaatattggtttttgtgtttttttttagtttgtttatttgaatgggaaattggtggtggggttaggtatatttttttttgaataaatatatagttaattttgagatgttattttgattgagaagtattgtttttttttaagtaaaaattattgttaaattattttagaatttattattgtttatagatttgtgtttgaattaatttggttttgaagtttttttttgttttataaaattagtttagggtgggttgtgagaggaagtttttaaaaagttattgggaaagtattaaatttttgagattaaagagggcggatttagttttattttttttttttttttatttgggttttttgtcgttatagtatgattatatttttttattttttatttttttttttatataaatagtttcggatatttgtgttattagttttgtttcggttattttaaggataattattaaattttgtcgaaaggattgaggaacggtgtttggaaaaggtaaggttgatgacgttttaatttggtttgttgtttaatgtggggtagggcgtatttttaggggtttttatatatttttttagtaattataaaattttcggtaattttttttttataaatatttagtgtataaagtaaaatagattagtaagattttagtaatatttttaaaggtaattaggttagaaatatttttatttaattaggtttttattatttaaatttttgagtcgaggtatttatatgttttaattgttttagagtttgaattattttgtgtagtaatttttgatgtttggagttttttatgcgagatgatattggggagattttttatgtgttttggtttttagaaaattggttttgtgattttaaagtgaggaaagaatttatagttagagttgtttttagaaagatagttagaagatatagtttttttttatttgagaaaattttaaaagtaaatttagtgatttttattgtggttttttaaagttattaaatagaaaggtggttaaaaattaaaatattaggatgtgtttagtaattgtattttaaaaggtgaaagttagatatttttaaaggatgtatagattgttggtttttaaggagtaggaagtatattgggatttttagtatttttttaaattatttttggtgtataaaatatgattattgataaatgttatatgaaatgtacgtataaaatgtaatttttaaaatttgatattgtagtaatttttaattatgtgttgtaattaatgattgaggttgtatggatttagtaaagtgttagtagagtttcggttttgattttttgtgattattatcggaaattttatgtaagagttttttttttttaagatttgtgagaattttatttgattatgttttggagtagaaaggagaaagttttttttgattatatttatttatttaagtatgaggattgggaatagggtagagggttttagatttttaagaggggtggggacgggga

SEQ ID NO: 338 - DNA, 6076 bp, Artificial Sequence
  chemically treated genomic DNA (Homo sapiens)
ttttcgtttttattttttttggaaatttagagttttttgttttgtttttaatttttatatttagatgggtgggtgtaattaaagagaatttttttttttttgttttagggtataattaagtgaaatttttataggttttggaagaagaaagtttttatatagagttttcgatggtggttatagagagttaggatcgaagttttgttaatattttgttgagtttatgtaattttagttattagttatagtatatgattggaaattattgtagtattaagttttggggattgtattttatacgtgtattttatgtgatatttattagtggttatgttttgtatattaaggataatttggggaaatgttgaggattttaatgtgttttttgttttttaaaagttaataatttatgtattttttagagatgtttagtttttattttttaaaatatagttattgagtatattttggtgttttgatttttagttatttttttatttagtggttttgaagaattatagtgggagttattaaatttatttttgaaatttttttaaatgaaaaagaattgtgttttttagttgtttttttaaagatagttttggttgtgggttttttttttattttaaaattataagattaattttttgaagattagagtatataggaaatttttttaatgttatttcgtatagaaagttttaggtattaggaattattatatagagtaatttaagttttgaagtaattaaggtatgtgaatgtttcgatttagagatttagataatgggaatttgattaagtaaaagtatttttggtttgattgtttttggggatgttattaggattttgttaatttgttttattttgtgtattaaatatttgtgaaagagaagttgtcggagattttatggttattagagaggtatatggagatttttaagaatacgttttattttatattagatagtaagttaagttaaaacgttattaattttattttttttaggtatcgttttttagttttttcggtagaatttagtgattatttttgaggtggtcgagataaggttggtaatatagatattcggggttatttgtgtaaaaggagaagtgaagggtgaaaaaatatgattatgttgtgacgataggaagtttagatgagaagaaggaggaagtgaggttgagttcgttttttttagttttagagatttagtatttttttagtggttttttagaagtttttttttatagtttattttaaattagttttgtgaaataaaagaaaattttaaaattaagttggtttaggtatagatttgtgagtagtggtggattttagggtaatttggtaatgatttttgtttagaaaaggatagtgttttttaattaaggtggtattttagaattaattgtgtatttgtttaaaaagaagtatgtttggttttattattagttttttatttaggtagatagattggaggggaatataggaattaatatttttaaatattttttaggttcgagattttggaatgtttttttgaagattttttgttttttttttatattttttttgtttggttttagttagtttttagatttgaattggatattatttgtagatttttttgtttcgagagtaagattgttttaaggtgagtttttaaggtataattttaggggtattggtagaaatgatttggttagtataggaaatattatatttggagttaaagatttgagttttagttttagttttattttttttagttgtgagattttgagtaagttttaatttgttagttttagtttattaatggtaatatttaataataattttattggttattgttatatttttatttatatataagaaaataggcgtttaaagaggttagaaaatttgtttaagtttatataattaagatatgttagaggtaggattaaaatttaaggttatagagaaggttttttgagaaatattgtgattaatatattttgaaaaatgtgtttttggttttattatgttgtattattggaatttttttagattgggttaaaggagtatgtgataatttaaatgtattattagttaattatgaaatttggaagtaattattgggttttaatgtttttattttataaatgaatagatagatgtattttgcggtgttgatttgcgggtatgtttttgggaaagttagttgtttttcgttttttttattttgagatatttagatttagagtaatttttagttagggttgttttgtggggaaaattgaattaaatgaaggtaaaaaggtttttattgtagaatttgttagtttttaatattttttaagtaggggaaataatatatagatttttttaaatttatttgagtatggaattgtgtggtgtgtgtgtgtgtgtgtgtgtgtgtgtgtgtgtagttttttttggggaataattttttagtgtaattatattttagggaatgttattaaaaagtttttgtatttcggttggaattattgatttttatttagagttgttgttatgtttataggtttttgaagtggtggggttgaggagaggtttttggttgaatttatatttttttaattattttatttattttgatggttttaattattatttgtttgttttaaagatttataaatttatatagatgttatgattttttttttgagttttatttttttttaggtattttaaatttaatatttaattttagtttgattaatttggtatttttatatttaagtttgttttttttattatgtttattatttaggaaaggtttgattggttttttagttacgtttatgagaaattaggtgtttttttaagttatttttttttttatattattatttattattagttattaagttttgttagttatgtttttgtttaaatattttttaaattagattatttttttttaattttatagaaattatattagtttttattttttatttgtgttataggattttagtgttttttaagattattttggatgtttttttagtttgtttttaggaagaagggaggagagttttttaaaatgtaaatttaattatatgattttttagtttaaaatttttagtcggttatttttttttcggttttatttttaagatttttttatattgggtaatattggatatggaattttttttagttgtttaaataaattaatttagttttgttttacgagttttttttagaatatttttttatttgtttatttaattttttatttattttttattatagtattagaaagttttttaggtaggaatagttatttttgttttttgtttttattgtttataggtatttttttattttttgttattttttgttttttattgttttttttattagattgaaagttttgtaggttttgtgttattttgtgtatgttgggtgattttgtttatgattgtatttttagtgtttggtattgggtttggtatataagaggtgttttataaatatttgaatagttttaggtaatgtgaggtttgtaagttaggggaattagaaatttgggataggtagagagagtaaggagaagaaagagataggtagattgaatatttgtagagagagaagtgataaataagggggaattttaggaatatcgggaagattattttaagataaattgtttatagtaaaataggtgattattttaatgtagaatatttttttttgaatgtgtttttttttattattttattgggaagggttgttttaagtgtcggataattagaggtggttgttttttgggtttaggggtttggtagagaataacgtgtttatttatatttatatttataaaattttattgagaattaattttgtttttgattattagatatttagaatttatttggagggataagaataaaaataaatagagaataagataatattaggaaattttatgttattgaataatttaaaagaacgtttaaaaattttgaaaaaattaaattagaaaaggtatttagtagaagtttagatttatggtttggtttttttaatacggggtatattgattattattatagatgataatagaatttgagagtttaggaaatttgaatttggttagacgaatagcgggaatataaattatgagtattttattattgtgtagtcgtatttgttaaaatatattttgaatagataaatatttatatagatattttgtatttagtttttatttaggttttttttaaaagttttttaagtgagtagttttgttttattattggaagataattattgttgaaatatgagaatatagatagaatttttaagtttattttagagttatttaagtatataaggatattagagtttaagaggtatagattttgtgagaattataagattggaaattttaaatgggagattaaagttaattagtagtatattggattttgtttatgggttttaagagtaaagttttgaagaaaatgttgtagaatattatttttaatttttattttaggtttaaacgtatatatgtaggtttattatataggtaaattgtatgtgatagggttttggtgtatagattattttattatttagggggtaagtatagtgattaataggtagttttttaatttttttttttttttttcgttttatttttaagtaggttttagtgtttgttttttttttttttgcgtttatgtgtatttagtgttgagtttttatttataagtgagaatatgtaatatttggttttttttttttgtattaaattgtttaggataaggttttttatttgtatttatgttgttgtaaagaatattattttatttttttttatgattgtatagtattttatggtgtatatgtattatattttttttatttagtttattattgatgggtatttagattgatttcgtgtttttgttattgtaaagagtgttatgatgaatatatatatgcgtgtgtttttatgatagaataatttgtatttttttagatatgtatttagtaatgggattgttgggttaaaaggtagttttgttttatgttttttgagaaatttttaaattgttttttatattggttaatttaatttatatttttattaatagcgtataagtattttttttattttgaaatttcgttaatatttgttattttttggttttttaataataggtattttgattggtgtgagatggtattttattgtggttttgatttgtatttttttaataattagcgatgttgagtatttttttatatgtttgttggttatatgtgtgattttttttgataaatgtttatttatgttttttgtttattttttaatggagttgtttggtttttgtttgttaattagtttaatttttttatagatttggatattagatttttgttagatatatagtttgtagatatttttttttatgttttaggttgtttatttattttgttgatagtttttttttttgtttagaagttttttggtttaattaggttttatttattaatttttgtttttgttataattgtttttggtatttttattattaagtttttattagggtttttgtttagaatggtattttttaggttattttttagggtttttaaagttttaggttttagatttaaaatttaatttattttgagttgattttggtatatggtataaggaaggggtttagttttaattttttgtatatggatagttagttagtttagtattatttattgagtatggagttttttttatattgtttgtttttgttagttttgttgaagattagatggttgtaggtgtgtagtattatttttgggttttttattttgttttattggtttatgtatttgtttttgtattagtattatgttgttttggttatgatagttttgtagtatagtttaaagttaggtaatatgatgtttttagttttgttttttttgtttaggattattttggttatttgtttttagttttatatgaattttaaaatagtttttttttagttttgtgaagaatagtgttggtagtttgatagg

SEQ ID NO: 339 - DNA, 6071 bp, Artificial Sequence
  chemically treated genomic DNA (Homo sapiens)
ttttgtttgtttagttttagtagattgtgattataaggtattgtttgtgggatttttttttttttttttttgattttttttgtggttttaggttgtttggttgtttattgttatggtggttttttattttaacgttttttgagttttatgatggttggtgttattttgtttttttatattgttgggttaggtgttgtttgttttttttagggtattattaattgtaaatatttttttttgttttttttatgaagatgtttttatatttttgtttttttatatttttttggttaagtatgttattttttttattttgggaatttatattttgaattttaagagggggttatagtttggaaaaagttattagggattttggaattaagtttgataaaagattttagtgaagttttgttttgagaacgagtagattgtaggggaggttatgggattttttaggttagtgtttgtgttgattttttaagggtttgtaggtatgtaggtggtttgggttgttcggtagatattttgttgatttttagttgaggggagtatggtggcgattgtttagttattttttgatagatatatagatttgtttttttttttttaagtatatcgtatttttttgtgagatagtgtgtgtaggtattattattttaattttgttgttgtttgatatgttgatttttatttattatgttgtattaatatattagaggtataggagcggtttagttatgaaaaaagaaggttttttgttttatttttttattttagagatgtgggtttttagtgggaatttgttgatttttattttataggttgagttaatgagggaagatgattggcgttttttttgtttaaatgggaggttgttagagcgttggttgggattaggatgtgtaattaagattttagtttgaaattttagattttagtttacggcgataaagaagtaggtgttgtatataaatatgtaaagtaattgtaggaaatttgaaaggaaaaaaagaaatcgaagttagtattttaataattgttttttttgtgtattttgtattgggttgggggatagtattaaaggttgaattttttgagttttttatgaaaaattttaggattttttttttttggttatttttatggaaatgcgatgttagatggatggtaatggtgttttttagtggttgtgagattttattgcgtattgtttattggagttttagttttttgagacggaggaaaattgttgaatattttggatttatttatgtttataatgttgtatttatgaaaaattatattgtgttaggcgtattttaggatatgaatatgattatatttttttttatcgggtgtttttgtagtaagtttttatattttttttaaataatggtttttttgcgttaattattgaggaaaaaaaaagatggggtaagaaaattatttatgtatgatgtagagagttgttgatttgtttttgtttttttaaaggaaaattatttgtaagatgttgtattaaaatattttatatatattttagagatttgtagtaaattatgttgaaaatacggttgtttatatttattgtagttttttatttttttttttttttattaattagttttttttttttgtggaattgtgttgtgggagtttatagttttgtttttggtattggtttgttaggtttaaggtttgtgaattgtagtttttattattatattttataatttttaaatgataaaaatattttttttttaagatattttattgttatttgttgtaatatatagtaaatagatatttttatttcgatgattaaggttatgttatttttagagttgtgtaatatataatatatttagtttttgaaagttaggtttagaatgtagattttataatttgtagcgtttttgttggggggtggggtgggggtagaagtcggatgagaaggagagtaggaatataggatggttttttttagggtttttgcggtaagtttatattatttttttttaattatgaagtgttgttttggttatgaaatgtagcggggattttttagaatggtgataaaagtaggagttgtgtattttagttaagtgagattgtatagcgtattggtttttgtttttttttttagtgttgggaggggtttatatttgtaaattgagaagaatgttagaatgattaaaattatagtagtgatacgtgattagttagaatttatttataattttttaaaatttatagaatatgtaaaaaggaattagatagtaagaagtagagggagatattttttttttttttttttttttaaatttaagatttttaaaagttttcgtgtgtgtttttttttgtttttagaattattggttgtatttttattaattttttgtagttgttggtttggttaggagttgaaaatgtgattgttttttttttgggtatttataatggttttatgttaagttttatgtataattttttttaatttttttttaatgttttttttttgttagggtatgttttaaaaagggaaatagagtattatggaataagattatttttttatgtttttcgtgtaaatttaattagtatttatataaatgaatgtatgtttttttatgaggtatgtaatgaaaatgataatttgtatttatgtaggattgagtagtgttttgtttattatattttgggatttttaagttttgtgggagtagttttaaaggtttggtagaaacgagagttaagatattagagagtggtatgttaggaagaatagtttcggtttttttagttgttttttttttttatttttttatttatgattatttatagtgataagaagataaaattggattttgtaatattagttatagtatgaaaaatatatttatttttttttttgatagtaggtttttagtatgtaaagggaatttttttggttgtttgtttaacgtattgtaggtttagtatttttgagttgtttttgatttataaaattaattaggtatttgagggtttttaaaagtgtttgatggatagtattttttttaatgaaagagtaggtattgttttttggttaaaggagagtttaattaaggaagtttaatgagttattttttatttaatatttggagattatgatttgggggtgaggggtttttttagttttatgtgattgggttgttttttttttagttttgtttttaaggggtttaatagtttttgttggtagtttaaatggttgtatagttgttagtttaaaagttttattattatatttcgtttttgtatgaagggataagagtagaggtattggatatggttttagttggattttaagttttgttttttattgtgtgttttgagtaatttattttttttaggtattagtttttttatttgtaaaaataatagtagtagtaagattaagttaatttaagtaatgtattttatatagggtttgtttaatagatgtttgttgttatattattttttagtttaaaaattttttgtggttttttagtgtttgaaggtttaattttattttgtttttttaagttggtttgagtttttattagtttagggtagagaatatttgatttttttatattttatgttatatattgtttttgttttgtgtttttagtatttatagatggtagggaatatttcgagatagtaggtttgtggtagagggtattggttttagaagttttattgatagagatattttttaagattttatggttaatttaagaaataatttatgtttttttgtaatatggtttaagtgttttgagtgatttcgagtttttatttggggataatggaggtgaagtagtaagaaagtatatttttatttagttttataatttgtattatgtatgtgttggtggttatttgggtagtagggagttttgtttatggaaatggatttttgtttatataataattaagagttttgtgaatttttttagttgggtaggggtaattttggtgtttttgtttgtaagaaaggggatagatagggaggttgatgtgaggagttggttttgggaatagggttatttgttttgggatatagggatgtgaggggagggttagtttaatttagattgatgaagagcggggagagtgatgagtgtttgttttagtttgggttggatggatgtggggaggttgggtagtgagggagatgtggatttgatattttagtttgagggaaagtttcggttgagatgggggaagatagaaaaagaggaatttgagaagggagaaattaaaggttggaaattttagtttcggggataagggagtatggggacgggggaggtttgttttaggtaattttacgtttaatagttgtttaaaatgttttttttttttgttatgtttgaggaaaagtggtttaaagaggtcgtttgatgcgggattatatagcgttgaagggatgaggggtttcgggtgttttcgttcgttttgttgtttttttcggtggttttttgggagttatagtttcgtttagttacggaggggtttatagtacgttttaaacgttaaggggaagcgcgggaggtgcggtaggaaggtagagaaatttggtttttaaaattaagttatttttaaggaaagaattttttattttaaaattttggtttttaaaattaagttatttttaaggaaagaattttttatttaaaaatagcgtatggaatggcggcggaatgacgggagggatcgagttgggggattggacggcgtttcggggatataggaaggaggcgcgtagagtcgaggttagaggcgcgttcggggagtggaagcgcgaagataaacgcggcgtcgcggagggtgggggaggaagggtcggggcgggtcgtcggttgttagtttagggcggggcggagttttatttttggtcgatcgcgtaggcggtgtttgaatttagggttgtttgtggttgggtattcgcgtagaggtcggttcgacgagttatggttgttgggagcgacgcggggcgggttttgggggtttttagcgtggtttgtttgttgtattgttttggtgagtgaagtttgttttaggggtttcgcgtcggtcggcgggtattgggtagtatttaggttgggtggacgcgtcgggttcgaggcggttgtcgattagagacgggtggggacgggtcgttgtgggtcgggaataatttagtcgtgggagtttttttaggaagagaaagttgttattttatcgttagtgttttttatggagttagtaaggaattgtgtggttttagggaaggacgggtttcggttcgttagttttttttgcggggtttgcgttttttcgtcggttttttttcgagttttagtgattaagtttttttttgggtttttttagtaacgtcgttgagcgttttagcggattgtaaaattttttttagtcgtgaacgcgttcgggacggggagcgggcgcggatgttatttgttcgagggcgacgtttgttgtttttttcgcgcggtgtcgttttcgttcgcgcggcgttcgtcgtattagtagagaggattttttagaatcgttttatagcgaggagcgggtaggtaattaggaagtttagtcggtagcggttttacgttgggatttttaagtggtgcgatttttgttttttttttttttttttaaattttaaaaattagtattagaattggttttatttttttcgtgtgttgttagttaagtcgttataataattttaggaaataggtttttttttttttattttgtttttttatttttttttattttttatatattggttttagttaggttatagtaaaatttcgggagtatagtagtaattttttagcgagtttaattgtatttgaggggtttttatggttggtttttgtattttattgttagttttttagttcgttcgttcgtttgtttagcgttcgttgtttgttcgggaggtgcgcgtgtgtatttatggaagatagttaagggggaggggttgagatagatttaaaagtattcgtacgattagataagttagtgttgta

SEQ ID NO: 340 - DNA, 6071 bp, Artificial Sequence
  chemically treated genomic DNA (Homo sapiens)
tataatattgatttatttgatcgtgcgggtatttttgagtttattttaattttttttttttggttgttttttatagatgtatacgcgtatttttcgggtaggtagcggacgttgagtaaacggacggacgggttggagggttggtagtggggtgtaggagttagttatgagaattttttaagtatagttgaattcgttgggaggttattgttgtattttcggggttttgttatggtttgattggggttaatgtgtggagggtgaaggaggatggggaggtaaaatgggaagaaggggatttattttttgaggttgttgtgacgatttggttgataatatacggagaggatggaattagttttgatattagtttttaggatttgaggggaggaaaaaggagtaggagtcgtattatttaggaattttaacgtgaggtcgttgtcgattgggttttttagttgtttattcgtttttcgttgtggggcgattttgaaaagttttttttgttgatacggcggacgtcgcgcgggcggggacggtatcgcgcggggagggtagtaggcgtcgttttcgagtaggtggtattcgcgttcgtttttcgtttcgggcgcgtttacggttgggaaaaattttgtagttcgttgaagcgtttagcgacgttattggggaagtttaggaaggaatttggttattggagttcgggagggggtcggcgggggggcgtaggtttcgtaggagaggttagcgggtcggagttcgtttttttttaaggttatatagttttttgttgattttatgagggatattggcgatgaaataataattttttttttttgaaaaggtttttacggttgagttgttttcggtttatagcgattcgtttttattcgtttttgatcggtaatcgtttcgagttcggcgcgtttatttagtttgggtgttgtttagtattcgtcggtcggcgcggggtttttggggtaggttttatttattaaagtagtgtagtaggtagattacgttgaggatttttagggttcgtttcgcgtcgtttttagtaattatggttcgtcgggtcggtttttgcgcgagtgtttagttataagtagttttaagtttaagtatcgtttacgcggtcggttagaagtagggtttcgtttcgttttgggttggtagtcggcggttcgtttcggtttttttttttttatttttcgcggcgtcgcgtttgttttcgcgtttttatttttcgggcgcgtttttggtttcggttttgcgcgttttttttttgtgttttcggggcgtcgtttagttttttagttcggtttttttcgttatttcgtcgttattttatacgttatttttaagtaagaaattttttttttgaaaatggtttggttttaaaaattaaggttttaaagtaagaaattttttttttgaaaatggtttggttttaaaaattaggtttttttgtttttttatcgtatttttcgcgtttttttttagcgtttggggcgtgttgtaggttttttcgtggttagacggggttgtggtttttagagagttatcggaggaggtagtaggacgggcgggagtattcggggttttttatttttttagcgttgtgtgatttcgtattagacggtttttttgaattatttttttttaaatatgataaggaaagggagtattttagataattgttaggcgtagggttatttgaggtaggtttttttcgtttttatatttttttattttcggagttgggatttttagtttttggtttttttttttttagatttttttttttttgtttttttttattttaatcgggatttttttttaggttgagatgttagatttatattttttttattgtttagtttttttatatttatttagtttaagttgaggtaggtatttattatttttttcgttttttattagtttggattgagttggttttttttttatatttttatattttagaataaatgattttatttttagaattagttttttatattagtttttttgtttgtttttttttttgtagatagaagtattagagttgtttttgtttagttgagggagtttatagaatttttagttattatgtgagtaggaatttatttttatgaataggattttttgttgtttaaataattattaatatatatatggtgtaggttgtgaaattgagtgggaatgtgtttttttgttgttttatttttattatttttaggtggggattcgaagttatttaagatatttgaattatattgtaaagagatatgaattattttttaagttagttataaaattttaaaaggtatttttattagtgaaatttttgggattaatgttttttattataaatttgttatttcgagatattttttattatttgtagatattgggaatataaggtaggggtagtgtgtaatataaaatatgaggaaattaagtgttttttgttttgggttggtaggaatttaggttaatttagaaaggtaggatggggttagatttttagatattggggagttatagaaagtttttgagttgggaagtgatatgatagtaaatatttattgagtaggttttgtgtgaagtgtattgtttggattaatttagttttattgttgttgttgtttttgtaaatgaggaaattgatgtttggggaaggtaaattatttagggtatatagtaaagggtagaatttggagtttagttgaggttatgtttaatgtttttatttttatttttttatataggaacgggatatgataatgggatttttggattgatagttatgtagttatttggattgttagtaagagttgttaagttttttaagagtagggttgaggaaagaatagtttagttatatggggttggggaagttttttatttttaggttatggtttttaggtattgggtgaggaataatttattaggtttttttggttggatttttttttgattaaggagtagtgtttgtttttttattgagagaaatgttgtttattaagtatttttagaagtttttaaatgtttggttaattttatgaattaaaagtagtttaggaatgttggatttgtaatgcgttaagtaggtagttaaaaagattttttttatatattgagaatttgttattaaaaggaggggtggatgtattttttatgttgtgattagtattgtaaggtttagttttatttttttgttattgtagataattatggatgagaaagtaagaaaagagggtagttgaagaggtcggggttgttttttttagtatgttattttttggtgttttgattttcgtttttgttaaatttttggaattatttttataaagtttaggaattttagaatgtagtgagtaaaatattgtttaattttgtataaatgtaaattgttatttttattgtatgttttatgagggaatatatatttatttatataaatattggttggatttgtacgaaggatatagaagggtaattttattttataatattttatttttttttttaaaatatattttggtagaaaaagaatattagaaaaaaattaggaaaaattatatataagatttaatatggaattattatgggtatttaagggagaggtagttatatttttaatttttggttaagttagtagttgtaaggagttgataaggatgtagttaatggttttgggagtagaggaaagtatatacgaaagtttttgaaagttttggatttagaaaaagaagaaaaaaagaagtgtttttttttgttttttattatttagtttttttttgtatattttatgaattttaaagaattatagatgggttttgattaattacgtattattgttatggttttaattattttaatattttttttaatttgtagatgtaaattttttttaatattggaagaggaaatagagattagtgcgttgtgtagttttatttaattagaatgtataatttttgtttttattattattttgggaaattttcgttgtattttatggttagggtagtattttatagttggaaaaggatggtgtggatttgtcgtagaggttttagagaaggttattttgtgtttttgtttttttttttattcggtttttatttttattttattttttaataaaaacgttataggttataagatttatattttgaatttggtttttaggggttaggtgtgttgtgtgttgtatagttttagaggtagtatagttttgattatcggggtggaggtgtttatttattatatgttgtagtagatggtagtgaagtgttttgaggaagaggtgtttttattatttgaaggttatggggtgtaataataaagattgtaatttatagattttgagtttagtaggttaatgttaagggtagaattgtaggtttttatagtatagttttatagaggaagggggttggttagtaaggggaaagaaggatagaagattgtagtaaatgtaaatagtcgtatttttaatataatttattataggtttttgaagtgtatataaaatgttttagtgtaatattttataaatagtttttttttaaaaaaatagaaataaattaatagttttttatattatgtatgggtagtttttttattttatttttttttttttttaataattaacgtagagaaattattgtttgaaaagaatatgaaaatttgttatagaaatattcggtgaaagagggtgtggttatatttatgttttagaatgcgtttagtatagtgtagttttttataaatgtaatattgtagatatagatgaatttagagtatttagtagttttttttcgttttagaagattaaagttttagtagataatgcgtaatgaggttttatagttattggagggtattattattatttatttgatatcgtatttttatagaaatggttaaagaaagaaggttttggggttttttatagaaagtttaaaaagtttaatttttgatgttattttttagtttaatataaaatatatagaaaaagtaattattaaaatattggtttcggtttttttttttttttttaaattttttataattgttttatatatttgtgtgtagtatttatttttttatcgtcgtgaattgaaatttaagattttaaattgaaattttagttatatattttagttttagttagcgttttggtaattttttatttagatagaggaaacgttagttatttttttttattgatttagtttataaagtaggagttagtaaatttttattgaaagtttatatttttgaaataaagaaatggggtaaaagattttttttttttatgattgagtcgtttttgtatttttaatgtgttgatgtagtataataaatgagaattagtatgttaggtaatagtaggattaaggtggtggtgtttgtatatattgttttataggagggtacggtatatttgggggagaaaaggtaggtttgtgtgtttgttagaaaatggttgagtaatcgttattatgttttttttagttgggaattagtaaagtatttgtcgagtagtttaggttatttgtatatttgtagatttttgaaggattagtatagatattggtttggggaattttatggttttttttgtagtttgttcgtttttagaatagggttttattggaattttttattagatttagttttagaatttttgatgattttttttaaattgtgatttttttttgggatttaggatgtaagtttttagagtaaaggagatggtatgtttggttagaaaaatatgggaaagtaagggtataagaatatttttataaagggagtaaaaggaaatatttgtaattgatgatgttttaagaaggataagtagtatttggtttaatagtgtaaaagaatagggtgatattagttattatggggtttaaggggcgttaaaataaaaagttattataataatgaataattaaataatttagaattataagagagattaagaaagggaaaggaaaaattttatagataatgttttgtgattatagtttgttgagattaggtaaatagaa

SEQ ID NO: 341 - DNA, 9997 bp, Artificial Sequence
  chemically treated genomic DNA (Homo sapiens)
gaattttgttgaaggcgttttttgtgtttattgagataattatgtggtttttgtcgttggttttgtttatgtgatggattatgtttattgatttgtatatgttgaattagttttgtattttagggatgaagtcgatttgattgtggtgaatgagttttttgatgtgttgttggatttagtttgttagtattttattgaggatttttatatagatgtttattagggatattggtttaaaattttgttgttgttgtgtttttgttaggtttcggtgttaagatgatgttggttttataaaatgagttagggaggattttttttttttttattgattggaatagttttagaaggaatggtattagtttttttttgtatttttggtagaatttagttattaatttatttggttttggattttttttggttggtaggttattaattattgttttaattttagaatttgttattggtttgtttagagattcgatttttttttggtttagttttgggagggtgtatgtgtttaggaatttatttattttttttagattttttagtttatttgcgtagaagtgtttatagtattttttgatggtagtttgtatttttgtgggattggtagtgatattttttttattattttttattgcgtttatttgatttttttttttttttttttttattagtttggttaatagtttattttgttgatttttttaaaaaattagtttttggatttattgattttttgaagggttttttgtatttttattttttttatatttgttttgattttagttattttttgtcgtttgttagtttttgaatttgtttgtttttgtttttttagtttttttaattgtgatgttagggtgttaattttagattttttttgtttttttttgtgggtatttagtgttataaatttttttttatatattgttttaaatgtgttttagagattttggtacgtcgtgtttttgtttttattggttttaaagaatatttttatgtttgtttttatttcgttatttatttagtaatttaggagtaggttgtttagtttttatgtagttgtgcggttttgagtgggttttttaattttgagttttaatttgattgtattgtgttttgagagatagtttgttgtgatttttgtttttttatatttgttgaggagtgttttatttttaattatgtggttaattttagaataattattatgcggtgttaagaagaatgtatattttgttgatttgggatggagagttttgtagatgtttgttaggtttatttggtttagagttgagtttaagttttggatatttttgttaattttttgttttttgatttgtttaatattgatagtggggtgttaaagttttttattattattgtgtggaaatttaagtttttttgtaggtttttaagaatttgttttatgcgtttaggtgtttttgtgttgggtgtatatatatttaggatagttagttttttttgttgtattgatttttttattattatgtaatgtttttttttattttttttgatttttgttggtttaaagttttttattagagattaggattgtaatttttgttttttttgttttttatttgtttggtagattttaatttattgtgagtagttttttacgtttattattttttttggttatgcggttttttattatggaagtgtattatagtatatttatttttttattgttggatgtgtgtattattaaatttttgttattttaaagaatgtttgtatgtttttgattattttttatttttgtgatgaaaggtttatttggagtttttattacggaaatgattttagagttaatttacgtattatttaggaaagtttgtcgtttttttattatgggggaagatttgtttttatatattttttttgagggattttttagttgtgtattttttagaatgattaaaaattatttagaataatagtagtattattagaatagtcgttagggataaatttatcgttattaatgaattttgaaatgtttggaaaggagttgagtgttgatgttttttgagtgtattttgtatttaagtatttggtttgggtggaatggtaatatttttggtttatttattattttatttatatttaatttatgggtatttttttttttttttttttttttttttaaaatggagggtgttttagtttagggagtagttttattaaaagatagatgatttatgattattagaaaaggaatattgttatgtgtgaatttttttgatgtttttgattgtaaaagtaatatttggttaattatagaatatttggggaaaggatggtaaaaagtaaaggattaggaagaaaaataaaaagttataaatgattttgtttagtgttagttattatttatattgtagggtatttataaaatagttttaaaataattagttgtttttttttttgtttttcgttttttttcgttttttatatatatatatatattttatatgaacgttttgtttttggaaatttatattttggtagtggtttataaaggtttggttttattttgatggaatagttcgattttggtatttatatatagttattttttttttttgttgttttggttttttttgtagtatgttatgggattagttatagtaataattagttagttatgtggaattgaggttaagatttgatattttttaattattttagaaaattgagggtttttttaggtttgatgtttgaggttttttttgtttatttaatttagggtgtttttttggtttttttattttatattattttttgtttgtttttttatcgtttattttttaatattttttttttatataattttttttttaagtaattttattatttttgagtagtattaatagtggttatagttttttgagtgttatttttggttaggtattgtgttatgtagtatatgtaattatttttatgtttattagttaaagcgtgattagaggttaatatatagtaaagaggtgatagagttagaattatttggttttgtttagaggtttttagattggattggaatgtttgtgttttgaatttttttattgtgttttttttgtttttttagtaggttatttttttttaaggtattttaaagaatagttttttattaggggttttgtgtgttgtggtagtgtgatttatgttaaggattattttaagggaagtgttttgaatcggtagtttttgttagtttgatatttttttagtgtttaattcgagttaggagattttttttttttttttttcgtggggatgtttgatattgtagttatattgggtttttgtttgtttgtttggagagaggattttgttgtgttatttaggttggagtgtagtggtatagttatagtttattgtagtttttattttttgggtttaagcgatttttttattttagttttttaagtagttgggattatagttatgtgttattatattagtttaatttttttttaatgtttttatttttgtagagatagggttttattataatatttaggtttcgattatgttatgtttaatttttaggaagtgtttggagttttttgttcggggattttagattaatatttttttttttttgtttatttgtagtagttttttgtatattggagttttgtttaatttgagtttataaattattttttttatttagaaatttttgaaaatggggaattaagtaagtcgttggtatgtgttggagtttaggttttttgggaaggtttatatgggggatggtgtttcgtagtaggttgtaggttttagagtttagcgggtggtggggagtttttaatttgtaaggaaaggttagatgataattgtttttttttttggttttttatatattataaaattattttttttttatttttattatttttatttttaggtttgatttattgattgtttttttttttggataatgttagattttgttttttttttggaattttttagttttttattggtttgcgttagtaaatttttaagtagtagatgatttttaagatgtgtgagaaggaagggataggaatgattgttaggattgttagttttttagggaattttgtatttttgatttagggagggtagatgatttatttttttaagaatttatttgtttgttcgggtttgtggggttttggagaatagaatatggagtattttggtttataggtattgttatttttttattttaggatgggtttagggatgtaggattggagttgggagattttttagttttgttatggatgttttgtatttaggtaagtttaaaatttttttaagttttggtttttttattgggtaaagtagggttggaggtattttaggttttttttttttttatttgatgttattattatatatttaggtatttacgtaatggaaatttataaagttgtttaatatttttttttatgtttttaaagagagtaagtaagtgtttttattatattttttatagtgaggagttagagtttttaggtatgttaagttattgttttttgttttattgttgaatgtatgttggtgttttttagagttatttttttggtttgatttatttagtgttgtggtttcgagaagtggtttttttttttagttagtagtttggggtggggttagtagagtgggaattatagtggttatatgagttaatttgtttatattgttatttgatttattgattttgatggggaagatagtgttatttttatagtgtggtagtatatattggggtttatagggattgagtttatttaagggtatatggtgttgtgggttagagttggggtatggtttagggatttagtgtgttttgattttttttgtaaatgttttttttagaagtttttttggttttttagtttttggtttttgagataattagtagttatttgttcgtttttgatatttttttttgttttttttttttaggttttgtggataattataatgggaatttaaggagggtttgttttgttcgggttgttgttcgttttggttgttttttgttatttaggtgagtgttttagttttaggatatggatttaggttgttttggttatgaattttttttttaagttttagttttagttttagttgtttttttaggtttggttttggtttttttgttttttagtgttataggtttggggttgtatgatagtttttttttatgttatgattttgtttttagtggggtatcgttttgagttatagttcgttttgagttatagcgtggtttttggtaggggtgggttaataatcggcggttgaagttttatttttgttattataagttgtttggggatattaatggatattatttttagagtgttgtgtaagtttttttggggtttattttgtttagagttatttgagtttagtttttttgttttgaggttttttttgtgttttaatgatgatgatggttatagtgatagtagtagtagttaattaattttgaagtatttatgtgttagttattattttaagtattttacgtgtatttgtttatttaatttttatgttaatttgatggagttggtggtatttttatttttgttttataagtaataagattgaggtttttttaaaattaataatttgttaaataatatatagaagtggtatacgggaatgtgaatatatagtttggtaatagagtttttgttttttttttttgttttaggttatttgttattgggttattttttttttttagttattttttttttggttgttggaggaaattgtgtgtttttgagttaatttttataatagtggaaatatatatgttttattgtaaagattaagtgtggttgtttgtttgtgttatgttggtataatattttggttattgttggttttttgttttttataaatatggttggtggggggagtagaaaagaaagtggtaatatagtgagtaatttaaaaaaagatttttatattattgtagtatgttttagaatattaatagtaattatatatttattgtttattgtttattggggattgtgttagagtttgttttatttaaattcgtttagttatttcgggaggtcggtattgttattttttatattatagttgaggaaatgaaggtaaagtagtaatttggcgttaggatatattttaatatgttttttttttttgagtagaaagagaagttatggtatttttttttttttatttttcgtgattttagttagggtgtattgtaatgtggtttatttgtgttaaaatattatattttttttataattattttttatttatttattttttttggttttttttttttttttgtttttgttgtttaagttggaatattttttagaattttaatagtttagtgatattttatttttagtagtttgtatttgtttatggagtaagtttgggattattagtttttttgtgataagttttggggtgtattttagtttttttttagagaattgagatgtgaagtttatatgtttatagatgagaggttttttttgttgttgtttaaaagggttttaggattttgtaggggaatttttttttgagttttgttttttatggtttaggggaaatttcgtttattttggtttagtggttaaaatattaaattattgtttattgatttattgtttgtttttttttgtttgttttttttagggggatggagttttattttgtcgtttaggttggagcgtagtggcgcgatttcggtttattgtaattttcgtgttttaggttttagcgatttttttgttttagttttttgagtagttgggattataggagtatgttattatgtttggttaatttttgtatttttttttatttattttttaatttttgtatttttagtagaggcgggtttttattatgttggttaggttggtttggaatttttgattttaaatgatttatttattttagtttgttaaagtgttgggattataggcgtgagttattgtatttggttttgttgtttgtttttgattttagtttttattataatttagagtttttttttttttttatttaggttaattagaagaatattatggttaattaagtttggattttagaattgatagtttgagtttgagtttagttcggttatttagtagttgtgtggttttgaataatttagttaatattttagttttagtttttttttgtaaggtggggatgaagataattgagtttagtttttttaataattttatgaagagtttagtatatagatgtatatatatttgaatattgaatgaatatgtttgttatgaatatttttgtttatagacgttttaattatgggttttagtttttttttttaaagtttttttaagaggttaaatgagttcgggatttagttattataaaaatttatgtttataggtaattttttaaaatggtttttaaatatggttagttttaagaataatattttttattttagattttttttattttatgcgtgtgaatatatgtttggtataaggaagggattaaagaaaaattgtatttttgcgttttttttttgtggttttttttttatacgggtatgatagttataggttgatagtgggggagaataaataaagtttggtggatggggttttgtttataggttttagggttgtcgttagttttgttgttttgtagttaggtgtttttgtgtgagttatattatttttttagatatttgttttgttatttgtaaaaaagttggggaggaggttggtttttattttattttattttatttattttttagatatggtttcgttttgttttttaggttggagtgtagtggtgtaagtttggtttattgtattttttattttttaagtttaaatgatttttatgttttagttttttgaatagttgggattataggtatgtattattatgttcggttaatttttgtatattttgtagaggcgaggttttattatgttggttagggtggttttaaatttttggttataagtgatttatttatttcggttttttaaagtgttgggattgtaggtgtgagtcgttatatttggtttagtttgttgttgttttttaaaattaatattttaaggtattaatttgtaatttttataagttagaggattttttattgggtaggattttatatttgtgagggtagatatggttattttagatgttttagagaattgggtttttgtgtgtgtttagaaagtgaggatttattttgtttttattggattttttattgaaaaatttatttttatggtgataaatttagtttttagttttagaattagaagttagttgttgggttttaaaatttatatttggtttaattatgatatttttttgtgagattttacgtgttttatttttgaaaatgtttttttatagaggtaggtatttttaaatattgattatatggtagaagttatatggtatgaagatagtttatttttgatgatggaaaagggggtatttatataaattaggaagatttttttttaatttttgtttttttagtttttttttattatacgtgtggattgtaatttatttttttgttgttattgttgttataaaaatggagaaggaaaaataatttagtaaaaattgatagttagtaaggatgagttttaagaattgattgggagtaataattgttttttaaattagggaattggaggtaatttgtttttgatgtaagatgatttttacgttgtgtttgttggtatttagttgttttatgtttatgggtttaaagtgtatagttgttgttttgtttttgatagtgtgtatttttggtattcggttagttttttagaagggagtagtttagtaatgatattttgttttagaggttattaaattttttttgtataggattagatagtaatttttttttttttttaaatagagttttgttttgttatttaagttggagtgtagtggtgtaattgtggtttattgtaatttttgttttttgggtttaagcgatttttttgttttagttttttaagtagttgggattataggtgtgtattattatgtttggttaatttttttatttttagtagagatggggtttcgttatgttggttaggttggtgttaaatttttgattttaggtgatttatttttttcggtttttttaagtgttgggattataggcgtgagttattgcgtttggtttagatagtaaatattttaagttttgtagattaagaggtaaaattaagggtattatgagatttattttaataataagaaataaaatttttatagatttttttattgataaaatttataatataattattgagtttagtataataatatatatttattaatgaggggaatagaattttttttagggggataattatttgtttaattggggtttaaaattagtgttttttcgtattaaattaattgtagatgtttatttattaatattaatttgtgatgatattttatatattttattttgaaaatgtatttttacgtagataggtattgttagatattgattattaatttacgaggatgtgatttaattgggtatatttattgtttggaagatatttatagaattttgtttgtttttcggtaatttttttttaatatattattatattgtagattaatttttttttagttgtaggttaggaggaagttttttaattgtatagttagatggatatttaaatgtggatattttttttgtgtttgtattagggtttaaaaaatgttgttggaattgtagtttgaatttggaaagatataattgttatatatttgtgcgggagtggaagtatattataagttgttgattttgggtttatattaatggagatggtgggttgttaggggataagttagtgttgttttaagagattttgattttttttttgattttagg

SEQ ID NO: 342 - DNA, 9997 bp, Artificial Sequence
  chemically treated genomic DNA (Homo sapiens)
tttagaattaggaagaaagttaggattttttaaagtagtattgatttgttttttggtagtttattatttttattaatatgggtttaaagttagtaatttgtggtatatttttattttcgtataaatgtatagtagttatatttttttaaatttaaattatagttttagtaatattttttggattttgatgtaagtataaaggaaatatttatatttgaatatttatttaattgtgtaattgagaagtttttttttaatttgtaattggaaggagattagtttgtaatgtaatgatgtgttaagaagaaattatcgagaaataaatagaattttataagtgttttttaagtaatgaatatgtttaattaaattatattttcgtgggttgatgattaatgtttggtaatatttatttgcgtgaaaatatatttttaaaatgaaatatgtaaaatgttattatagattagtattaatagatgaatatttgtaattgatttgatgcgagggaatattaattttgaattttaattaagtaaatggttatttttttaaaaagaattttattttttttattagtagatgtgtattattatgttggatttaataattatgttatgaattttgttaataaaaaaatttgtgaaaattttgttttttattattgaggtaagttttataatatttttgattttgttttttggtttgtaaagtttaaaatatttattatttgggttaggcgtagtggtttacgtttgtaattttagtatttagggaagtcgaggagggtggattatttgaggttaggagtttgatattagtttggttaatatagcgaaattttatttttattaaaaataaaaaaattagttaggtatggtggtgtatatttataattttagttatttgggaggttgaggtaggagaatcgtttgaatttaggaggtagaggttgtagtgagttataattgtattattgtattttagtttgggtgatagagtaaaattttgtttaaaaaaaaaaaaaaattgttatttggttttgtatagaaaaagtttggtaatttttgggatagggtattattattgaattatttttttttaagggattgatcgaatgttaggagtatatattgttaaagataagataatagttgtgtattttaaatttatgggtataggatagttgggtattagtagatataacgtgagggttattttatattagaagtaaattgtttttagttttttagtttgaaaaataattattgtttttagttaatttttaagatttatttttgttagttgttagtttttgttgggttatttttttttttttatttttgtaataatagtgataataaaaagatgagttatagtttatacgtgtgatggggagagattgaggaagtaagagttggaaggaaatttttttggtttgtatggatatttttttttttattattagagataaattatttttatgttatatgatttttattatgtaattagtatttggaagtatttatttttgtgaaaagatatttttaaagatgaaatacgtaaaattttataaaagaatgttatggttaaattaagtgtgggttttagagtttaatagttgatttttagttttaaggttgaaggttaggtttattattatggaaatagattttttagtggaaagtttagtggaagtaaggtgggtttttattttttgagtatatataggaatttagttttttagagtatttgaaatggttatgtttgtttttataggtgtgaaattttatttaatagaggattttttgatttgtgaaggttatagattaatgttttgaaatattagttttaaaaaataataataaattaggttaggtgtggcggtttatatttataattttagtattttgggaggtcgaggtgggtggattatttgtagttaggagtttgagattattttggttaatatggtgaaatttcgtttttataaaatatataaagattagtcgggtatggtggtatatgtttgtaattttagttatttaggaggttaaggtatgagaattatttgagtttgggaggtggagggtgtagtgagttaagtttgtattattgtattttagtttgggagatagagcgagattatgtttaaaaaataaataaaataaaataaaataaaaattaattttttttttaatttttttgtagatgataagatagatgtttggagaggtgatgtgatttatataaggatatttggttataaagtagtagagttggcggtagttttggggtttgtgggtagggttttatttattaggttttgtttgtttttttttattgttagtttgtggttgttatgttcgtgtgagagggaagttataaggagaaggcgtaaagatgtaatttttttttggttttttttttgtgttagatatgtatttatacgtatgaaatgaaaagagtttaagatgaagggtgttgtttttgagattggttatgtttgagggttattttaaaaggttatttgtagatatggatttttgtggtggttagatttcgggtttatttggttttttaagaaagttttagaaggaaaggttaaaatttatggttggaacgtttgtgggtaaaaatatttatggtaaatatgtttatttagtgtttaaatatatgtgtatttatgtgttaagttttttataggattgttaagagaattaggtttaattatttttatttttattttgtaagagaaaattaagattaagatgttaattaaattgtttaaagttatatagttattaagtgatcgagttgagtttaaatttaggttgttagttttaaaatttaagtttggttaattatgatgtttttttaattgatttgagtgggaagagaaggaaattttagattatggtggaaattgaggttaaaaataagtaatagggttaggtgtaatggtttacgtttgtaattttaatattttggtaggttgaggtaggtggattatttgaggttaggaattttagattagtttggttaatatggtgaaagttcgtttttattaaaaatataaaaattaaaaagtaaataaaaaaaaatataaaaattagttaggtatagtggtatgtttttgtaattttagttatttagaagattgaggtaggagaatcgttggaatttgggatacggaggttgtagtgagtcgagatcgcgttattgcgttttagtttgggcgatagagtgagattttatttttttgaaaaaaataaataaaaaaaaataagtaataggttagtggataatggtttgatattttagttattaagttagggtagacgaggttttttttgggttataagaggtagagtttagaggaaagtttttttgtagggttttgagatttttttgggtagtagtaaagaaggttttttatttgtgggtatgtgagttttatattttaattttttgagaaagggttgaagtgtattttaagatttgttatagagaagttgatggttttaagtttgttttataaataaatgtagattgttggaagtaggatgttattgggttattaaaattttagaaaatattttaatttaagtagtagagatagaaaaaaagaaggaattaagaaaaatgaataaataaaaaataattatagaaaaaatatagtgttttaatataggtgaattatattatagtgtattttggttagaattacggaaggtggggaagaaggggtgttatgatttttttttttgtttagaaagggagaatatattaaagtgtgttttggcgttaagttattattttgtttttatttttttagttgtaatatgggaggtaatagtatcgatttttcggaatggttggacggatttaaatgagataggttttggtatagtttttagtaaataataaatagtgaatatatggttgttgttaatattttaagatatgttatagtggtgtggaaatttttttttaaattgtttattgtattgttatttttttttttgttttttttattaattatatttataaaaaataaaaaattagtagtggttaagatattatattaatatgatataggtagataattatatttgatttttataatgaagtatgtgtgtttttattgttatagaagttgatttagaagtatataattttttttagtaattaggggaggggtggttgaggagagggggtggtttagtgatagatggtttggagtaggagggaagagtagggattttgttgttagattgtgtgtttatattttcgtgtattatttttgtgtgttatttgataagttattaattttggggaggttttaattttgttgtttgtaaaataaggataaaaatattattaattttattaggttggtatgaggattaaataagtaaatatacgtaaaatgtttagagtagtgattggtatataaatgttttagggttagttagttgttgttgttgttattatgattattattattattaaaatataggaggagttttagagtagaaggattgagtttagatggttttaagtagagtggattttaaagggatttgtatagtattttaagaatggtatttattggtgtttttaagtagtttatggtgataggagtgaaattttagtcgtcgattgttgatttatttttgttaaaagttacgttgtaatttaggacgggttgtaatttaggacgatgttttattgaggataaggttataatataggaaggagttgttatataattttagatttgtaatattggaaggtaaaagaattaaagttaggtttggaggagtagttggggttgaaattgaggtttaagaagggagtttatggttaaggtagtttagatttatgttttgagattggagtatttatttgaatggtagaagatagttaggacgagtagtagttcgaataggatagattttttttggatttttattgtgattgtttatagaatttggaaggaagggataggaaggaatgttaggaacgaataaatgattgttggttgttttaaaaattaagggttggaaggttaagaaggtttttgagaggaatatttatagggggagttaaggtatattgaatttttgggttatgttttagttttgatttatagtattatatatttttgagtaggtttagtttttataagttttagtgtgtattattatattgtgggaataatattattttttttattagggttagtgagttaaatgataatatgagtaaattgatttatatagttattgtggtttttattttattggttttattttaagttgttggttgaaagagagggttatttttcggagttatagtattaagtgaattagattaaaggggtgattttggaaggtattagtatgtatttagtagtggaatagggagtaatggtttagtatatttggaagttttggttttttattgtaagaagtataatggggatatttgtttgttttttttggggatatgaagagaggtattgagtaattttgtaagtttttattacgtgaatgtttagatgtgtagtgatagtattaggtgagaagaaggaaagtttgaaatgtttttaattttattttatttagtaaagaagttaaagtttagggaggttttgaatttgtttaagtataaagtatttatagtagaattaagaaattttttaattttaattttatatttttgaatttattttgaaataaggaggtggtagtgtttgtaaattagggtattttatattttattttttagagttttataggttcggatagatagatgggtttttggaagggtgagttatttattttttttaagttagaaatgtagagttttttggggaattgataattttgataattatttttgtttttttttttttatatattttgaaggttatttgttatttaggaatttgttgacgtaggttagtggaggattgagaagttttaggaaaagggtagggtttgatattgtttaaaaaagaaaataattagtgagttaagtttggagatgggggtggtggagatgagaaagaggtggttttatgatatgtgaggaattaggaagaaagataattgttatttggtttttttttataaattgagggttttttattattcgttgggttttgaaatttatagtttgttacgggatattattttttatgtggatttttttaggagatttgggttttagtatatgttagcggtttgtttggttttttatttttaggggtttttgagtaggaagggtgatttatagatttaggttagatagggttttagtatataaggaattgttataagtgagtagggagaggaaggtattggtttgaggttttcgaatagagagttttagatattttttaaaagttaagtatagtatgatcggagtttgggtattatagtgagattttgtttttataaaaataaaaatattaaaaaaaaattagattggtgtggtggtatataattgtagttttagttatttgggaggttgaggtgggaggatcgtttgagtttaggaggtaaaggttatagtgagttgtgattgtgttattgtattttagtttgggtgatatagtaaggttttttttttaaataaataaataaaaatttaatgtagttataatgttaggtatttttacggaaggaggaaggaaggaattttttgattcgggttaggtattggaaaggtgttaggttggtaggagttgtcggtttaggatattttttttggaatggtttttgatataaattatattgttataatatatagggtttttgatggggagttgttttttgaagtattttagaaagaagtggtttgttaagaaagtaggaagaatataatgaaagggtttagagtataggtattttagtttaatttggaggtttttgaataaggttagatagttttggttttgttatttttttgttatgtgttaatttttgattacgttttggttagtaagtatggagatagttatatgtattgtatagtataatgtttggttaaagatggtatttaaaaagttgtggttattgttagtgttatttaggagtaatgaggttatttgaggaagaaattgtgtggggagggagtgttggggggtgaacggtgggaaggtagatagagggtgatgtgaggtgaggaagttagagaaatattttgggttgaatgagtaggggagattttaggtattaaatttaaggaagtttttagttttttgggatggttggggagtgttaagttttagttttagttttatatgattggttggttgttgttatagttgattttatgatatgttgtaggggaagttaagatagtagagaaaggaagtagttatgtgtagatgttaaggtcgggttgttttattaaaataagattaggtttttatgaattattgttaaaatatgaatttttaagagtaaaacgtttatatggagtatgtgtatgtgtatggggggcggaggagggcgggaggtagaaaaagaaatagttgattgttttaaagttattttataaatgttttataatgtagatggtaattaatattaagtaagattatttatggttttttatttttttttttgattttttattttttgttattttttttttaaatattttataattaattaagtattatttttataattagaaatattaggaaaatttatatatgataatgttttttttttagtagttatagattatttattttttggtaaaattattttttagattaaaatattttttattttaaggaaaaaaaaaaaaaaaaaagaagatgtttataagttaagtgtagataagatggtaaatgaattaaaagtgttgttattttatttaaattaagtatttaaatgtaagatatatttagaaagtattaatatttaatttttttttaaatattttaggatttattaataacggtgggtttgtttttaacgattgttttaataatattgttattgttttgaatgatttttaattattttaaagaatgtataattgaaaaattttttaaagaagatatgtaggaataagtttttttttatgatgaaggaacggtaggtttttttgggtggtgcgtaagttgattttaaagttattttcgtaatgggagttttaagtaggttttttattataggaataagaaatagttaagggtatataaatattttttaaaatagtaaaaatttagtgatatatatatttaataataaggaaatgagtatattatggtatatttttatggtggggaatcgtatagttaggaaaagtaatgggcgtggaaggttatttataatgaattaagatttgttaagtaaatggaaagtaaaaaaagtaggggttgtaattttagtttttgataaaagattttaaattaataaagattaaaagagataaagaagggtattatataatggtaaggagattaatgtaataagaagagttaattattttaaatatatatgtatttaatataggagtatttagacgtataaagtaagtttttagagatttataaagagatttagatttttatataataatagtgggagattttaatattttattgttaatattagatagattaaaagataggaaattaataaggatatttaggatttgaatttagttttggattaagtggatttaatagatatttatagaattttttattttaaattaatagaatatatattttttttagtatcgtatggtaattattttaaaattgattatataattggaagtaaaatattttttagtaaatgtaaaagaatagaaattataataaattgttttttagaatatagtgtaattaaattagaatttaggattaagaaatttatttaaaatcgtataattatatggaaattgaataatttgtttttgaattattgggtaaataacgaaatgaaggtagatataaagatgttttttgaaattaatgagaataaagatacgacgtattagaatttttgagatatatttaaagtagtgtgtagagggaaatttatagtattaaatgtttataagagaaagtaggaaagatttaaaattgatattttaatattataattaaaagaattagagaagtaagagtaaataaatttaaaagttaatagacgataagaaataattaagattagagtagatgtgaaggagatagagatataaaagattttttaaaaaattaatgaatttaggagttggttttttgaaaagattaatagaatagattgttagttagattaataaagaaggaaagagagaagaattaaatagacgtaataaaaaatgataaaggggatattattattaattttatagaaatataaattattattagagaatattgtaaatatttttacgtaaataaattagaaaatttagaagaaatggataaatttttgggtatatatatttttttaagattaaattaggaagaagtcgaatttttgaatagattaataataggttttgaaattaaggtaataattaatagtttattaattaaaaaaagtttaggattagatggattaatagttgaattttattagaggtataaagaggagttggtattattttttttgaaattattttaattaatagaaaaagagggaattttttttaatttattttatgaggttagtattattttgatatcgaaatttggtagagatataataataataaaattttaggttaatatttttgatgaatatttatgtgaaaatttttaataaaatattggtaaattgaatttagtagtatattaaaaagtttatttattataattaagtcggttttatttttgggatgtaaggttggtttaatatatgtaaattaataaatataatttattatataaatagaattaacgataaaaattatatgattattttaatagatatagaaaacgtttttaataaaattt

SEQ ID NO: 343 - DNA, 7352 bp, Artificial Sequence
  chemically treated genomic DNA (Homo sapiens)
aatagatggtttgtttaattatacggattaaggaaaattattatttttttggtaaggaaggattggaattttatagtataatatttttaaggttaagtagggagtgtttatgagaaaattgtttatgtgattttttataaaatttaaattttgcgttggtgtaatgttttttatttaggggtagtaaagtgtagtgatgtttagtaatttttatgatattttttatgttaggttagtttatgggatagttttttttttttttttatttacgggttttgtattgaattatttattttgatattatgagaatgtgggtttttaatatgaatatgtatttaatgattttattttggggtataatgatgtttgggtaaagttaattagtttttggaagtgagttggtttttttgcggggtgtttttagagtgtttttgaggtatgattttgtaagttatttgtttttttgttatttatgattttttatttaaaagagtaatatgaatgtggattaagtaagattaaattaattaaatatttagtttttaaaaggaagaaatgaaaattgattattttagtaaaaaaaaaaaaaaaaaaaaaaaaaaaaaaaaaaagtatagatttagttaataaagttattaagaaaggatttatttattttgtatagggttttatagttagtaagttattgagtgggaatttgaagttaagtttgtttgcgtttaaaatttatgtttatagtttttgtattgtaatgttgttttttaaagatggttttaggaaagtttagaaaagtataggtagaagttttagggtagagtatattagggatataaggatagttagggttgattttgttgttagtaggatgtggttagtaagtttgggtttagttcgggttttttagatagggaggtttgttgagttttttttttgtggattttcgtttttgggttgttattatttgttttttgtttttttttggattttttattgtagatatttgaagaatgaaaaattattgttattttgttatgattttgagggaggttatagtttaggtgttttgttcgttttgtagtatttataagggtttaggttgatagggttggtgttggagttttaagttttaagtttttagaatttttttttcgtgagtgattggatttttttttgttataaataattttaagattggtgatataaaaaaagtattaataataattaattataagttatggatttattaataggtgatgtgatttagcgtttatagttatagagagtttatggtttttggggtaatttattttatttttttttttttttatgatgggtttaaattttttttttatatatagttgttttttattgtatatggatatttagtttttgtatatgtgaaaattttgttttttgtatttggttgaaaaaaatttgtatattagtagatggatttgttaagtttaaatttgtgttaattgtagtttttatacgtacgtggtgttttttttttagaaattttataaaataattttattttaaatgtttgaagatagtgtttatgttttttgaattttaagttttggatttattttttatatgatataatgttgagttttttttttattttggttattattggggagggagaagggatatagcgagagtaatagaagggaattaaagcgattatttagaggtgtttgtagatgtatataagaaagagtaattaaatttattagaattttgtttataaaatattagttttggagaggtttagttattttgtaattgttttagaatgttagttttagttattagaaaatataatgtggataaggattagagttaagagatggtatttatggtgagtttaaagtttcggtgatgttttattttataatataattatttatgtatttatttgttgagttagtaattatttattatattttaagtatttgatgtataaaggggagtaatttggatggttttttatttttatagagttataattgatatatttaattatttatttaaggggttttattttgatgttaaattagtaggatatgaagtttgttttttttgagagggttttttagagtgttttttagtttttgttgtgtgttatgtattgacgttttttagataggtatttattttcgtatagttttgggtttttttaatttgtgttttttattttatttttttttttttgtcggttttttttttgataatttttttttaattttttaaattttttagtttttgaaatttttttttttattttttttttatattttggtttgtgtttggttattgtttagaatagtttttttgaaattttaagtatttttttttaaatttttgaataattttttatattttgaattttttaatattttttttttttttagtatttttttattgaggtttttttttttagaatttatttttgtttttattttatattagtttatgttttgattttttttaagttttatatattagttgggcgggttttttagtttgatttttggttttatgggttttttatattagttttttgtttgtagtttgagaagattttatagttgggtatatggatgttgtttataaatgtaagtttttttatttagtgttgaaaatagatagtttatttattttttttagattcgttttttttttagtgattattttagatttttattattttttagaagttgttagttaatatagtttatttgtttatattaagtaatttttattttttaaatatagtaagttttaggtacgtttttttattttttattgaagtttttttttgttttttttggtgtagtggttttttaatgggttttaatgatttattattggtttttattttaatttttgtttagtgttgtagttaaaatatatattttaaatgtgtaatatttttcggtggttttttgtgttttgtgggatagtgttttttttggttaaaaagttttttttttttttttttatgtttttacgtttgtttataaaatattatattgggaggaaaagttttttttttttttttttttttttttttatttaattttttatatggaatggggaaaatatatttttgaattatgaagtttgtgtttgttaatgggtttgtttgtttttaagttatataaagtttttttttttttaagggtaaattttgttgtgtatatttagtttttgaagaatggaggtaaatgtataaagttttagattttagtggtagtttaatgtagtttattaatagtaaagatgatattttgaattttttttgaattttgtatttattattgtgttattttagaatttagagagggaaggatgtgaatagttagtatttataaatttatttatgatatattttttattatttggtttttgttgttatttgtatattatttagtgtttttattttttaatattaagaagttttggtttttgattattaagtaggttgtaatttagttattttaaattatttgtggttttttgaataagtaatgttgttttatttgtttgtatatgtatagtaaaatttttttttattttgattttttatttaatttattttaaatttttgtttaagtattattattgttgtgaagttttttttgattagttttaaatatagtaattattttttttaaggttttattttttttttttattttagagatgtgattttattttgttatttaggttgaggtttagtggtttgattatagtttattgtagttttaaatttttgggtttaagttatttttttagttcggttttttaaagtgttgggattatagatatgagttatttcgtttggtttttaaagtttgttatattttttttttttaatagtggtttttatatgttattgtaattattagattatatatttttatagtgtaaaattattttttgtttttttatgtattgtttttatttattatattgtttggtatttatgagtgttaaaaattttttattgaatataatattaagtaaatgaagaaatgtgggattaaaaatgaatgtttataatgaattaagttttttgttgagttatttgaatattataaagaagtaaaaattattattgtagaggaataattattttgtttggaatgtagagattatgttagtatataaaattgattgtttgattaatttggagtagaatagtttatgaagtatagttatatttaataatatagtaaagtagaggggtttgagagggttttattgtttaatttttgtttattatgttttagatttatagataatttgagtttaatgattatgatgttttttattttagggatttgtttttatttagtttttaaagatgggtatatattagtataagtatagaaaaataataaatttgtatattggattttttgtttagtagtgagaaagtaggtttgaagataataaagttaggtttgtatgtggagattggtattatgattttggattatgttttatgggatatgtttttaagggtaattttgtatttattttatggtttttggtttttaaattttttaggtatttttttttggggtaaaggaattaaaattggtttattttttttgtaaattatttttggcgattaagtattgttttgttttttattgagagatggttatatttttggtatttgtttttttttgtgggaggtgttttttttgtttatatagtaaaggggttgtaggagagatagacggagttggatttatagtagaattaagttatgatagtttgtttttattttgtttttagtattttttcgttagttttggttatttttttttttttggaatatgttgattttagtaagtttagttttgttagttttgtttttcgagtttattggtttttgattatttgataatgttttgtttgtatttaggatttgtttttgtttttttttttaatatatttgtagttaaaattaaatattgttgtttggggatttttttttagttttaaattttagtttattatttttatttgttttggttatggttttgttattttttttgatttttggtgagtatttttgtatttgttggtttaggttttagagttttttggtattttgattaggagaatttttttttcgttaatttggaatagatttagatgttttttaaggatgagttttttttttttttttatatttggtaattattttaatttttaaaaagtcgtttaatttatatatatttgtaatttattttaatagatttttttttatttttttatatttgtaatgatagagttatgatagtttattttatttttttttttatataagtgtttttaaatgtattattagtaagaagataaatgaatgggtatcgggtagtagtaagtagagttaggaaaggaagtagaattgtaagataattattttttattgattatattgtttggttttttttgaaaagtgttttatataatgtttttttagttttttttagttttttattgtttagagtaatttagagattaatttagttaatttggtgattgtggagttaaggagatttggattttaattttgtcgttttgattttttagcggtgtgaattcgtaggttattatatttttttgaaattttgtttttttatttatgaagtgaggataatattatgttttttagaggtttttaggagtatttttttttataagataattaatataaagtatttaataatgtttggtaaatttttatgttaattaattatatttatttttatgttttgatgatttagtatattattaaagtttatataatttttttaattggatatttttgtgtttaatgtaaggtattgattatattttaaatatttatgtattttttatattatttaacggttagttttgttttttatggatatattattgggttttttaggtttatgtgtatttttatttgttttatgaagtttttttggtttgtgttttttgtagttatttattttattgtagagtttttaagttatttattggttatattacgtttgtatttgtatattaggtttgttatgtttatttttttttatatgtatatatgttgggttggggttatgtaatgatttttatatgtataatataattttgagttttggatagttgtagaaaaggttttattgagtttgagagtggttatattttgaagattaagggaatgagggtaatgagaggttatttggaaattaagaaaagaaaatattttaggataaattattgaattatttgaatttgtttgaaaaattgtaggttggaggtttaaagatatttgtattttttgaaaaattttataagatgggggtggtgggtgttttgtagttgaaaatgtataggttttagggatttttggaggttatagggtttaggattttttatagtattaggagggattttatggagaaaggagtttaaatatatagagattttgtaggaagaaatttttatgttttaaagataggttggtgttggaatttggaggtttggaattatatatagagttattttttgagttatttatttaaattagttaaaatagtttgtaagttgataatgaggtttgtatttttaaatggtaggaaaaaagtaaaagagaaatattattttatgatatatgaaaatgataaaaaatttaaattttagtgtttaataaaggtttaatggaatatagtcgtttttatttgtatatatatatgtggttgtttttaggttataatggtagagttgagtggttgtaatagatattgtatggtttataaaattgaaaatattattgtttggttttttatagtaagagtttgtttatttggtttaaatgttgtgtcgatgaatataggtatattttgtttttttgttttaatttttgttttgtttattatggtatttttatttttatcggttagtgtatttttttagtggtttttagtatttttttttgttgagttaagaggttgtattattatatttttttttaggtagtaataattaattaatttaattgattagaatagaaaattaatttatttattattacgtgtgaagaaagtaggttgaattagttagttgtggtggaattggtttttgtgatttttagttagtgtttttgtgtttttggaggatggttattttagaagaagaaggttttaataggattgatattggaggttttgtatttattatttttgttttatatagttttgtgaaggttttttagagttgtgttttttgaataaagttttggaaattgattttatttattttttttttttttttttagt

SEQ ID NO: 344 - DNA, 7352 bp, Artificial Sequence
  chemically treated genomic DNA (Homo sapiens)
gttggggaagaaagaaggaaatgagtgaggttaatttttaaggttttatttaaagaatataattttagaaggtttttatagaattgtgtgagataagagtggtagatgtagagtttttaatgttagttttgttgggattttttttttttgggatgattattttttaaggatatagggatattggttaggaattatagagattaattttattatagttaattggtttagtttgttttttttatacgtgatggtggatagattggttttttattttagttaattagattgattggttgttattgtttgaagaaaagtgtggtgatatagttttttggtttaataggaaagagtgttggaggttattgggaagatgtattggtcggtggaggtaaagatgttatggtgggtagagtagaaattagggtaaaggggtaggatatgtttgtgtttatcggtatagtatttagattaggtaagtaaatttttattgtaagaggttagatagtaatatttttagttttgtgggttatatagtgtttgttgtaattatttagttttgttattgtagtttgagaatagttatatatatgtatgtaagtgaggacggttatgttttattaaatttttattagatattgaaatttaaattttttgttatttttatgtgttataaaatagtattttttttttgttttttttttattatttaaaaatataaattttattattagtttgtaggttgttttagttgatttagatgaatagtttaggaagtagttttatatgtagttttaaatttttagattttagtattagtttgtttttaaaatatgggggtttttttttgtaggatttttgtatatttggatttttttttttataaggttttttttaatgttgtagagagttttgggttttgtaatttttaggagtttttgaggtttatgtatttttaattgtaaaatatttattatttttattttataggattttttagaaggtgtaaatatttttggatttttagtttatagttttttaggtagatttaagtagtttagtggtttattttggaatattttttttttttggtttttaaataattttttattatttttatttttttaatttttagaatgtggttatttttaggtttaatgaggttttttttgtaattatttaaaatttaaggttatattatatatatgggaattattgtataattttaatttaatatgtgtatatgtgaaggaaagtgagtatggtaagtttgatatgtaggtgtaaacgtgatatagttagtaagtgatttggaagttttgtagtagggtgggtaattgtagaaggtataggttagaaaggttttatgaagtaggtggaagtgtatatgagtttggaagatttagtagtatatttatgaggggtaggattagtcgttgagtgatgtgggggatgtatggatgtttaagatgtggttagtattttatattgaatataaaagtgtttagttgagaggattgtgtgggttttggtgatgtattagattattaagatataaaagtggatgtgattgattagtatagggatttattaggtattgttagatgttttatattagttattttataaaaaaaaatatttttaaaaatttttgaggaatataatattatttttattttatagatgagagagtaaaattttagagaggtatggtaatttacgaatttatatcgttaagaaattaaaacggtaggattgaaatttaggtttttttggttttataattattagattaattaggttaatttttagattattttaagtaatgagaaattgaagaaaattagaaaaatattatatgaaatattttttagaggaaattagataatatgattaatgaaaggtgattgttttgtagttttatttttttttttggttttatttgttgttgttcggtgtttatttatttgtttttttattaatagtatatttaggaatatttatgtaaaaagagaaatgggataaattattatgattttgttattataaatataagaaaatagaaaaaaatttgttaaagtgaattataaatgtgtatggattaagcggttttttaaggattagaatagttattaaatgtaaaaaggaggaagaagtttatttttgaaaaatatttaaatttgttttaggttggcggggagaaagtttttttaattaaagtgttagaaaattttgaagtttaaattaataggtgtagagatatttattaaggattaaggagaatagtagagttatgattaaggtaggtgaaggtgatgagttgaaatttaaggttagaaggaggtttttaagtagtaatatttagttttagttgtaagtatgttaagaggagggataaagataggttttgagtgtaggtaaagtattattagatgattagaaattaatagattcggggggtagagttgatagagttggatttgttgaaattagtatgttttagaggaaaggaggtggttagaattggcggaaaaatgttgaaaataaaatagaaataggttattatgatttggttttgttgtaagtttagtttcgtttgttttttttatagtttttttgttatgtaaatagaggaaatattttttataaggaaaggtaggtgttaaaaatatggttattttttagtagaagataaggtagtatttagtcgttaaggatggtttgtaagggaaataagttaattttgatttttttattttagagggaagtgtttagaaaatttggaagttagaggttatgggataaatgtagagttgtttttggaggtatattttataaaatataatttagggttatggtgttaatttttatatataggtttggttttattgtttttaaatttgtttttttattgttaagtagagggtttaatatatagatttgttatttttttatgtttgtgttggtgtatgtttatttttggaagttggatggaaatagatttttgaggtgaggggtattataattattgaatttaagttgtttgtaggtttaagatatgatggatagagattaagtagtaagatttttttaggtttttttgttttgttatattattaagtatagttatgttttatgagttattttattttagattgattaagtaattaattttgtatgttgatataatttttgtattttaagtagggtaattgtttttttatagtaataatttttgtttttttgtaatatttaggtaatttagtagaaagtttggtttattgtaggtatttatttttaattttatatttttttatttatttagtattgtatttaatgaaaagtttttagtatttatgaatgttaggtaatgtgatgggtggaggtagtatatgaaggaataagggatagttttgtattgtaaaaatatatggtttagtaattgtaataatatgtggaaattattgttaagagagaaaagtataataaattttggaggttaggcgaggtggtttatatttgtaattttagtattttgggaggtcgaattgggaggatagtttgagtttaggagtttgaggttgtagtgaattatgattaggttattgaattttagtttgagtgatagagtgagattatatttttaaaataagaaaaagaaatgaaattttggaggaaatggttattatgtttggagttaattagagaagattttatagtaatgatgatatttgagtaggggtttaggatgagttaagtggagaattagaataggaaaagattttgttatgtatatgtagataagtgaaatagtattatttatttaaggaattataggtagtttggaatgattggattatagtttgtttagtgattaggggttagggttttttgatgttgaaaggtaaagatattagatgatatgtaagtagtaataagagttagataatggagggtatattatgaatgagtttgtaaatgttaattatttatatttttttttttttagattttgaagtgatatagtaataggtatagaatttagaaaaggtttaaaatattatttttattgttgatgaattatattagattgttattgggatttaaggttttatgtatttatttttattttttaggagttagatgtgtataatagagtttatttttggaaaagaaaagattttgtgtggtttgagggtagataaatttattagtaaatataggttttatgatttagaaatatattttttttattttatgtggaaaattgagtgaaagaagaagagaaaagaaaaagaaaatttttttttttaatatagtattttatgaataggcgtgagaatatgaagaaaggaaaaggaagttttttagttaggaaggatattattttataggatataagaagttatcgaagggtgttatatatttaaggtgtgtattttggttgtagtattgagtaggaattgggatgaagattagtaatgggttattaagatttattaagagattattgtattagagagagtagaggaggattttaataggaggtagaagaacgtatttaaaatttattgtgtttggaggataaaagttatttaatgtgagtaagtaggttgtattggttggtagtttttaaaaagtggtaaaggtttgaaataattattaaaaggaaagcgagtttgaaaaagataagtaaattatttgtttttagtattgggtagaaaaatttgtatttgtaagtagtatttatgtgtttagttgtggaatttttttaggttgtagatagaaggttggtgtgagaggtttataaagttagagattaagttgaggggttcgtttaattggtgtatgaggtttagagaagattaggatatgggttgatgtaaagtgaaaatagaaataagttttgggaaagggaattttagtgaggaagtgttggggaaaaggagagtgttagaaagtttaaggtataggaagttgtttagagatttggagagaagtgtttgaggttttagagaagttgttttgggtaatgattaggtataaattagggtatgagaagagagtgaaggaagaagttttagaagttgagggatttagggaattgagaagaggttattaagaagaggatcggtaagaagagggaggtggaatgggaggtataggttggggaagtttaaagttgtgcggaagtagatatttgtttggaggacgttaatatatgatatataataaaagttagaagatattttgaggggtttttttaggaagggtaagttttatgttttgttggtttggtattaaggtgaaattttttgggtaaatagttgagtatgttaattatggttttgtgagagtagaaaattatttaaattgtttttttttatatattaagtgtttagaatgtaataaatgattgttgatttaataaatgaatgtatgaatgattgtattgtgagatagaatattatcgaggttttagatttattataaatgttattttttggttttagtttttgtttatattgtgttttttggtggttgggattgatattttgagatagttatagaatgattgggtttttttagggttgatgttttataagtagggttttgatgggtttggttgtttttttttgtgtatatttgtaaatatttttaaataatcgttttgatttttttttgttgttttcgttgtgttttttttttttttttaatggtgattaagatagaagagaagtttaatattatgttatatgagaaatagatttaggatttggggtttagggaatataagtattgtttttaggtatttaaaataaaattgttttgtgggatttttgaggagaaaatattacgtacgtatggaaattatagttgatataggtttgaatttggtaggtttatttattaatatgtagattttttttaattaaatatagagggtaaaatttttatatatgtaagaattgagtatttatgtataataaggaataattatatataaaaaaaaaatttaaatttattatgagaaaaaaaaaagatagaataggttgttttagagattataagttttttataattgtagacgttgagttatattatttgttaatagatttataatttatggttggttattattaatattttttttatattattaattttaggattgtttatggtaaagaaaaatttaattatttacggaaaagaggttttaagggtttaggatttaaaattttagtattaattttgttagtttgggtttttgtggatgttgtagagcggataggatatttgggttgtggttttttttagggttatgataaaatagtaatggttttttattttttaggtatttgtaatgagggatttaagagaggatagagaatagatgatggtagtttaaagacgggagtttatagggaggaaatttagtaagtttttttgtttagggagttcgggttgaatttagatttgttgattatattttgttagtagtaaaattagttttagttgtttttgtgtttttggtgtgttttgttttggaatttttatttgtgtttttttggatttttttggaattatttttaaaaagtagtattatagtgtagaggttatgagtataggttttgaacgtaggtagatttggttttaaatttttatttagtaatttattagttgtgggattttgtataagatagatgggtttttttttggtagttttgttgattagatttatattttttttttttttttttttttttttttttttttttgttaggatgattagtttttattttttttttttaaaaattgaatgtttaattaatttaattttgtttaatttatatttatgttgtttttttaaatgggaaattataaatgataggaaagtaaatagtttatagggttatgttttagaagtattttggaagtatttcgtaaagaggttagtttatttttaaaggttaattagttttgtttaggtattattgtgttttaaagtagggttattggatatatatttatgttgaaagtttatatttttataatgttagaataaatggtttagtatagaattcgtgaatgaagaggaaagaggagttgttttatgagttggtttggtatgggaagtattatgagggttattagatattattgtattttgttgtttttgaatggaaaatattatattagcgtaaaatttgagttttgtaaggagttatatgaatagtttttttatgagtattttttatttagttttgagaatattgtattgtgaaattttaatttttttttattaaggagatgatgattttttttaattcgtgtgattgagtaaattatttgtt

SEQ ID NO: 345 - DNA, 6049 bp, Artificial Sequence
  chemically treated genomic DNA (Homo sapiens)
tttatttttattattttttagttgtgggattttgagtaaattatttttttaattttagtgttattatttgtaaggttgtgttaaggatatattttatttggttgagttgtaatgagaattgagggttaaggttttatataaagtgtttggtataataggaagtgtttattaagtattcgttagtattaaatttttttacgtgttatatggtgagggtggcggttttttagttttaggtttttttttttttttggtgggagagtcgggttttttttagtaatgttgtttattttaatttgttgggtgaaggttagaagagagatatagtttggatgaaaaatttttgagttttttatagggtgtagagttattgggtgttttttgtaaattgagtttataaggttttgttttaagagttttaaataaaaatgagtttattgatttggatatttagttgggtgtattttttagttttatttttgaaatttcgagtttgtgaaatatgggttgtttggggtgtattatgttaatttagttttagtaatatttatattatgttgttttgtttttatttattttgtgttttgttaagagtatttttttcgttattttatatttgagttatttgttgaaatttattaacgtttttgtttgttttatttttttttttattttttttttttcgttttttgttttttttggttttatagtaggtttttttttttaataagttttattttattgtttaattagtttaatatgtatgtttaattgaataaggttaaatgttagttaatattttgtttttttattaaataatagattttttttattttgattattttttattaatttgttattgttttatggttttttagttttattttatttttttttttttttttaatttttttttttttttttttttgagatagagttttgttttgtcgtttaggttggagtgtagtggtgtagttttggttcgttgtaatttttattttttagttttaagtgatttttttgttttagttttttgtatagttgggattatagatgcgagttattacgtttggttaatttttgtatttttagtagagatggggtttagtcgttttggttaagttgtttttaaatttatgattttaagtgatttaattattttagttttttaaagtgttgggattataggtatgagttattatgtttagtttattttatttttttttaattttataaagtggatatttttgtaattattttatgttattagtgtttattaaatttatttttgtgtttatatatttttttgtttattatttttatttgaattttagatttttttttttgagattattttttttgtttttgaagaatattttttagaatttttttaggtgagagtttgttagttataaatgtttttaatttttatttgaaaatgtattttttaaattttatatttgaaagatagttaaggttgatagttatttttttattagtattttgagatgttgttttatcgttttttggttttagttattggtattgatatattagttgtttatttattttattatttatttattttttgtttagtgattagtagttttgttattaaaaatgtttggtgtagatttttttttatttattatgtttgggttgggggagtttttagaatttgaggattgtgttttttattaagtttagaaattttttatttttttttagaattttaattagatatatttaaatttttgttttttgtttatgttttttagttttttttatattttttattattttgtttttttgtgttttattttgggtaaattttttaaatttattgtttattttagtagttgtttttttagttatattaatttgttgtttatttttatgtatgtatttatttatttatttttgagatagagttttatttttatttaggtcggagtgtagtggtataatttcgatttattgtaatttttgttttttgggtttaagtaatttttgtgttatagttttttgagtagttgggattataggtatgtgttattttatttggttaatttttgtatttttaatagagatagggttttattgtgttagttaggttagttttgaatttttggttttaagttattagattgttttagttttttaaagtgttgagttttaatttattgtttaatttgtatattgggtttttatttttaaaaattatgtttttatataattgtttgtttttttttttttaatttttttggttattttaaatagttttttgttttttatttatatttttaattattaatttttaatttttgaagtatatgaaatatttttattttatattatatatattgtaattttaatatttgagatgtgttcgaaggtttgtatttttagtttattgtttggtgttttttttatttaaagtattttgtgttttgtgttttatgatttttttgttttataaatatgtgaatttatgttttatgggagtttttttgtgggatttttttgagttatgaatataggatgagttattttagagataatttttattatttgtttttgttacgtgtttaaggagttattatttattttattttaaatttttattttatttttttgtttgtttgttttttgtgtggttgtttttgttataaagttattatgagttttatttttaggtttattagtgggtagatttgtggtgaggggtatttagggttgatatttattttttttttatttagagtttatattgagttgggtaagttttgtgttagttcgttttaaggaattttttttttcgagttttttattgtggatgttgtattttagtgttttttgtttaaggtagaaattttggattttgttttttatttcgattttgttttttagttttaatttttgtttatgtttataagattgaagtttttggttaattggattaatagatatttttttgttggttgtgatttttttggatttttgttgtttttatatattaatatatataaggttttattttgttgtttaggttggagtatagtagtgtaattttggtttattaaagttttgattttttgggtttaagcgatttttttattttagttttttgagtagttgagatcgtaggtgtgtgttattaaatttggttaattttttgtattttttgtagagagagggttttattatgttgtttaggtttattgtcgtttttgatttttgatgattttttttattttttattattttagttatatattttaaaagatggtttataatatttttgtggtgttttgtattaggagaattttttagtatttgttgtttattatattgttagaaatggagtttagttatttttttcggtttattttaaacgggttttttttaggattaggagattttatattatgtgtgttttattttggtttgtggtttggttatttgtgtgtgtgtgaattttattttttttgagggtaggaatatggttttttttttttcgtttttatagagttttgtttagagttttgtatattaagattgtgtaaatgaatggaattgtatttgggagttcgaggtatttatgtaaatttgtgttgttagtgatttttattagagggtagcggtagtaggtgtcggcgttggggtaggattgggaggagttttattttgggggcgtttggtttttcgtggttttaatatttgtcgtattaaatgtatatatttatttttaggatcgaatttaatggaggaggatcgttttttattttatatgttggggaaatgaagataagtaaggatgtaggaagtggagggttaggagaggtggatttgggatgggattaattgaggtagggttaggatttggaattaaattttttttggatttgattatttttagggttttgtttggataattaaattatttatttttttttttatttaataaatatttatttattttttattatatgttttatagggagtattatgggaattaaatacgtttggtttttgttttttttttatagcgttagtttgttgtagtgtaatggggtaattcggggttttttaggtagttttgggttttttttttttagttttttgtttttgttattttttttggtttagaggttttttatgattgttgtttgttaaaattttgtttagttttgtagatttagtttttatgtttgatttttacggaggtatgtttagtttggtatttggagatgggatagttggttttattgtgttatttgacggggcggtttttataaggttttggtatttttttttgtagaaggatttgtgggatggttattttttaggttttttttaatttatatttttttgaggggagatttaggtttttatttttaaaagtgtattaagattatatttttttttttaattattattgtatttaaggttaagataaaatttaggatttaatttaagagagttaaattatatagatcgggataggtaatgggttatttatttttttttttaatatgtattgattgagtagttattatattattaatttttttttttgggttattagaaatgaggtatggtttttttattttttttttttttagaagattttcggggaagtgtgtttgtatggatgcgtgtgtatgcgtgtgtttggtttcgtgatttttggggtgtagtttggatgggtgggtttttagtataggtagttggggttttttttattagtttttgtaatagtagtttagttttttgtagattaaaattataagtagaataagtaggcgtgagatatttataggttgggtttgatcgtatgcgtgtcggagaggagagagtagagagagatataggaataagaatagtaaagggtagagtagatttgcgttaggggcgtataacggtcgtgtttatttttcggttttaagatggtgttttttataggtagttacgcgtagtagttagagatagttttagatatgtggttttttttcgggattattggattgttgacggtagtttttttaggtaggttttttttttttattttttgttattggtgttggaggagtcgggttcggtttttttagttttttttttggttgtttttttgtggttatttttttaggattttttagttaagattatatttaggtattagggaggtttagtatttggggttaggagaggatataggagtttttcgaggggttggggttgtgtttggaagttttttggagtgatagaatgtgggaagtatgttttgtgttttattaatgggtttttagggtgtgaggagggaggtgttttttttatttttaagtttaggaatttttttattttttattttttgttaatttttaagaaggaatcgtttattttttagagaggcgggattattgatggtggtatttttaacgttaaagttgaggtttggggtttagtaggcgtaggttaattataggagagtatcgttcgaaataggatttagggaagttagggagagttttggataattaggcgttgatggttttagtataattagttggggtagtttagggtataagcgagtatgaaggttatttttacgttttaagttgtttttaagtgttaaggtatttggttatttgggttagggaattagatggttagaaggtttggggtattagattgtgttttttagatatttgttggtttttgttgagtgtagggtttaagttggttagagcggggtaggggtttggagatgtaagagattttgattttatcgagtttttatattttgggatttgggaagattggtatggaaatagaattcgggttaggggagtttgggtttattttgtagttagagagttaagtgtttttattttgtgatggaggagatttaggaagatttagttaggagggggtatcgagttggtttggaggattgggtatatgtcgcgagattttgggtagggagtgtttttttttttgttttgatttttaggtatgtgtttcgagtttgtggttttatattggttta

SEQ ID NO: 346 - DNA, 6049 bp, Artificial Sequence
  chemically treated genomic DNA (Homo sapiens)
tgaattagtatgaggttataggttcggaatatatgtttggagattaaggtagagaggagagtattttttgtttagagtttcgcgatatgtatttagttttttaaattagttcgatgtttttttttgattgggtttttttgggttttttttattataaaatgaaagtatttggttttttggttgtaaggtggatttagatttttttggttcgaattttgtttttatattagtttttttaaattttaaaatgtgagagttcgatggggttaggattttttgtatttttaggtttttgtttcgttttggttagtttggattttgtatttaataggggttagtaagtatttggggagtatagtttagtgttttaaattttttggttatttgattttttggtttaggtggttaggtgttttgatatttgggggtagtttgagacgtgggggtggtttttatgttcgtttatgttttagattattttagttggttgtgttgaggttattagcgtttggttgtttagaattttttttggtttttttgagttttgtttcgggcggtgtttttttgtgattggtttacgtttgttggattttaagttttagttttggcgttgaaagtattattattagtggtttcgtttttttggaaggtgaacggtttttttttaagagttggtaagaaataggaaatgggggagtttttgagtttaaggatgggagaggtatttttttttttatattttagggatttattggtaaggtataaagtatgttttttatattttgttattttaggaggtttttaggtatagttttagtttttcgaggggtttttgtgtttttttttagttttagatgttggatttttttggtatttgagtgtagttttggttaaaagattttagaaaagtgattataaggaaataattagaaaggggattgagagggtcggattcggtttttttagtattagtggtaggagatgagggaagggggtttatttgagagggttgtcgttagtaatttagtgatttcgaagaagagttatatgtttggagttgtttttggttgttacgcgtggttgtttgtgggaagtattattttggggtcgggaggtggatacggtcgttgtgcgtttttggcgtaggtttgttttattttttgttgtttttgtttttgtgtttttttttgttttttttttttcgatacgtatgcgattaaatttaatttgtgagtgttttacgtttgtttgttttgtttgtggttttggtttgtaggaagttgggttgttgttataggggttggtggggagagttttagttgtttgtgttgggagtttatttatttaggttgtattttaagagttacggagttagatatacgtatgtatacgtatttatgtagatatattttttcgagggttttttaagaagaagggaagtggaagagttatgttttatttttggtggtttagaagaaaaaattgataatgtagtagttgtttaattagtatatattggaagagggagtgaatgatttattgtttgtttcggtttgtgtaatttggtttttttggattaaattttgagttttattttaattttaggtgtaatggtggttgggaaggagggtgtggttttgatgtatttttggagataagagtttaagtttttttttagagaaatataaattgggaagggtttgagagatggttattttataagtttttttatagggaagggtgttaaggttttgtgggagtcgtttcgttagatggtatagtggggttagttattttatttttaggtattagattgggtatgttttcgtgggagttaggtatgggagttgggtttataaggttgagtaggattttgataaatagtaattatgggaggtttttgggttagaaggaatagtaggagtaaagggttgaaggaaggaagtttagggttgtttgagaaatttcgagttgttttattgtattgtagtagattgacgttataggaagaaggtaggggttaagcgtgtttaatttttatggtattttttgtggagtatatggtaggaggtgaataaatgtttattgaatgagaaaaggaatagataatttggttgtttaagtagggttttggaagtggttaaatttagaaggggtttggttttaaattttggttttgttttagttggttttattttaggtttattttttttggttttttattttttgtatttttgtttgtttttatttttttaatatgtggaatgaggagcggtttttttttattgggttcggttttaaaggtgggtgtatgtatttgatgcggtaagtattagagttacggggaattaggcgtttttagagtgagattttttttagttttgttttagcgtcggtatttgttgtcgttgttttttggtggaagttattggtagtataggtttgtatgggtgtttcgagtttttagatgtaattttatttatttatatagttttggtgtgtagaattttggataggattttgtggaagcgaaagagaggaaattatatttttgtttttaaggaggatgaagtttatatatatataagtgattaaattataggttaaggtaggatatatataatgtgaggttttttggttttaagaggaattcgtttgaaatgggtcgggaaggatggttagattttatttttgataatatggtagatagtagatgttgaagaatttttttaatataaaatattataaaaatattgtaaattattttttaaaatgtgtagttgaggtggtgagaaatgaagaaaattattagagattaaaaacgataataagtttgggtaatatggtgaaattttttttttgtaaaaggtgtaaaaaattagttaggtttggtggtatatatttgcggttttagttatttaggaggttgaggtgggaggatcgtttgagtttaggaggttaaggttttaataagttaagattgtattgttgtattttagtttgggtaatagagtgagattttgtatatgttaatatataaagataataaaaatttaaagagattatagttagtagagaagtatttgttgatttagttgattaagagttttagttttatgaatatggataaaagttaaagttgagaaataaaatcgaagtgaaaaataaaatttaaaatttttgttttaaataaagagtattgaaatataatatttatagtggagaattcggagagaaaaattttttaaagcgagttgatatagagtttgtttaatttagtatggattttgagtgggagaaaaataaatgttaattttgaatgttttttattataagtttatttattaataggtttggaggtgaaatttatggtgattttgtggtaaaaataattatataaaaaataaataaataaaaagataagataagaatttaaagtaaggtaaataatagttttttaggtacgtggtagaaataaatgataaaaattgtttttggagtaatttattttatatttatgatttaaagaaattttatagaaaaatttttatggaatatgagtttatatgtttgtaaaatagaaaaattataaaatataggatataaggtgttttaggtgagaggagtattaagtaataaattaaaaatgtagattttcgaatatattttagatgttggaattgtagtatatataatataaaataaggatgttttatatgttttaagaattaaaagttggtaattgaaagtatagataaggaataagagattatttaaagtgattaggaagattgagggaaaaaaagtaagtagttatgtaaaaatataatttttgaaaatagaagtttagtgtatagattaaatagtagattaaggtttagtattttgggaagttaaggtagtttgatggtttgaggttaggagtttaagattagtttggttaatatagtgaaattttgtttttattaaaaatataaaaattagttaggtgaggtggtatatgtttgtagttttagttatttaggaggttgtagtataagaattgtttgaatttaggaggtagagattgtagtgagtcgagattgtgttattgtatttcggtttgggtgagagtgagattttgttttaaaaataaataaataaatatatatataaaaataaatagtagattaatatggttgaagagataattattggggtgaataatagatttgaagaatttatttaggatggagtataggaggataaagtggtggaaaatatgaaagaggttaagagatatagataaggaataaggatttaaatatgtttaattagagttttagaagaaaatggaaaatttttagatttgatgaaagatataatttttagattttggaagtttttttaatttaagtatgataaataaaaagaaatttatattaaatatttttggtagtaaaattgttgattattagatagaagatggatgaatgatgaagtagatgggtagttaatatgttaatattaataattaaagttagaaggcgatggaataatattttaaagtattaataaaaaaataattgttaattttgattattttttaagtataaggtttaaaagatatatttttagatgaaaattgagagtatttatagttaatagatttttatttaagggaattttaaaggatgttttttaaaaataagaaaaataattttagaaaaaaaagtttaagatttaagtaagaatggtgagtaaagaaatatgtaaatatagaagtggatttaataagtattgatagtataaaataattataaaaatgtttattttgtggagttagaaaaaaatgaaataggttggatatggtggtttatgtttgtaattttagtattttgggaggttgaggtggttggattatttgaggttatgagtttgagaatagtttggttaaaacggttaaattttatttttattaaaaatataaaaattagttaggcgtggtggttcgtatttgtagttttagttatgtaggaggttgaggtaggagaattatttgaaattgggaggtggaggttgtagcgagttaagattgtattattgtattttagtttgggcgatagagtaagattttgttttaaaaaaaaaaagaaaaaaaaattaaaaaagaaaaaaaaaatgagataaaattaaagaattataaaataataataaattggtgaggagtgattagagtgggaaaggtttattatttggtgggagggtaaaatattgattagtatttgattttgtttaattaaatatgtatgttaaattagttgaataataaaatggaatttgttggggagagaagtttgttgtaaagttaaagagggtaggaaacgaaaagaaagaaatgaaagggagaataggataaatagaagcgttggtaggttttagtaggtagtttaggtgtagggtggcgggaagggtgtttttgatagggtatagggtaagtagaggtaagatagtatgatgtgagtgttgttggggttggattgatatgatatattttaggtagtttatgttttatagattcgaagttttaaaaatgaagttgaaaggtgtatttagttgggtgtttaaattaatgagtttatttttatttagaatttttggagtaggattttgtgaatttaatttgtaagggatatttagtggttttgtattttgtggagaatttaggagttttttatttagattgtattttttttttgatttttatttaataaattggaataagtaatattattgagggaagttcgatttttttattagaaggaagagaggatttagaattgaaaggtcgttatttttattatgtggtacgtgggaaagtttaatgttgacgggtatttagtgagtattttttattgtgttagatattttatatggaattttaatttttagtttttattataatttaattaagtagaatgtgtttttagtatagttttgtagataatgatattgaagttagagaggtagtttgtttaagattttataattaagaagtagtaggggtagg

SEQ ID NO: 347 - DNA, 5659 bp, Artificial Sequence
  chemically treated genomic DNA (Homo sapiens)
taatgattatttttagtgtttagttttttttttaagtaaaatatataattaatgttaggtaagttttttttaatggttttttagagagttaaacgtttttatgttgagttggaaatattgatgtttttttttttttgagatagagttttattttgttgtttaggttggagtatagtagtacgatttcggtttattataatttttgtttttcgggtttaagtgatttttttattttagttttttaagtagttgggattataggtatgtattattatgtttagttaatttttgtagttttagtagagatagggttttattatgttggttgggttggttttaatttttgattttaggtgatttgtttattttagttttttaaagtgttgggattataggtacggtggtgttcgattgatttttttttttttttttttttttttttttttttgagacggagtttcgttttgtcgtttaggttggagtgtagtggtgtaattttagtttattgtaagtttttttttttaggtttatgttatttttttgttttagttttttgagtagttgagattataggtattcgttattatatttagttaatttttttgtatttttagtagagacggggttttatcgtgttagttaggatggttttaattttttgatttcgtgattcgtatattttcgttttttaaagtgttgggattataggcgtgagttattacgtttggttcgattttttttttaaatgttggtttttttggttttaatattttgttattattttgataattaagaaatatgtttttgttttaaataataaagattaagagattatttgttttaggtaaatagaaaaatttttattattttttttaatgtgtttagtaaaattataaaggtaattatgttttggggaattaattattttatatagtatgaagtaaataaagttattttgtttaataaattaaataatattagttagttgaggggtataaagaatgaattaattttttttttttgttttattaattttttaagttttatttttaagtatttttgatttaaagataagattgtttttttttgattatttaatttttattatgtttattattaaagttaaagtagatgtaataagttttaatattattgaatttaatattttaattaatagaaatatagattatatttaggttgggtgtagtggtttacgtttgtaattttagtattttgggaggtagaagtgggtggattttttaggtttaggagtttgagattagtttgggtaatatagtaaaatttcgtttttattaaaaattgaaaaaaattagttgggtatggtggtacgtgtttgtagttttagttacgagaaaggttgaggtgggaggattatttgagtttagggaggttaagtttgtagtgagtcgtgatcgtattattgtattttagtttgggtaatagaatgattttgttttaaaggaaaaaaaagaaagaaagaaaagaaatgtagattacgttttagtagtttgggtgaaagttatgaaaataatttacgggaaaaaataattagtttgtgaaataatttttgtaatataattaagagttagtgagaggaggtgatagttaattaagtatgtgaaatgaaatgttttgtagttagttatatttttaggagggttatttttagtttatgtagtttttataagttgttttaatgttataaaaatattatttttatcgagtttatattatttttttggagattgaagagatatttaaattaaatttttgagtttttttttttagtttatttaagttaatttataaaaatataggggaaagaatatagttttaaaaaattaaaacggaaaataaaaaatgtagaaattatagtatgaagttaagagtttaaataagtttataatattaaagatattttatgagtaaaataagaaaattaagtagtaattatttagtttattgattatggttttttttggaatgtagtgaaagatttagttttgttttttgtatttattataggtgttaagagtttaaggagggtttaagattaagggaagttaaatattgttagggaaagtaaatatatgtttaaattattatttttaaataagtttattatttataatttaaaattattaatttttatgtggtttttgtaagtattttttaattttatttttaaataaagagaaattattacggaagtattttttttagaagataatttataattattatttaattcgatttttttttttttttttttttggaaattttggtatatggatttgttattattgttaagaattatttagggttaggcgcggtggtttacgtttgtaattttagaagtttgggaggtcgaggtaggtggattatttgaggttaggagtttaagattagtttggttaatatggtgaaatttcgtttttattaaaaatataaaaattagtcgggtatggtggcgggtatttgtaattttagttatttgggaggttgaggtaggagaattatttgaatacgggaggcggaggttgtagtgagttaagatggtattattgtattttattcgtggtgatagagcgagatttcgttttaaaaaaaaaaaaaaaaaaaagagagacggagttttagttttgttgtttaggatggtatgtagtaatacgatttttgtttacggtaatttttgttttttgggtttaagtgatttttttgttttagttttttgagtagttgggattataggtatatattattgtgtttagttattttttgtatttttagtagagacggggttttatcgtgttggttaggttggtttcgaatttttgattttaggtgatttatttgtttaggttttttaaaatgttgggattataggtgtggtgagttattgcgtttagtttttttttttattttggggaatattttattttgtttatggagtagttgttgttttattattttatttttttaataaatttgtttatattttgtattgcgattcgttttgaattttttttgtatgagatttaagaatttttttttgtggtttggattgggattttttttttgtaataaatgtattggttgataggagaataaagaaaaaaaaagaggaaaaattagagtaatttttttatataattatattatatgatcgttttgttaattatgataatagttaataaaataatttttttatgtttaatttttagtttatgtttgtatgttttaaaatgttttttatagttggtttgtttaattatttaatgaaggattaaatattgtagttggttgttatgtatttagttttttaattttgatttttagattatttttagtttattttattatattcgttttaagttttttgagttagttaattttaatttgttatgtattttataaaatgttttttttttttttatagtcgattgtttttttgtttttggagtttttttttttattttttaaggttattttgagtatatttttttgtttcgtgaaatttatttttttttttttttttttttttttgagtttaattagttgttatcgtaggtttttgtttttttttatagtgtggttagaattcggttttgtttgttagtagagggtagggtcgttgtttttttttttttgtagtttttaagtttagtatatgtttggtatttagtggtagtataataaggaatttgatgaatattttttttttttgtttttcgttttttttttatagtttgttagttatggttaggaagagtaagattcggaatgggtttggtgtgtttcgcgggaaggtcgtgattttggaagatgttttttagtttagttcggattttttttttttagttttagagattttttttattttttgtgtatatatatatattaagatttaggaagtggtttttgaggtaggattttaagagtttaaggagtggggtcgaggttggaggtgtgggggtgtgacggtcggttttatttttcggtttgtttagattagttttttttggggattatttttggtatataagggagggaggtagtttgatttttttagttcgtttttagtttttatttggttttgttttttgggataagacggggaaatttagaggatgtaagttttttttgttttcgtgtttttttttaagttttcgttattatagacggatgtaggagttgtttgggaggttggaagtatagattttgttaatttttttttagagggcgggattcgacgcggacgtgttttgattgattgggtagcgtggtttcggggaagggtttttttttttttttttagattaggatttttggaaaatggagaagttgtgttaatagaggggggttagaaatttttattttagaatgttgtagaatgttgggagatatttaggatgtgagttagggattttttggaagtgtttgttttggttttattcgattttaggtagtttttagttgtttgtatagtcggatggggagggggtttgtatagagttggagttagaggagagagttggtttattttttacggtaggatggggaaattttatagattatattgttattcggttttagtttttcgtttcggcgtttagagggtaatttttatttatttcgttcgtttttttgaattagagtgatttaggttgcgtttcgtttcgtttttttatttcgagttggtacggaggtatagcgttagaggggggttttaggcgtttcgaggttttgtttttgcggttttttttttgcgggggtgggcgttttttttcgggtaggggttacgtggttttggtcgggcggggggttcggtttatttcgcgtcgggtttagtgatttaggtcgtagttgttatcgcgttatatgagggaggtcggcggttattcggcgggggaggggatcgtggttggagttcggggcggggtcgcgcggtaggcggggcgggagtcggggggcgtagttagagagtttcggagtcgcggcgggagaggaacgcgtagttagttttgggaagtttaggtgaggtcgcggggattcggcggatttcggcgcgggttgggagagattattcgtagtttttttttttagggttcgttttaggttcgcggagattcgttcggcgttttttagtcgttttggagtaattttgtttcgaagttttttgggttcgggtagggtgtggcgggggtgttggttgtattttttttttttttggtgggcggggaggttagagtttaggggaaaggggttggggcgggggtcggggttgggttgaagatcgtttttttaggttgggtgttgggtggggaaagggtgtttgacgttcggagattggcgggtcgagggtcggcgttaggtttaagtttttgtcggcgtttttggatttgttttgggttttagaggcggcggggcggggttcgggtttcgcggtcgtcgtttttattttttttttgcgggtaaagagggggttgggagacgtggattcgatcgcgggttttcgggtgggaggggtcgggaatcggggtcgtgaagggaagttttcgagggtcggtcgggagttcggaaatcgaggttttttttcggttagttttaattttttcgtttttttttttgttttagg

SEQ ID NO: 348 - DNA, 5659 bp, Artificial Sequence
  chemically treated genomic DNA (Homo sapiens)
tttggggtagaggggagggcggggggattaaaattggtcgaagggggatttcggttttcgggttttcggtcggttttcgagggtttttttttacggtttcgattttcggttttttttattcggaaattcgcggtcggatttacgttttttagttttttttttattcgtaggagaggggtgggggcgacggtcgcgaagttcggatttcgtttcgtcgtttttggggtttaggatagatttaagggcgtcggtaggggtttgagtttgacgtcgattttcggttcgttagttttcgggcgttaaatattttttttttatttaatatttagtttggagaaacggtttttagtttaatttcgattttcgttttagttttttttttttgggttttgattttttcgtttattaaaaaaaaaaaaagtgtagttagtattttcgttatattttgttcgggtttagggaatttcgaagtaaagttgttttagggcggttggagagcgtcggacgagttttcgcgggtttggggcgagttttggaggaagggattgcgggtggttttttttagttcgcgtcgaagttcgtcgggttttcgcggttttatttgggttttttaaggttggttgcgcgtttttttttcgtcgcggtttcggggttttttagttgcgtttttcggttttcgtttcgtttgtcgcgcggtttcgtttcgggttttagttacggttttttttttcgtcgagtggtcgtcggttttttttatgtgacgcggtaatagttgcggtttgagttattgggttcggcgcggggtgggtcgagtttttcgttcggttagggttacgtggtttttattcggaagaaggcgtttattttcgtaaagggaaagtcgtaagggtaagatttcggggcgtttggggtttttttttggcgttatattttcgtgttaattcggggtaggagagcggggcggagcgtagtttgggttattttggtttagagaagcggacgaggtgggtgagagttattttttgagcgtcggggcggagagttgaggtcgggtgataatgtggtttgtgaggtttttttattttatcgtaggggatgagttagtttttttttttggttttaattttgtgtaagttttttttttattcgattgtgtagatagttggggattgtttggggtcgggtggggttagaataaatatttttagaaagtttttggtttatattttgggtgttttttaatattttatagtattttagagtggggatttttggtttttttttattagtatagtttttttattttttagggattttagtttgagaaaaggggaggaagttttttttcgaagttacgttatttagttaattaagatacgttcgcgtcgggtttcgttttttgggggaggattgataaggtttgtgtttttagttttttagatagtttttgtattcgtttgtgatagcgagggtttgggggaagatacgaaggtaggagaggtttatattttttggattttttcgttttattttagaagataaagttaggtgagggttggaagcgggttagggggattaagttgttttttttttttgtgtgttaggggtggtttttagaaggagttgatttgaataggtcggagagtaggatcggtcgttatatttttatatttttagtttcggttttattttttgggtttttaaggttttgttttaagaattattttttgagttttagtgtatgtgtgtatataaagaatgaaagaagtttttagagttaaaggaaggagattcgggttgggttgagaagtattttttaggattacggttttttcgcgggatatattaagtttatttcggattttgttttttttgattatggttggtaggttgtggaggaggagcggagagtagaagaaaggagtatttattaggttttttattgtgttgttattagatgttaggtatgtgttaggtttgggggttgtaaggagaggaagatagcggttttgttttttgttagtaggtagaatcgagttttggttatattgtgaagaaaggtagaagtttgcggtggtagttggttaagtttagagggagggaaagggagaggagaatggattttacggagtagaaggatgtgtttaaggtgattttggagaataaaggggagagttttagggatagagaagtagtcgattgtggaaaaaaaaggagtattttgtaaagtatatggtaggttggggttggttggtttaaagggtttgggacggatgtggtgagatgggttgaaggtggtttgaagattaagattgagagattagatatataataattaattgtaatgtttggttttttattgaatggttgaataaattagttgtgaaagatattttgggatatatagatatggattgagaattagatataagaaaattattttgttaattgttattatggttaataaaacggttatataatatgattatgtagagaagttattttagttttttttttttttttttttttatttttttattagttaatgtatttgttataggaaaggggttttaatttagattataagagagggtttttggattttatgtaagaaagatttagggcgagtcgtagtgtaaagtataagtaagtttattaagaaagtaaagtggtgaaataatagttgttttatagatagagtaggatgttttttaaagtaagaggaggggttaggcgtagtggtttattatatttgtaattttagtattttgggaggtttaggtaggtggattatttgaggttaggagttcgagattagtttggttaatacggtgaaatttcgtttttattaaaaatataaaaagtagttgggtataatgatgtgtgtttgtagttttagttatttaggaggttgaggtaggagaattatttgaatttaggaggtagaggttgtcgtgagtagaaatcgtgttgttgtatgttattttgggtaataagattgaaatttcgttttttttttttttttttttttttttgagacggagtttcgttttgttattacgggtggagtgtagtggtgttattttggtttattgtaattttcgtttttcgtgtttaagtgatttttttgttttagttttttaagtagttgggattataggtgttcgttattatgttcggttaatttttgtatttttagtagagacggggttttattatgttggttaggttggttttgaatttttgattttaggtgatttatttgtttcggttttttaaatttttaggattataggcgtgagttatcgcgtttggttttaaataatttttaataatagtagtaagtttatgtattaaggtttttaagaaagaggagggaagagaatcgagttgggtagtagttataggttgttttttgaaaaaggtgttttcgtgatagtttttttttgtttggagatagagttaagaaatatttgtagagattatatgagaattaatgattttggattgtgaatggtagatttgtttggaggtgatgatttagatatgtgtttgttttttttggtagtgtttggttttttttgattttaagttttttttaggtttttgatatttgtgataaatgtaggaggtagggttgaattttttattgtattttagaggaggttataattagtggattggatggttgttgtttagtttttttattttgtttatagggtgtttttgatgttataggtttatttgaatttttagttttatattatagtttttgtattttttgtttttcgttttgattttttaaaattatgtttttttttttatgtttttataggttaatttggataagttgaaggaaagagtttaaagatttggtttgaatgtttttttaatttttagaaaggtaatgtaggttcgatggaagtaatgtttttgtgatattagagtagtttatgggaattatataggttggaaatgatttttttgagaatgtagttggttataaagtattttattttatatatttgattgattgttatttttttttattgatttttgattatgttataggaattattttataagttgattgttttttttcgtggattgtttttatagtttttatttaggttgttagagcgtggtttatattttttttttttttttttttttttttttttgagataaggttattttgttgtttaggttggagtgtagtggtgcgattacggtttattgtaggtttgatttttttgggtttaggtgatttttttattttagtttttttcgtagttaaaattataggtacgtgttattatgtttagttaattttttttaatttttggtagagacgggattttgttatgttatttaagttggttttaaatttttgggtttaagggatttatttatttttgttttttagagtgttgggattataggcgtgagttattgtatttagtttgagtatggtttatatttttgttggttaagatgttaaatttagtgatgttaaaatttattatatttattttaattttgataataggtataatgggaattaaataattaggagaagatagttttgtttttaggttagaagtatttagaaataaaatttggaggattggtggaataaaaaaaaaaagttaatttattttttatgttttttagttaattgatattatttagtttattaagtaagatgattttgtttattttatgttatgtggggtgattggttttttagggtatagttgtttttgtagttttgttaggtatattggagaaaatgataaggatttttttatttgtttagagtaggtggttttttaatttttgttgtttagaataagaatatgttttttggttgttaaagtggtggtagggtattaaaattagaaaaattagtatttaagaaaaaaatcgggttaggcgtggtggtttacgtttgtaattttagtattttgggaggcggagatgtgcggattacgaggttaggagattgagattattttggttaatacggtgaaatttcgtttttattaaaaatataaaaaaattagttgggtgtggtggcgggtgtttgtagttttagttatttaggaggttgaggtaggagaatggtatgaatttgggagggggagtttgtagtgagttgagattgtattattgtattttagtttgggcgatagagcgagatttcgttttaagaaaaaaaaaaaaaagaaagaaagaaaaaaattagtcgagtattatcgtgtttgtaattttagtattttgggaggttgaggtgggtagattatttgaggttaggagttgagattagtttagttaatatggtgaaattttgtttttattaaaattataaaaattagttgggtatggtggtatatgtttgtaattttagttatttggggggttgaggtgggagaattatttgaattcggaaggtagaggttgtagtgagtcgagatcgtgttattatattttagtttgggtaatagagtgagattttgttttaaaaaaagaaaaatattagtatttttaatttagtatgaaagcgtttagttttttagaaagttattggaagaaatttatttgatattggttatatattttgtttgggaaaaaaattaaatattaaaagtaattatta

SEQ ID NO: 349 - DNA, 9483 bp, Artificial Sequence
  chemically treated genomic DNA (Homo sapiens)
aatatttataatatattattataattttttatgtttatttttattttttttatatttttttgtgaatttttttttaagataaaagttttagaatgttatttatttggaggtattttttaggtatgttaggtgtatatagatttataggaagtgggataagtagttttgtttaaatttattatgtatttattaaataagatttaagtataattggatatattttatgatagtatagtagtttagatttcggtttattttaaaattttatatggtatatttgttatttttatattattatttttgagagtagtttttaaaaatgttgtatatggataagtttggaattaatttaggtaaagtatttagatatggttaagcgttatattttatttttaatatagttttttttttatttttttatgtattttatttttagaaatagttaggttttttagagtttaagtttgtgtgtatataagtattattttttatttttattgttttaagttaaaaagaagaaaatgttagtttatattttttaagtttattttttgtgttttagatgttttattgaagaggaaagttagaaagtttaaagatttgaagaggatagaaggttggaaagtgtttaaaattggaaatttttcgtttatttatggttatttttattgattttttacggtaaataatttaaaaatataaaggtatttgtaggttaaaaataaattttattaatttgtgtaatttgtattaatttgagagaggatgatgtattttaaattgaagttttgatttataagaagattaaaagttatttagaaatttaatttatttattgaaaggaaaaaaaaaaaaagagagatgagtagtttgttttcggaaattgttttaggtcggaagtttgtggtttttgtttatatgtatttaaaagtattttgttgttgtagttgtttgataagtatagagtattttattttttttgtatattttgtatttagtttatattattttatttttattttttttttgacgttttattttggattttatatataaggttatataggaaggaaagttgtattgagttttggtgttttgaaagatttttgttaattttgttttcgtattaatttttttaagtttcggttatattatttttttagttatacgatgaaatgtgaatgataatttttgttttaaaaatattatttaattttttaatatattatttatgaaagaagatatataaaatgtttttttaaaatggaaagttatatattattgttatttgtgttttataaagaggttgaaaggggtttgtttgtataaggtttgtttttttatgtgtgttttttttttaagagaattaaatttattagggttaattataataagtttgtttttatgttttgattaaaaaaaagggggtattgaagaattttttgatttttaaattttttttatattgtattttgattttttatatttttttttgtttttttttggaattttacgtgtagagatatgtttttttggtttaataagtattgattagtatcgtgggtatatagtttattgtatttaagaggatattgttataagtgaaatagtatatttttaataattattgaaatagcgtggtgttaataattatatgttgttaataattaatagtatgtgttagttaggatagtgttaagtaattattatttattgtgagtttaaattgattgtttttttaaattaaaagagattttttatatttaagaaaaatagaaagaattatggaagggagggaagataaatgaagaaaaagttaattttttaataagtttaggtttttgtagaagattttgagtagtatggggtttagtggatatttaggaggttattgataattatgtgtttggtacgttggttattttttttttgtagtggttgtttttttttacgtatttaagtattgattttaataaaatatttgggttatttttataaaaaaaagtagagaagggttaggagtagtggtttatgtttgtaattttagtattttgggaggcggaggtaagaggattatttgaggttaggagttcgagattagtttggttaatatagtgaaatttcgtttttattaaaaaaaaaaaaaaaaatataaaaattagtcgggcgtggtggtgggtgtttgtaattttagatttttaggaggttgaggtaggagaatcgtttgaatttaggaggtggaggttgtagtgagtagagatcgtattattgtattttagtttgggtaataagagtaaaattttgtttcgaaaaaaaaaaaaaaaaaaaaaaagtagagaaaaatgattgtaaaataaagttaatagattttgattaatgttataatgtttaaaaatatttttttaaaataagatttttaggtattatttttttgtggtttagggtatatatgtaaatatatattatacgtaatatatatataaaaatttgtgtatattagatgtgtgtgtgtatatatatatttattaatttgattatggttgaagaagtaagaaattttgagtaaatgagttttagtattatgaaaattgttagaggtggttgtaggagattgtagttttttttgttttttttttagacggagaagagatatattatattatattagtaattatgttgtgattttttagttattatttttgaatgttttatattaaatgaggaattttttttttttatgacgtgtattaaattgttatttttttttatataattgaaggtataatatgtattaaatattatattaaaaaaatttagaatttataatttttttttatagaaatattataaattggatgttatatttttagtttatagataataaagttaaagtttagtggatttgtatggttaattttttgaagtattattggtttattgtatttatttttatttttttttttaaagaagttaaatttttttttattttatagagtgtgtttttgtttttgttttttttgtttttaaatttttaatggttaattttttttttttatttttatttaattttatatatgatttttttaataagattatgtttgatgatttatataaatgattttatatttatttttatgtattatttggttttttgtatgtagtagtttaaggttatatattttttaattaaataattttacgaattttaataaatagtattttatattttagaatttttagagttttatatatattttttatttatttacgtatttagtaagggtatggaatatatattagattttagttattacggtaggtgttagaggtatagaggagataagttaaagtttttgtttttaagtagtttatagtttagtaagggaaatagataataaattatgatataatattagatattgatagtaatttgtataggtatagagtgtgaggttttattttatatataatagtaattgataatttttttgagtaggtggtagttgaagagtgagtcggttaaagggagagcgagatatgtagggagatggaaaaagaattttttagagaaaaagtaaaagttttgtagtggtaggatgtttggtatttttaaggaggaggtttttgttagagaggatattgaataataggaaaaatgataagagaggtaattaggggttatattatgtataaagtatttttaattattaggtttttggattttacggtatatttgataggaagttttttaaagtgtagtggggggaggagttaaatattttattaaaattatatgaattaattataaaataatggttttagttgttatgtggaaaagggattaagaaattgattgaaaaataggatggaagtaaagggagtttttagggttaatatgtatttttttgtgttttaggtagataaatgtatttaatggtttaattaatttttttagatgataatttttaatttatttatgtataaaatttaacgtttttattttaaataagtgatattaataataaaatttggggtattaagattattaattagagtggtattttgatttttttttttaaattattatatatagttttttgtatttattttgcgttgattgttattatttgtttgagtgagattgatattatagcgatgttttaaataataattatattttaaaagattgaagttttagaggtatttgaagagaataatttagagtatagggggagaattgaaggagttgttattgaggtgatataaaagtagtttaaatgatagtaaaatgtgataagaaaattagtaggaaataaatgaaatagataatttaagataaataattttagagtatagtaaggaagttttagattataagttttttgttttttgtatttttattttttattacgtgatatatttagttattagggaagaagcgaatgatatatttttaaaaattaattcgtagttttttaaataaaatttttttaagttggagagagatttatgagtatagagattttaaaatttatgtttagtaataaattttggggttttagatagtgttaggtgtatagggggtgtttagtaaatattagttaaatgtatgtataaatcgataaacgggatttttggaaaatattatattttttttttttaaattatttttattttaaagataggaatttttaatttttaattttttatttagattatgttgttttttaaattgtttatgttttttagaaatttaaggtaggatgttttagagtttgggaaaattttattttttttttgttatattttatagttgtgagaaagtatattttagataatagggaaaatttatattttattataataatatattatatattgtttggtttattggagtataaattaaagagaaataatgtagttaagtaagtaggcggtaagaggaagggggcggagatattattagggagtataaattttgagatgttttagagttttatagatttaataagagttttagtaaagatttttattgtagtttgatttgatttgagattaattagggaattttgagaataaagatgagttttgaaaattgtttcgtagtagagaatagttttttgtattcggagagtggataagaaagtaagttagatttgattgtttatttattttttggtatttttatatatgatattaatagtagttatataagatatattggtaatttttttatatatgatatataattttagagaaatatattgttaatttttatgtatgtgatatttaatggttgttagggaaggaagtgaggttttgttttttagagaagataggtttttttttagggaagaggtaaatttttttttatttataagaagatagaatatttgagatgagagaaagtcgtaaaaatgaattttagaagatttttaaagatttttttttttgttttagtttatattattttagtgtttagatttaattagaaaattttttgttttagtttagttattttttattattttttttatatttatttgtatattttttaggaagtgttgtttttttttatgaaaaattttgttttttatataagtaattatattgtttgtttttttttgtatttagtgtttgtttttagtgtattttattttgtgtttttatgatagtattttttagttgttggaaatgggtaagtttgttatttttgagagaatagttatattagtagatgaaaatttatagtgtttatttgtaatttgttaaaaaaaaaagttataaaagaattttcgaaaatgtaattttttgttttggtattttttataggattttttttttttattttatttttttatttaatttttttaatttttggttttaaagattatgtaatttagaatttgtttttttttttttttgttttttagtaaaatataattattttagaaattttttttttttttatttgtttattttatttatatatttagtttattttttgttattgggattttgtttattgtttttttatattttatttttgtaaaatttgttgagtttttttatttatttttttttttttttagttaatgaggtattttaaagtattagtatttaggaattagtttatttgttagtaagagcgatttattaataaagggatatgtaagaaataggagaattaaaataattttgtggaaagggattattttttaagcgtgtgtttattatattagtttattttcgaaaaatattagttattttttataaatttattttgtgtttaagaatataaaatatagtgtggattataaatgtaaagtatgtaaatttttaggtaattaggcgagttattatttacggtataggtgtgtcgttaaaaagaaataataataataataataataataattatttaataaatagagagtataggtgaaagaaggatttaatatagaaatttttaattttttttgatattgttttaatttttttttgaatgtttgatttaggttgttttagttatttttggacgttatttttgggtgatttaattagtagtaaattgagttgatttttaatttttttattaatgtgtaggatttgaaattaaagtaaaagtgtgttgttgagggaaatgttttgttatttaggagataagttaagttgtgggtaataatagtttttaattgtaattttagtattttgggaggtcgaggtgggcggattacgaggttaggagatggagattattttggttaatacgatgaaatttcgtttgtattaaaaatataaaaagttagtcgggcgtgggggcgggcgtttgtagttttagttatttaggaggttgaggtaggagaatggcgtgaattcgggaggcggagtttgtagtgagtcgagattacgtaattgtattttagtttggacgatagagcgagatttcgttttaaaaaataaataaataaaatagtagtttttattaatgggaataaagtattatttgagagttattttaaagtttattttttcgttgagtcgatgggttgattgagattttggaatttacgggttattggggtgtgttagtgtttattgaggagatagagttgttgtaatattgagtttaagtagtacgattgatttatataatgtgaagtgaaattagatagagtttcgaatttggtattttgggtagtaaaggcggtttttaatgatgattttatatcggtgaataaagaaaaatttgttttgagaagttgagaaaatcgagttagacggtagtgaagtaaaggttttttttgtaaaatttgagtgtcgatttgtgatgggaaaaataatttttagataaagtaaaagttgatgtggatattagtatttagtaaattattgtgaaaaaaaggtaattttttttggtttagtttatttttagataaatgttttaagggtaaaaatatgtgtattttaagatatgttttatgtaaatttttttaagttatgaaaattatttatattgaaaaatagaatgttttttattttgaaattgttttgtattgttagttatttaagtagttattttatattttggtttttgagaatataatagggatttgtatattttttgtggggtcgtattttaagatttttgatagtttattttgtaaaattaaaatttaaaatttaagtcgtaaaatttttttttttttttttttagttatttatttagagtgtagaatagatatttttttagagttttttgtaattattagttatcgttaatattatatttttattttaaatttttttatagaaatattgtttgttgggaaaaaaaaaggtttttattttgttttattattgtatagagggtaaatgaaataattttcgttgaatatttggtttataatattgttatattttttttattattttaatattttttgaaaaatttaaatttttattgtttatttatatattattttaaattgaggtttagtttatatacgatgaatgtatagttcgtaggtatatagtttaacgatttatgatagtggtataattataagattagtaatatttgaatttttttattattttagatagtttgttttgtgttttattttagttaaattattttttttatatatataaaggtaattattgttttgatttttgatattagagtttagattaattattatttaaagttatgtaaatgtaaatatgtagtatataattttttgtggttggatttttttttatttaatattttttttggagatttttttattttgttgtatgtattagttgttttattttgaattgttgagcggaatttttttgtatggatatattataatttgtttatttatttttttgttggtggatatttggattatttttggaatttggtttttaagaataaagttgttaggagtatttttgtataaggtattttgagaatatatttttattttttttgaggatatatataggagtaggtttgttgggttatagaaaaggtatatatttaattttataagaaatagtttttaaagtgtttttttaatttatttttttattaataatatttgaaaattttagttgttttatatttgtagtaattttattaaaaaatattgttacgtttaaaattttgtttagttattttaatgttagatatttatatagtaatttaatattttattttatgatattatttatatttattttatttatattattttttttaaatagtaattataaggagattaaggaattatgttagaattttttatttatttatttatttatttttttagataaggttttattttgttatttaggttagagtgtagtggtgtaattttcgtttatagtaatttttgttttttaggttaaagcgatttttttattttagatttttaagtagttgggaatataagtgcgtgttattatgattagttaattttttgtatttttggtggagatagggttttattatgttgtttatgatggttttgaatttttgagtttaggtgattaatttatttatttcggttttttaaaatgttgagattataggtgtgagttattatgttttagaatttttttatgtgttttttggggtatgtgtatatttaataaacgtttttattattattaaaataaattgattatatatttagaatttttatagttattaagtgtataaattatatgtgttaggtaaatattttggggagatattttataattttattattatgtttgaattgttttattttaagttaataataaattatttaaatttatttaaaattgggggtaaattaatttagaaatttttataaagagacggggaaattttatataatgagataggaaatattaagtttaaatgttttaaaagaatgttgtatatttttatagtatttttatagtttgtttgaatttattattaatttttttttttttaga

SEQ ID NO: 350 - DNA, 9483 bp, Artificial Sequence
  chemically treated genomic DNA (Homo sapiens)
tttggaagggagaaagttgatgatgagtttaggtagattatagaagtattataggaatatgtaatatttttttgaggtatttaaatttaatattttttattttattatatgaaattttttcgtttttttatagaaatttttaagttaatttatttttaattttgagtgaatttgaatagtttattgttggtttgaaatgaaataatttaagtataatgatgagattataaagtgtttttttaaaatatttatttgatatatatgatttatatatttagtaattatgaaaattttaagtatataattagtttgttttaatgatgataagaacgtttattaaatatgtatatgttttagaagatatataaaaaaattttagggtatggtggtttatatttgtaattttagtattttgggaggtcgaggtgagtggattgattatttgagtttaggagtttaagattattatgagtaatatggtgaaattttgtttttattaaaaatataaaaaattagttggttatggtggtacgtatttgtgtttttagttatttgggagtttgaagtgggaggatcgttttagtttgggaggtagaggttgttgtgagcggagattgtattattgtattttaatttgagtgatagagtgagattttgtttaaaaaaataaataaataaataaataaaaaattttagtataattttttaatttttttgtagttattgtttgagagaaatgatgtgaatgggataaatatggataatattataaagtaaaatattgaattgttatataaatatttgatattaaaatgattgaataaaattttaaacgtgatagtattttttggtgaagttgttgtagatgtggagtaattggaatttttagatattattggtgggagagtaaattggaaaaatattttggaaattgttttttataaaattaaatatatgttttttttatggtttaataaatttatttttatgtatatttttaagaaaaatgaaaatatgtttttaaaatgttttgtgtaagaatgtttttagtagttttatttttaagagttaaattttagaaataatttaaatatttattaataggaaaataagtgaataaattatggtatatttatataagggaatttcgtttagtaatttaaaataagataattgatatatgtaataaaatgaaggaatttttaaaaaaaatgttgagtgaaaaaaaatttagttatagaagattgtatattatatatttgtatttatatgattttaaataatagttggtttaagttttggtgttaaaaattagaatagtagttgtttttgtgtgtgtaggaaaggtaatttaattggaatgggatatagggtaaattgtttagggtgatggaaagatttaaatgttgttggttttgtggttatattattgttataagtcgttaaattgtatatttacgagttgtgtatttatcgtatgtgaattaaattttaatttaaaatgatatgtgaatgaatagtaaaaatttgaattttttaaaagatgttaaaataatagaggaaatgtaatagtattatagattaaatatttagcgaaagttattttatttattttttgtataatggtgaaataaagtaaaagttttttttttttttaataagtagtgtttttatggaaggatttagaataaaaatatgatgttaacgataattgatagttataaaaaattttaagaggatgtttgttttatattttaagtaaataattgaggaaggagaaaagagaattttgcgatttagattttggattttaattttgtaggatgagttgttaggagttttaaaatgcggttttataaggagtatataggtttttattatgtttttaaaaattaaaatgtaaaatggttgtttaagtaattgataatgtaaaatagttttaaaatagaaaatattttattttttaatatggatgatttttataatttaaaaaagtttatataagatatattttgaaatatatatatttttatttttaaaatatttatttaaaggtaaattggattaagagaagttgttttttttttatagtaatttattgggtattggtgtttatattaatttttgttttatttggaagttattttttttattatagatcggtatttagattttgtaagagaagtttttattttattgtcgtttagttcgatttttttagttttttaaagtaaatttttttttgtttatcggtatagaattattattggaagtcgtttttgttatttaaggtattaagttcggagttttgtttggttttattttatattatgtgagttagtcgtgttgtttgaatttagtattgtaatagttttgtttttttagtgagtattaatatattttagtgattcgtgggttttagagttttagttagtttatcggtttaacgagggagtaagttttgggatgatttttagatgatattttatttttattaatgagggttattgttttatttatttattttttgagacggagtttcgttttgtcgtttaggttggagtgtagttgcgtgatttcggtttattgtaagtttcgtttttcgggtttacgttatttttttgttttagttttttaagtagttgggattataggcgttcgtttttacgttcggttaattttttgtatttttagtatagacggggttttatcgtgttagttaggatggtttttattttttgatttcgtgattcgtttatttcggttttttaaagtgttgggattataattgagggttattgttatttatagtttgatttattttttaggtgataaaatattttttttaatagtatatttttgttttgattttaggttttgtatattaatggagaagttgaaaattaatttaatttgttattaattgaattatttaaggataacgtttaaggatgattagggtagtttaaattagatatttaaaagaaagttgaaatagtattaggaaaagttaaaaatttttgtattaggttttttttttatttatgttttttatttattgagtagttattattattattattattattatttttttttggcggtatatttgtgtcgtaagtaatggttcgtttgattatttgaaaatttgtatgttttgtatttgtaatttatattatattttatgtttttaaatataggatggatttatgagaagtaattgatgtttttcggaagtaaattaatatagtagatatacgtttagaaaataatttttttttataagattgttttagtttttttgttttttatatatttttttgttaatagatcgtttttgttgataagtagattaatttttaagtgttagtgttttagggtattttattaattaaggagaaagagggataaatagaaaaatttaataaattttatagaagtaaggtatagaaaaataataggtaaaattttagtaataggaaataagttagatatgtggatagaatagataaatagaagagaggaaaatttttaagatgattatattttgttgagagataaaggaaaggaagaataaattttaagttatatagtttttgaagttagagattggaaaggttaaatagaaggatgaaatagaggaaaagagttttataaagaatattaaagtaggagattgtattttcgggaatttttttgtgatttttttttttagtaaattataaatggatattgtaaatttttatttgttgatatagttatttttttaaagatggtaaatttgtttatttttagtaattagaggatgttgttatgagaatataggataaggtatattgaaagtagatattgaatgtaaaggaaggtaaataatgtaattgtttatgtggaaaatagaattttttataaagagagataatattttttggagaatgtatagatggatatgaaaaaaatgatggagaataattgggttagagtagaaagttttttaattaaatttaaatattgagatgatataaattaaagtaaagagaaagatttttaaagattttttgaaatttatttttgcggtttttttttattttaggtattttatttttttatagataaaaaggggtttattttttttttgaagaagaatttgttttttttaaaagataaagttttatttttttttttaataattattagatattatatatatagagattagtagtatatttttttaagattatatattatatatagagagattattagtatattttgtataattattattaatgttatatatagagatattagagagtaaataggtaattagatttgatttatttttttgtttatttttcggatgtaaagagttgttttttgttacgaaataatttttagagtttatttttatttttaagattttttagttaattttaggttaagttaagttatagtgaaagtttttgttggagtttttgttgagtttgtgaggttttgaggtattttagagtttatattttttgatgatgttttcgtttttttttttttgtcgtttatttgtttgattatattgtttttttttaatttatgttttagtggattagataatgtatagtgtgttgttgtggtgaagtatgggttttttttgttgtttgaaatgtgtttttttataattgtaaggtgtagtaggaggaaagtgggatttttttagattttgagatattttgttttaaatttttagaaaatataaatagtttaggagatagtataatttaagtaaagaattaaaagttagaggtttttgtttttgagatgaagataatttggagaaggagagtgtagtattttttaggaatttcgtttatcgatttatgtatatatttaattgatatttattgaatattttttatgtatttgatattgtttggggttttaggatttattgttgaatatgaattttaagatttttatgtttatggatttttttttagtttgaaagggttttatttagaaagttacgaattggtttttggaagtgtgttattcgttttttttttggtgattagatgtattacgtagtaagaagtaagaatgtaggaaatagaaagtttgtggtttggaatttttttgttatgttttaaaattgtttattttaaattatttgttttatttgttttttgttaatttttttgttatattttattgttatttagattgtttttatgttattttagtaatagtttttttaattttttttttgtgttttaggttattttttttagatatttttgagattttagttttttgaggtatgattattatttaaaatatcgttgtggtattagttttatttagataagtaatgatagttaacgtaagatgaatgtagaaagttatgtatggtgatttaaggagggaaattaaaatattattttgattaataattttggtgttttaaattttattattaatattatttatttagaataaagacgttaaattttatgtataggtgggttggaagttattatttagagaagttagttggattattagatgtatttgtttatttaagatataaagaggtatatgttggttttaaaagttttttttgtttttattttattttttagttaattttttagttttttttttatatagtagttagaattattgttttataattaatttatatgattttggtgaagtgtttaatttttttttttattgtattttgaaaggttttttattaaatgtatcgtaaaatttaaagatttaatagttgagaatgttttatatataatatggtttttggttattttttttattattttttttattatttagtattttttttgatagaaattttttttttaaaaatgttaagtattttattattatagggtttttattttttttttaaaagattttttttttatttttttgtatgtttcgttttttttttaatcgatttattttttagttgttatttgtttagagaaattgttagttgttattatatgtaaaatagaattttatattttgtgtttgtatagattgttgttaatatttgatattatattatggtttattatttgttttttttattagattgtaagttgtttgagggtaagggttttgatttgttttttttgtgtttttaatatttgtcgtagtaattggaatttagtatgtattttatgtttttattgaatgcgtgaatgaatgaaaaatatgtataaaattttaaaagttttaaaatatggagtgttatttattggggttcgtaggattgtttggttgagaagtgtatgattttaggttgttatatgtaaagaattaggtaatatataggaatggatgtgaggttatttatataggttattaggtatggttttgttgaggaggttatatgtggaattaaataaaaatgggaggaaagagttaattattgaaaatttgagaatagaaagaataagaataagaatatattttataaaataaaaagaagtttagtttttttaaggaaaagaatgaaggtaagtgtagtaagttagtagtgttttaggaaattgattatataagtttattgagttttggttttgttatttgtaaattaaaaatataatatttaatttataatgtttttatgaagaaaaattatgaattttaaatttttttaatatagtatttggtatatattatgtttttaattatatggaagggagtgatagtttggtatacgttatgaaaagagaaagttttttatttgatgtaaggtatttagagataataattgagaagttatagtataattgttgatgtaatgtaatgtgtttttttttcgtttgagaaagagatagaggaaattgtagttttttataattatttttagtagtttttatggtattaagatttatttgtttaaggttttttgtttttttaattataattaagttaatggatgtgtgtatatatatatatatttagtgtgtataggtttttatatatatgttacgtataatatatatttatatatatgttttaagttatagaaaaatgatatttagaaattttattttgaggaaatatttttaaatattatgatattgattaaaatttattaattttattttgtagttatttttttttgttttttttttttttttttttttttcgagatagagttttatttttgttgtttaggttggaatgtagtggtgcgatttttgtttattgtaatttttattttttggatttaagcgatttttttgttttaattttttgaggatttgggattataggtatttattattacgttcggttaatttttgtatttttttttttttttttagtagagacggagttttattatgttggttaggttggtttcgaatttttgattttagatgatttttttgttttcgttttttaaagtgttgggattataggtataagttattgtttttggtttttttttgtttttttttatggggatagtttaagtattttgttgaaattagtatttgggtgcgtgggaggaggtagttattgtaagaaaaaagtagttaacgtattaagtatatggttgttagtggttttttggatatttattgggttttatgttgtttaaggttttttgtaagagtttgaatttgttgaaaaattaattttttttttatttatttttttttttttttataattttttttattttttttaagtgtgagaaattttttttaatttgagaaagtaattaatttaaatttatagtgaataatggttgtttggtattgttttagttgatatatgttgttaattattaataatatgtaattattaatattacgttattttagtgattattaagagtatgttattttatttgtgataatgtttttttaggtataataaattatatgtttacggtattaattaatatttgttaagttaaagaaatatatttttatacgtgaaattttagagaaaaataaaggaaagtgtagagggttaagatgtagtgtgggagagatttgggggttagagagttttttagtatttttttttttttaattaaaatatggaagtaaatttattgtggttagttttgatgggtttagtttttttaaaaaaaaaatatatataaagaaataaattttgtgtaagtaaattttttttaatttttttataaaatatagatggtaataatatgtaattttttattttagggagatattttatgtgtttttttttataaatgatatgttaaaaaattaagtgatatttttagggtagaaattattatttatattttatcgtgtagttgagaaaatagtatagtcgaggtttagagaaattagtgcggggataaggttggtaaaagttttttaggatattaaaatttaatgtagtttttttttttgtgtgattttatatgtagaatttagggtgagacgttagaaaggaagtaaagatgaggtaatatgagttagatgtaaagtgtgtagagaaggtggggtattttgtgtttattagatagttgtagtagtaggatgtttttgggtatatgtgaatagggattatagattttcgatttaagataattttcggagataaattgtttatttttttttttttttttttttttttagtgggtgaattaggtttttgaatggtttttaatttttttgtgaattaaaattttaatttagaatatattatttttttttaaattaatgtaaattatataaattggtaaaatttatttttaatttgtaggtgtttttgtgtttttgaattgtttatcgtaaagggttaatgaaggtaattatgagtaaacgggggatttttagttttaaatattttttaattttttgttttttttaagtttttgaattttttaatttttttttttaatggaatatttgaaatataaaaaatgagtttggaaagtgtgagttggtatttttttttttttgatttgagatagtgaaggtaaaagatagtgtttgtgtatatataagtttggattttgaaaaatttgattgtttttgaaagtaaaatatataagagaataaaagaagagttatattaaagatgagatataacgtttaattatgtttgagtattttatttaaattaattttagatttatttatatataatatttttggagattatttttaaagataatggtgtgaaaatagtaaatgtattatatagaattttaaggtaggtcggggtttgggttattatgttattataaaatgtatttaattgtatttggattttgtttgatagatgtataatgaatttgaatagaattgtttattttattttttgtggatttgtgtgtatttaatatatttaggaaatgtttttaggtggatgatattttgggatttttattttaaaagggaatttataagaaagtatgagagaggtgaaagtaggtatgaaaaattataatagtatattatgaatatt

SEQ ID NO: 351 - DNA, 10433 bp, Artificial Sequence
  chemically treated genomic DNA (Homo sapiens)
atttcgtgattcgttcgtttcggttttttaaagtgttgggattataggcgtgagttattgtttttagttataagttaggattttaaaggtaggggtaaatttgaggaaagtagaagttataggtaaaattttaaattaatatatgaaggttatatattggtttgatttaaaaaggtgggatattttgaagtgggggtttataggttatgggtggatttaaagatttttttatttgttattggttaaggatacgaacgtttgtttaaaaatttggggttagaaaaaaggaatgttagttttggtttgtgggtatgattttttttaggttttttagaaagaaatttatttatttttaatgtttaaaatgtattatttattgagataggggttcgttttgttatttagattggagtttagtgggataattagtgtttattgtagttttaaatttttgggtttaagtgatttttttgttttagttttttatttagttgggattatagatatgtgttgttatatttggttaattaaattttgttttgttttgttttgtttttgtagaaatgggggggttttgttttgttgtttaggttggttttgaatttttggttttaagtagtttttttattttggcgttttaaagtgttgagattataggtgtgaaaggaagaaatttagagtaaagattggtggttagagtttagttttttgtttttttttgtttgagatttatgagttagtggatttgtttggtgggggtttgggtttatgaaaagtaatgtagggatataagttaagatgttatttttagtttttatagggagttaaatattttatgattttaatttttttggttattgttttaagttattattatatttttgtttattagtttgtttatttattttttaaggttagttaggtgtttgaaatatttttgaagaaacgtaagttttttttttttttttttttttttttttttttagagatggttttattttgttatttaagttgtagtatagtggtattattatagtttattgtagtttggatatttaagttttcggggatttttttgttttagttttttgagtagttgggattataggtacgtgttattacgtttggttaattttagaaaaatttttgtggagatgggggttttattgtgttgtttaggttggtttcgaatttttggttttaagcgatttttttattttggatttgttaaagtgttggaattataggtgtgagttattatttttggtttagatttttttttttttttatgttggtggggtgttcggttggtttttaagaagggtttttgttttgttttatagttatttgaaattgtatgttattgttaattatagttattttataggggtatagaaaatgagaatttagttttatttaggtgtaattttgtatttttttgtattttcgttttttttttttttttattttttttagtttttagtattttttgttttattttttatttttatgagttgaattttttttagtttttatatatgagttagaatattttgtgtttaattttttgtttttggtttattttatttataaaatgtttttagttttatttagttttatatttttagtattttttatggtgcgaggttttggttaaatgtttatttagtttaatagttttgtaaggttagtattattatttttgtattataaagtagaaagtaaaattagaaaggttgaggggttaggcgtggtggtttacgtttgtaattttagtattttgggaggttaaggtaggcggattacgaggttaggagatcgagattattttggttaatatagtgaaatattatttttattaaaaaaatataaaaaattagttgggtgtggtggcgggtatttgtagttttagttatttgggaggttgaggtaggagaatggtatgaatttgggaggcggagtttgtagtgagtcgagatcgtgttattgtattttagtttgggtaatagagtaagattttgttttaaaaaaaaaaaaaaaaaaaagaaaagaaaggttgagggattggtttagggatttatatgtttaggatgtttttgatttgggatttgaatttaggtttggttatattaaaggttatgtttgtttttcgttttttttttaaaatatatgtattattttatttgatttttgaaatttaaaatttattgaattttcgaattataagtttaaatttattaaaaaaaatttattaatgtaaattgtaaggtatatataatatataaagattaataaaataaatatggtatataaaaggaaatttgtatttttatatttatagtatttttgatattaaatgtgtggattttttttatattaataataaatgttttaattttttggatattaattgggtattttataatttaattttgtttagatattatttatttggggttagtatttgaatttataggttgagggtttagttagataagatttatttattttagatgttaattttaagtttcgggattttagtatttttgatgagttggttataaattgggagtttttacgattttttttttatatttgataaatagttataatggtttatagaattgagaagtattttatttattattattagtttattataaaggatatagatgagtagttgatgaagaggtttatagcgtacggtatgtgggaggggttttgaatatagtagtttttgtttttgtttttgtggagttggggtgtattatttttttggtatatggatgtgttcgtttattcgaaagttttttaaatttagttgtttgggatttttatgtaagttttattatgtagatatggttggttaaattattgattgaatttaatttttaattttttttttttttttggaagtcggggtggggcgggtgggggtgaggtttgaaagtttcgattttttttttatatggtatttagtttttatttgaagttttttaggggtttttagttattagtattttttgaatatataaaaaaagatattttttttattttggagatatttttttttttgagatggagttttattttgttgtttaggttgaagtgtagtggtgcgatttcgtattttcgtttttagggtttaagcgatttttttgttttagtttttcgagtagttgcgattataggtatacgttaatatgttcggttaatttttgtgtttttagtagcggggttttattatgttggttaggtttgttttaaatttttgattttatgatatatttatttcgattttttaaagtgttgggattataagcgtgagttatcgtgtttggtttttttttttttttttttttgtttttttttttttagatagagttttgttttgttatttaggttggagtgtagtggtgcgtttttggtttattgtagtttttgttttttgggtttaagtaatttttttgttttagatttttaagtagttgggattataagtgtgtgttattatgtttggttaatttttaaattttttgtagagatagggttttattatgttggttaggtaagtttcgaatttttgattttaattgattttttcgttttagttttttaaagtgttggaattataggtttgagttattatatttaggtttattttggagattttttggtttttagtggtttttgtgttaggaattagggatagagattagagacgttttttattatgttatagtataggagttttgttaatatagttttatttttttaggtatttttttttaggttgttttttttttttttagtataggtttttatttttttggatttgaattatataaggaggtagaggggtggagtggttaaaaatgtaggcgttattattttttggaggtgtgattttggataagagtttttgtgtttttatttgtaaatggagatgataaaatattttttaaagggttttcgtaaagattataggaaataaagtatggataacgtgtttggtacgaaggagagtttggtaagtggaggtaagtttgagtgttagagttttaaaattatggatttttaggtttgaaggaaattaaaatatttttttttaaaaatttgcggattttagttaaaggtaaaaggttaaaatttaggggtattttttgttttttttttttgttttgattagtttagaagtagagtttagaggattttggattagatttgattgtttttatatatttatttttttatatttttagttttttggaattttgaagatatttttttttttgttttgttattttatgggatttacggttttttgttaaaatattatttaagtaaggtttttaagttattgttttgagagagaaatattttttaattgaggtttttattgtataatgggtatagtatgtgttaattaattttggttgattttttttttgttaagttgatttttgtttttaggggagcgtgttaattaagaatttaaatagggaaagaaaagaaatgtttttatttttgtacgtcgtttaaatttttttttgcgtgtttgagacgatataacggaggttagagaagaggatttgtttgagtttattaagggtgtatagtttttttttgtatttatttatttgtggatgagaaggggagataaataaaggtgttttttgttttaaagtgtttttttgtttagggagtggatatttgtttgttttttgaaatatttaaagagttttatgaatttaaaggtttgtttagaaataagtgatgagggttttgggtagttaatgggatcgtgttggtttttttatttgtttggggagttttttcgttttatattttgtttcgtaaaaggtagttttattaaagtggggtatttttagtttttgtagtttttatttttatatttattaagtgggcggagtggttttttgtggacgaattagatttttttttagtatcgattttaagaggcgagtcggggggttagggttttagatgtataggaggagaagtaggagttgtcgggaagattagaagttagttatggatgattagcgcgattttatttttaataatgagtaattgtttatgttgggtcggcgttttggggtttcggagaggtatgtgtgagtattaggaaagggtatatcgattttggattgtagagtcgtgcgtatgtgttgggaagaagtatcggttaggagttataggaaagagggatttaggttttgattttaatattgattttttgggtgattttgagtaagtttttggtttgttttgggtttcggtttttttttttgttaaatgagggggtttttttaagagtaggagtttgtaattttttttgtattatatcgtttttttttgaaaagtagaagagagtatgggttttttttttagagttttatatgttatgtaggggttttgagattttattaaagttgggttgtgaatgttaggttaaaggttttggaataggttgtgtttggtggttttcgtttgtaattttagtattttgggaggttgaggcgggtagattagttgaggttaggagttcgagattagtttggttaatatgttgaaattttatttttattaaaaatataaaaattagttagatgtggtggtgtatatttgtaattttatttatttgggaggttgagatatgagaattattttaatttgggaggtagaggttgtagtgagttaagattgtgtaattgtattttattttgggtgatatagtgatattttgttttaaaaaaaataaataaataaataaagattttgtattagattttgaaaatgtttaagattttagtggagaaagagtttttaaaagaggatggtagaagtagttttttatagaggagtttttttttaattattacggattaagggaatgatagttgtaggtgtttgtagagtagatggagatatttgttattataggagggattgtgagatgttgggggtaggtaagaaaggagggataggttttggttaaatttttggagggggtttagggttgacgggggttatgtttttgtttgtgttttttttttttgtagttagaggttagtatagttatttaggggatattaggtttttattttttagttttaaaatagttttatttatgtgttttttttaaaaagggttagaaggttattattttaatgtttttgttatttttagtttttaaaaagtaatttgcgatttatagggatttatagttaggtgtgatgttagttgttgttaggtagaaaggggtttgggagaattttgtagagatgttatgataagttatgttttggggaataaggtaatttgttgtagattattagagttgtggtttgtgaaaattttagggaattttatggtaaggagggagattgttttgtgaggaatggatttaggtttaggttacgcgtgattttggataaattattgtttttttttgagttttagtaataatataatagttataatagtttttatttattgtgtatttgttattaggttttagttattgttagttagtattgtgattatttatatacgtaaaggttaaatttaattttaatttttatagttattttatgaattaggtatttttgttgtttttttttatagaagaggaaattgaggttatattggtaagtgatttatttaagtaattatagttagtgagtggttggaggtagaatttgaattaggattagtttgatattaaagtgttagtttattttattatttggtttttttttagaggtgtattttgtgggaaggggaggtgagatttttttgagtttagattatttagtgatttatagatttaggtgggtttagtgtttagagtgtatgtttttttgtttaatttttgtttagttttttttttatttagttattgtttttaaagttggttatgtgtgtttaggttattttagattggagtttgttttggaggtttttgtgaatgtttttgtttggtaatatttgtgttacgatttttgttagttttggttggtttttgattttggtttttttttttttttttttaattgtagaagaaggtagtgtaaatgaggaaataaagaggggggtgataagagttggtattttattagaattaggggataggcgtttaagatgtataaagaggaagaaaagtagatgttaaatttaattacgaatttttttgagaattgtattgagtgtaatttatttatagagtgttaataatgtgttaggtgtggagttaagagttttatttttattattttatttaatgtaatagtttttggagtagatgttttattcgattttatttatatagagggttaattaatttagatggttttagaattaatcgattttagagttaggattttaatttaggttatgtggtttcgtttttagggtgaatttttaggtttttaggttttttgaggaattgtggtgtagagaggggaaggtattgttttatgtcgtgtgtgggaggtagagttggggttagaattgggtgtggggttgtagaagtattgaataggtggaggatgaggttggagagtttgaatataggttaggttattcgtgttttttgagaaggttaagaagtagaatttgttttttttttttgtttggtttttttatttttttttcgtttttcgtttatcgtcgggtttttgttgtttttttttcgaataatttttttttgggttgggttttattttagaaagtatagattggtacgtagtaagttaatgagaatgagttagtttgtgatgttatgagttattaggtataagggatttttggagcgttttaaattatttttgttggttgttggagtaggtagggtgtagttttatttttgtagtttttaatgggtttgttttagttcgttttgtgtcgttttaatagaatattatagattgcgtaatatataaataaataaataaataaataaaaaatatttagaaatttattttttatagttttggaggggtttttttgttttttttttttttttttgttatgttttttgagatagagttttattttattttttaggatggaatgtagtggtgtgattttggtttatagtaatttttgttttttaggtttaagtgatttttttgttttagttttttgagtagttgggattataggtgtttattattacgttcggttaatttttttttttttttttgagatggagttttattttgttgtttaggttggagtgtaatggtatgattttagtttattgtaatttttattttttaggtttaagggatttttttgttttagtttttcgagtagttgggattataggtgttcgttattacgttcggttaatttttgtatttttagtagagatagggttttattacgttggttaggttggtttcgaatttttgattttaggtgatttatttgttttggttttttaaagtgttgggattataggtgtgagttatcgcgttcggtttagtttgtttttttttttttttttgagatagtttttttttgttatttaggttggagtgtagtgacgtgatttcggtttattgtaattttcgtttttcgggtttaagtgatttttttattttagttttttaagtagttgggattagaggtgtacgttattatgtttggttaagttttttgtatttttttgtagagacggggtttcgttatgttggttagattggtttcgaatttttggttttaagtgatttatttgttttggttttttaaagtgttgggattataggcgtgagttattatatttagtttggtgaggggtttttttgatgtgtttttatatggtggaaggtagaagggtaagagagaattaattttttttattaagtcgttttatagggtatttaattttattcgtgagggagaaggttttgtggttcgattattttttaatatttttatattggtaatatttggattagggttttagtagttttatttttggggtcgttaaagaatagattagaaatttttggggtgtaggggtaggatttttatattttttgtattgtaatatatgtatgtattttttagtcgtatttaagttttatagatataagggtttgttgaggttcgagggtttggatggtgagtttagggagtatgagaaatttatttaggttatataggtttaggtatttatatttttgtttattttttgtaggatggatattattatttgaaatattttggcgtttgtagtgagattttgtttaaaagaagaaatttattaaattttagaatcgtagaggtgggggtatttatgtgataaatgagggaatagaggtatagagattggtagggatatgtttaaagatatggagagtttgggtagaggatggttttagagtgggtggtgtttggttttgttttagtttgatattgtttaagttttttttagtttatttttaaaatggttaggttttatttttttttaggtgggttatattttttgttgtttcggttttatttttttattttttttttttaaatttgattttattgtgagggtgggaggttgggtagaggggtgaaaatttttttttttttatttggtaagtatatataattttttttggttttgttaattaaaaaaaataatatatttggttgattttgttagtagaaaaaaaaaataaaataaaaggttgggcgcggtgatttacgtttgtaattttagtattttgggaggttgaggtgggtggattacgagattaggagatcgagattacggtgaaatttcgtttttattaaaaatataaaataattagttaggcgtggtggcgggtgtttgtagttttagttattcggagaggttgaggaaggagaatggtataaatttaggaggtggaggttgtagtgagtcgagatcgcgttattgtattttagtttgggcgatagagtaagatttcgttttaaaaaataaaataaaataaaataaaataaaaattaaatttgttttttttgagggtagttttgattattaggagattcgtacggtaaagggagtttgggaagatttttttattttaattttttatcgtataggtaggattttaaggtttagagaggataaagagtatgtttttttgtttttttttgtttaatttaggttcgtggtagttgtagggtttttgttagggaagattttaggtatatcgatggttggaaggaggggtggggtgaggtttttaagttgtgtttttatagttagtttattgtttgtgttttaaatgtattgtttattaggggtggtttaggggtttaatggagatgggggtatatatttttttatttttagttagtttttggggtagttattattgtggatttttttttgatttattttttttattttttatagt

SEQ ID NO: 352 - DNA, 10433 bp, Artificial Sequence
  chemically treated genomic DNA (Homo sapiens)
gttgtgggaggtggggaggataggttagaggaggatttatagtggtggttgttttaagggttggttaggaatggggaaatgtatatttttatttttattagatttttaagttatttttaataaataatgtatttgaagtataaatagtaagttggttatggaaatatagtttgaagattttattttatttttttttttaattatcgatgtgtttgaagttttttttggtagagattttgtagttgttacgggtttgagttgaatagagaagagtaaagaggtatgttttttgttttttttggattttagggttttgtttgtgcgatgaggggttgaggtgggggggtttttttaggttttttttgtcgtgcggattttttgatgattagggttgtttttaaggggaataggtttggtttttgttttgttttgttttgttttgttttttgagacggagttttgttttgtcgtttaggttggagtgtagtggcgcgatttcggtttattgtaatttttattttttgggtttatgttattttttttttttagttttttcgagtagttgggattataggtattcgttattacgtttggttaattattttgtatttttgatagagacggggttttatcgtggtttcgattttttgatttcgtgatttatttattttagttttttaaagtgttgggattataagcgtgagttatcgcgtttagttttttgttttgttttttttttttgttggtaggattaattaggtatgttattttttttaattgataaaattaaaaaaaattgtatgtgtttattaagtaaggggaagagggtttttatttttttgtttaattttttatttttatagtgaaattagatttaaggagaaaaggtaaggaagtgggatcgggatagtagaaaatgtagtttatttgggaagaagtggggtttggttattttaggagtgggttgggggaggtttggataatgttaggttgaagtagggttaggtattatttattttggggttattttttgtttaggttttttatgtttttgagtatgtttttgttaatttttgtgtttttgtttttttatttgttatataggtgtttttatttttgcgattttagaatttggtgggtttttttttttaagtaagattttattgtaagcgttaaagtattttaaatggtaatatttattttgtagggggtgggtaggagtataggtgtttgagtttgtgtggtttggatgaattttttatgttttttggatttattatttagattttcggattttagtaagtttttgtatttgtgggatttggatgcgattggggggtgtatgtatatgttatagtataggggatgtaaggattttgtttttatattttaggagtttttgatttgttttttgacgattttaggggtgggattattaagattttagtttaggtgttgttaatgtgaaggtgttgggaggtgatcgggttataaggtttttttttttacgaatgggattaggtgttttgtaagacggtttgatggaaggagttggtttttttttgtttttttgttttttattatatgaggatatattaaggaagttttttattaggttgggtgtggtgatttacgtttgtaattttagtattttgggaggttaaggtaggtggattatttgaggttaggagttcgagattagtttggttaatatggcgaaatttcgtttttataaaaaaatataaaaaatttagttaggtatggtggcgtgtatttttagttttagttatttgggaggttgaggtgggagaattatttgaattcgggaggcggaggttgtagtgagtcgagattacgttattgtattttagtttgggtgatagaaggagattgttttagaaaaaaaaaagaaagtaagttaggtcgggcgcggtggtttatatttgtaattttagtattttaggaagttaagataggtagattatttgaggttaggagttcgagattagtttggttaacgtggtgaaattttgtttttattaaaaatgtaaaaattagtcggacgtggtggcgagtatttgtaattttagttattcgggaggttgaggtaggagaattttttgaatttggaaggtggaggttgtagtgagttgagattatgttattgtattttagtttgggtaatagagtgaggttttattttaaaaaaaaaagaaaaaattagtcgggcgtagtggtgggtatttgtagttttagttatttaggaggttgaggtaggagaattatttgaatttgggaggtagaggttgttgtgagttaagattatattattgtattttattttgggggatagagtgagattttgttttaaaaaatataataaaaaaaaaaaaaaaaaataagaaagtttttttagaattgtgagaaataaatttttgggtgttttttgtttgtttgtttgtttgtttgtatattacgtagtttgtggtattttgttaaagcggtataaaacggattaaaatagatttattgggaattgtaaggatgaggttgtattttgtttattttagtaattagtaaggatggtttaggacgttttaggagttttttgtgtttggtaatttatgatattatagattggtttatttttattggtttgttgcgtgttagtttgtgttttttgggataaggtttagtttaagggagagttattcgggaaggaaatagtaaaaattcgacggtgggcggggggcgggggggaagtggggagattagataggaagggaaaataaattttattttttggtttttttaaggaatacgggtggtttagtttgtgtttaggttttttagttttattttttatttgtttagtgtttttgtaattttatatttaattttagttttagttttattttttatatacgatatgggatagtatttttttttttttgtattatagttttttaggaggtttaagaatttagagatttattttgaagacgagattatataatttggattggaattttggttttggagtcggttagttttgggattatttaagttgattaattttttgtgtgagtaaaatcgggtaaaatatttgttttaagggttgttatattaaataagatgatgagggtaaagtttttggttttatatttagtatattgttagtattttataaataaattatatttagtgtaatttttaggggagttcgtagttaagtttagtatttgtttttttttttttttatgtattttgaacgtttgttttttggttttggtagagtgttaatttttgttatttttttttttatttttttatttatattatttttttttgtaattaaaaaaaaaaaaaaaaaagttaaagttaggagttaattagagttagtaggaatcgtgatatagatgttgttaggtagaagtatttataaaagtttttaaaataggttttagtttggaatggtttaagtatatatagttagttttagaagtagtaattgaataaagggaaaattagataaggattagataaggggatatgtattttgaatattgagtttatttgggtttgtaaattattgagtggtttgagtttagaggggttttattttttttttttataaaatgtatttttgaaagggggttaaatggtggagtgagttaatattttgatgttagattagttttggtttaaattttgtttttaattatttattagttatgattatttgggtaagttatttattaatatgattttaatttttttttttgtaaaaagggataataaaagtatttgatttatagggtgattgtaagaattaaaattgagtttagtttttacgtatgtaaataattatagtattaattaatagtggttgaggtttggtgataggtatatagtggatgagaattattatggttattatattattattgagatttagggagaggtagtgatttatttaaggttacgcgtggtttagatttgaatttattttttataaaatagtttttttttttgttatgggattttttggggtttttataggttatagttttaatggtttgtagtaggttattttgttttttagaatatagtttgttataatatttttgtagggtttttttaaatttttttttgtttggtaatagttgatattatatttagttgtaagtttttgtagatcgtaaattattttttggagattgggggtagtaggggtattggggtaatagttttttagttttttttgagggaaatatatgggtgaggttattttggggttgggaagtgggggtttggtgttttttggatggttgtgttggtttttggttgtaagggagaggggtataggtaaggatatgattttcgttaattttgagttttttttagaaatttaattagagtttgtttttttttttttgtttgtttttaatattttataattttttttgtgatggtagatgtttttatttattttatagatatttgtaattattatttttttgattcgtggtaattaggagggaatttttttgtgaagaattgtttttattatttttttttagaaattttttttttattgggattttgaatatttttaaaatttggtgtaaggtttttatttatttatttattttttttgagatagagtgttattgtgttatttagggtggggtatagttgtataattttggtttattgtaatttttgttttttaggttgaagtgatttttatgttttaattttttaagtaggtgggattataggtgtatattattatatttggttaatttttgtatttttagtagagatggggttttaatatgttggttaggttggtttcgaatttttggttttagttgatttgttcgttttagttttttaaagtgttgggattataggcgggagttattaggtatagtttgttttaaggtttttaatttagtatttatagtttagttttagtgggattttaaagtttttgtatagtatgtgaaattttagggagagaatttatgtttttttttgttttttagaaggaggcggtgtgatgtaaggaaagttataaatttttgtttttaaaggaatttttttatttgataagagagggagtcggagtttagagtaggttaaagatttgtttaaaattatttaaaaagttaatgttagagttagagtttgaattttttttttttgtgatttttggtcggtgtttttttttagtatatgcgtacggttttgtagtttaggatcggtgtgtttttttttggtgtttatatatattttttcggggttttagggcgtcggtttagtatgggtagttgtttattgttggagataaggtcgcgttggttatttatgattggtttttgattttttcgatagtttttgtttttttttttgtgtatttgggattttgatttttcggttcgttttttaaagtcggtgttggagaggaatttgattcgtttatagaaggttatttcgtttatttggtagatgtggaagtgaaagttataaaggttggaaatattttattttggtgaagttgttttttgcggggtaggatgtggggcgggggggttttttaggtaggtagaaaggttagtacgattttattggttgtttagggtttttattatttgtttttgggtaggtttttggatttataaggttttttgaatgttttaagaaataggtaaatgtttattttttagataggaaagtattttgaaatagaagatatttttgtttgttttttttttttatttatagatgagtgggtgtagaaaggggttgtgtatttttggtgagtttagataagtttttttttttggttttcgttatgtcgttttaaatacgtaggaggaagtttggacgacgtgtaggggtgaaaatattttttttttttttttgtttaggtttttagttgatacgtttttttggaaataaaagttaatttaataaaagaaaaattagttaaagttgattaatatatgttgtatttattatgtagtagaggttttagttgagaagtattttttttttaaggtagtggtttaggggttttgtttaaatagtattttaataaagagtcgtaagttttatagagtgataggatagagaagaggatatttttagggttttaaagggttggaaatgtgggaaggtgaatgtatgggaatagttaagtttgatttaggattttttgagttttgtttttgagttgattaagatagagagaaggggtagagggtgtttttgggttttaattttttatttttaattaaaattcgtaggtttttagagaggaatattttgattttttttaaatttaagagtttatggttttaaggttttggtatttagatttgtttttatttattaagttttttttcgtgttaggtacgttgtttatgttttgttttttgtgatttttacggaggttttttgaggagtgttttattatttttatttatagatagggatataggggtttttgtttaggattatatttttagaaagtagtagcgtttgtatttttaattattttatttttttgtttttttgtgtggtttagatttaggagaatgggggtttgtgttgggagggaagaggatagtttgggaaagggtgtttgggaggatgggattgtgttggtaaggtttttgtgttgtgatatagtgaaaaacgtttttggtttttgtttttggtttttgatataaggattattaagaattaaagagtttttagagtaagtttgggtgtggtggtttagatttgtaattttagtattttgggaggttgaggcgggaggattagttgaggttaggagttcgagatttgtttggttaatatggtgaaattttgtttttataaaaaatttaaaaattagttaggtatggtggtatatatttgtaattttagttatttgggagtttgaggtaggggaattgtttgaatttaggaggtagaggttgtagtgagttaagaacgtattattgtattttagtttgggtgatagagtaagattttgtttaaaaaaaaaaaaataagaaaaaaaagaaaaaaagattaggtacggtggtttacgtttgtaattttagtattttgggaggtcgaggtgggtgtattatgaggttaggagtttgagataagtttgattaatatagtgaaatttcgttattaaaaatataaaaattagtcggatatgttgacgtgtgtttgtaatcgtagttattcgagaggttgaggtaggaaaatcgtttgaattttggaggcggaggtgcgagatcgtattattgtattttagtttgggtaatagagtgagattttattttaaaaaaaaaagtatttttagagtgagaagaatgtttttttttatatatttaggaaatgttggtggttgaaagtttttagagagttttagatggaggttgggtgttatgtgaggagagggtcgggatttttagattttatttttattcgttttatttcgatttttagaaaggagagaggggttggaggttgagtttaattagtgatttaattaattatgtttatataatggaatttgtataaaaattttaaataattaggtttggagagttttcgagtagacgaatatatttatgtgttaggagggtggtgtattttaattttataaggatagggatagaggttgttgtgtttaggattttttttatatgtcgtacgttatagatttttttattagttgtttatttgtattttttataataaattggtaatagtaagtaaagtgttttttagttttgtgggttattgtagttatttgttaagtatgaagagggagtcgtgggaatttttaatttgtagttaatttattagaagtattggagtttcgggatttaggattggtatttgaagtggatgagttttgtttgattgagtttttaatttatgggtttagatgttaattttaggtagatagtgtttgaatagaattgaattgtaggatgtttagttggtgtttagagagttagaatatttgttgttggtgtagaaaaaatttatatatttggtgttagaagtgttgtgagtgtaaaaatataagtttttttttatatattatatttgttttattaatttttatgtattgtgtgtgttttataatttgtattaataaattttttttaataaatttagatttgtggttcgaaggtttaatgagttttggattttaagagttaaatgagatagtatatgtattttgggaggagagcgaagagtagatatggtttttgatgtggttagatttgagtttaaattttaagttagaaatattttaggtatgtgagtttttgaattagttttttaatttttttttttttttttttttttttttttttgagatagagttttgttttgttgtttaggttggagtgtagtggtacgatttcggtttattgtaagtttcgttttttaggtttatgttatttttttgttttagttttttaagtagttgggattataggtgttcgttattatatttagttaattttttgtatttttttagtagagatggtgttttattgtgttagttaggatggtttcgattttttgatttcgtgattcgtttgttttggttttttaaagtgttgggattataggcgtgagttattacgtttggttttttaatttttttgattttgttttttgttttgtaatgtagggatggtaatattagttttgtagagttgttagattaaataagtatttagttagagtttcgtattatagaagatgttgaagatatgaaattggatggaattggagatattttgtaagtgaaataagttaggaatagaaagttaaatatagaatgttttaatttatatgtggaagttaaaaaaagtttaatttatagaagtgaaaagtagaatagaggatattagaggttgggaagggtagggggaagggagggacggggatgtaaaaggatataaaattgtatttagataggattaagtttttattttttatatttttgtgggatgattatagttaataataatatatagttttaaatagttgtgagatagagtagggattttttttaggggttagtcgagtattttattaatataaaaagagagaaaaatttaggttagaaatggtggtttatatttgtaattttaatattttagtaggtttaaggtgggaggatcgtttgaggttaggagttcgagattagtttgggtaatatagtgagatttttatttttataaaaatttttttaaaattagttaggcgtggtggtacgtgtttgtagttttagttatttaggaggttgaggtaggaggattttcggaggtttgagtgtttaggttgtagtgagttgtgatgatgttattgtattgtagtttgggtgatagagtaagattatttttaaaaagaaaaaagaaaagaaaagaaaaagaaatttacgtttttttaaaagtattttaggtatttagttagttttgagaagtaaatgagtaagttgataaataaaaatatagtaataatttaagataatagttaaaaaagttagaattatggggtatttggttttttataaaaattaaagataatattttaatttatgtttttgtattgttttttataaatttagatttttattaaatagatttattggtttatagattttagataagggggagtagaggattaaattttaattattaatttttgttttaaattttttttttttatatttgtaattttagtattttgggacgttaaggtggaaggattgtttgaggttagaagtttaagattagtttgggtaataaagtaagatttttttatttttataaaaataaaataaaataaaataaaatttaattagttaggtgtggtagtatatatttgtagttttagttagatgggaggttgaggtagaaggattatttgagtttaggagtttgaggttatagtgagtattgattgttttattaaattttagtttgggtgatagagcgagtttttgttttaataaataatatattttaaatattaaaaataaataaatttttttttgaggggtttggaggaggttatgtttataggttagagttaatattttttttttttgattttagatttttagataaacgttcgtgtttttaattaatgataaatgagaaaatttttaaatttatttatgatttgtggatttttattttaagatgttttatttttttaggttaaattaatatataatttttatgtattgatttagaattttgtttataatttttgttttttttagatttatttttgtttttaaaattttagtttatggttgggggtagtggtttacgtttgtaattttagtattttgggaggtcgaggcgggcggattacgaggt

SEQ ID NO: 353 - DNA, 6722 bp, Artificial Sequence
  chemically treated genomic DNA (Homo sapiens)
tcgttgtgattagatgttttttttagttgggaagattaaattggtttggttaatattttttaggatttttttgtttaaattatttttgggatttgatttattttttggaaaggggcgagtttgggttttgaagtttaaattagagtttaaattataattttgtttttaattttacgtaattttgtgtattttattttttgagttttcgttttttcgtgtgtaagtttgttaatttttgagagattggataagatgtcgtggagagttttggttttgagtagttttgttgttggatagtttagttggtagtttttaaacgtaaggcgtaagagtttaagaagtatcggttaggtatagtggtttatatttgtaattttaatattttgggaggtcgagacgggttgattatttgaggttgggagtttgagaatagtttgattaatatggagaaattttgtttttaaaaatattaaaattagttgggtatggtggcgcgtatttgtaattttagttatttaggaggttgaggtagaagaatcgttcgaatttcggaggcggaggttgtagtgggttgagatcgagtaattgtaatttagtttgggtaatagagcgagattttattttaaaaaaagaattaataaaaatgttaaaagtatcgttgtttatatttagtaattttgtgaagtaagtgtcgaaaagtgttttggaggtaggtaaagtaagttataggttgggtaatttgttagatattttatagttggagttattatatgaatttaagtaatttagttgtattttggatttagttattttaagggttttgtgttttagaaaagaggtttaaagggttgtattttagttgtaggttagttattttttattttgggttttagtttttttttttggttattaatgaaaatattttttagagttgatatgagaatttaatgttaagcgttcggtttgtatagtagtaggtattgcgttttttaggtaggaagtaaggtttaggtgtttcgagtaggtttgtaatttcgtagtcgcgtcgttttagttattggggagtagtagagggtttagaaagaagtttagttatcgaaggtttttgaaggtgaatttttagggtttttaggtttggagttaggtttatttttgggagggggttgtaacggggaattgaagtgtagaggggttagtgattttagtagaatatttggggttttggtttttagggttatagaattgttttagatattgtgttaaatgtattgtagaatatttttgtagttttattaagtggggggtttgtatttatgttataggagaaaaaattgagttttagatgattagttagttggtagagttgagttgtaaaagaattttggatttttgaggtttaggtttttttgcgtggatgggaattgttttttttttattttttgggtttacgttattttgttttagtttttttagtagttgggattataggtatacgtcgttatgttcggttaatttttgtatttttagtagagacggggttttattgtgttagttaggatggttttgattttttgattttttgattcgttcgttttagttttttaaagtgttgggattataggcgtgagttatcgcgtttagttggtaattgtatttttttaaaattttgtattttaggaggtagaggtgggtagattatttgaggttaagagtttgagattttggtttggagtggtggtttatatttgtaattttaatatttggagaggtcgaggtaggtggattatttgaggttagaagttcgagattagtttggttaatatgatggaattttgtttttattaaaaaatataaaaattagttggacgtggaggtaggagaatcgtttgaatgtaggaagtggaggttatagtgagttaagattgtattattgtattttagtttgggcgataagagtgaaatatcgttttaaaaaaaaaaaaaaaaaagagtttgagattagtttggttaatatggtgaaattttgtgtttatgaaaaaaaaaattggttgggtatggtggtgtatatttgtaattttagttatttgggaggttgagataggagaatagtttgaatttaggaggtggaggttgtagtgagttaagattgtgtcgttattgtattttagtttgggtaatagagtaagattttattttaaaaaataaaatttgaaatattttaggtatgtaagtatttagtatttagtatttataatgtaagaaaaatttatgaagtataatttagtttaagtaatataggtagggtagggtgtagtgtttataattttagtatttcgggaggttaagttgggagaattatttgaggttaggatttttaggttagtttgggtaatatagtgagattttgtttttataaaaaatttaaaaaataggtttagtgcggtggattatgtttgtaattttagtattttgggaggtcgaggcgagtggattattaggttaggagattgagattattttggttaatacggtgaaattttatttttattaaaaaaatataaaaaattagtcggttatggtggtatttgtttgtagttttagttatttaggaggttgaggtaggagaattatttgaattcgggaggcggaggttgtagtgagttaagattatattatcgtattttagtttgggttatatagcgagattttgttttaaaagaaaaaaaaaattaaaaatagttaggtatggtgtgtgtatttgtaattttagttatttgggaagttgaggtaagagaattatttgagtttaggagtttgacgttatgattatgttattggatattagttttggtgatagagagaggttttatttttaaaaaagaaaaaaaaaaaagtggttagttacggtggttttcgtttgtaattttagtattttgggaggttgaggtgggtggattatttgaggttaggagtgtgagattagtttgtttaatatggtgaaatttggtttttattaaaaatataaaaatatagttaggcgtggtggtggtcgtttgtaattttagttattgaggaggttgaggtaggagaattatttgaatttgggaggtagaggttgtagtgagttaagattacgttattgtattttagtttgggtgataaagcgagatttcgttttaaaaaaaaaaaaaaaaaaaaagtaatataggaaataaaattaagataagatgagttttttgtgtttttgtgtgtttttttttagatttaattttggcgttttttagaggtaattttttttaggaattgggcgtttgttatttttttgtacgggtttatatttttgttataaacgtgtgtttttaagtagcggacgttttttgaaaataagttaattgtattatgttacgatattttttttgatgtttgtgttgtttttgagacggttttatgatatttttttttattttgtagtattttgttggtttattttgttatagtgtatgtatttatttttttataaatggattttttatttgttttttaatgtttgttattaaaaatttttttgtaataaatttattttatatatttttttgtatgtgtgtgagggttttttaattgtttataaatattttagtaatttcgttttttttatttagattttattttttttttattagatatgtttaaaggaaattgggagtaatataaagatgattttgaatttttgtttattatttttagattgtatgatattcgtaagtgataattttttttttttggtttcggtttttttttttgtaaaatgggggatggtttattttgttagttatggtaggttaatataaaataatttttggttgtgtatagtggtatatgtttgtaattttagtattttgggaagttgaggtaggaggattgtttgaggttaggagtttaagattagtttgggtaatatagtaagattttattttttttaaaaaaaaaaaagaagaaaaatatatgttgttgttgttattattgttattattagagatagagtttcgtttttgttatttaggttggagtgtaatggtgtgattttagtttattgtaatttttattttttgggtttaattgatttttttgttttagttttttgagtagttggaataataggtatgtgttataatatttggttaattttgtatttttagtagagatggggtttcgttatgttggttaggttggttttaaattcgattttaggtgatttttttgttttagttttttaaagggttgggattataggtataagttattatagttggtttgtttttttaaaaaaagaattttagtaaagagttgattatggtttttattttttgaatattaggaatattatttcgtattatataatgagatagggagatattttggtttttattttatagatgaaaaatgttaagtttcgaaggattaaagtgtttatttagttatacgggtagttagttataggttagtttgttttatttattttttatgagtatttatagtgattaatatttattgggcgtttattgtgggttatttttgtgtatgtgataatttttttaagtttttgtttttaattttaagaagtaaggaaatggggttagggaagggataaggtttgtttaagtttaggtagggggagaggttaagtttagaattattatttgtttatgatatatgtttaggatttaggttttttaggtttttttttaaaggtttagtagtgacgagttagtttttgaattagtttttttttttatttaagtagttattttttaggggaattgtggttattataggtgtagggagtagtttttttttatttatagtttgaagtatattcggtaggggttgtttttaggtttaataagtaaagggtttagtagcgagggttattggagtttattttcggggggttgggtaggaagtagggtggggtttggggtagggatttggtattttgggattgttgtaatttaaattaattaatttattgggagaagatgtttgggggtttaggagttttttaagttttgtttgttattattttttttttttttttgttgtttgttgtttatttgggtatgtggttaaagggtaggaattggcgggaggtgggggaagttgtggaggttgtagagagggtataggtagagggaagggggtttagggaaaggggaagaggaggtagaggataggggatttagggaagatgtttatagaaatcgtatttgtgttaagatgggttaaggtggggttggagggagtttagcgaaggagaaggggcgtttatagttttatatagggaggtaggagtaagagttattttttttattttttgttttttataggttaaaataaggaattaaagttgtttttgattgagtattagggttgggggtaggaaggggatttaggggtagtagtatttagcgtttgttaaggggagaaaaagttttttttgttttaaattttaggtgtttttttttgttgggagtttttttttagtattgggggaatgggtgttttatggatttttttttatttgtttaaggatagttggtaggggttgtggttacgttaatttaggagtttagagaaaaaggttttttatttaaggggatattgggagtaaggattggagtttacgtttgagttttaagttcgtgacgatgagggtgttcggtttttttttttattttttttttttttttttttttttattttttttttttatttatttttagaagaggggattggttatgtgggaggtttggttgagagttggggttttttagaggagttcggattggatattgtagttagtttgagtcgtttcgttttatttagagatatttttagtttttatttcgttttgagtttttttaattattagtagtttagtttaaggattgaatttatttttgatttttaggttgatatatataatttatagagaatgagggttaggtatagggttataggttagggtaggttatagattggttttttagtttaggtagggagaggttagggagttaagagtttgaatttagtgttatttttgattgtttggtgatgttggtaattcgtttgtttttttagagttttagttattttttttgtaaaatggggttaaggagagaatttatttttagggttttgtgaatgattatataagaaaaagcgttaggtgttgggtttggttgaggttggggtgtaaaaatggatcgggaaggttgcgggaggaggggacgtttgtattgtttttggaaggagttgtttggatagcggttttttagtgtttggaataaatatttaaaatttagagagtttatagggttagagtataaagtgcgtatgcgggagggggataagagatggcgttgtagaggtgagaagggttttttaggggttttattattttagggagttttattttttttttttaggatatttttatttattttaattaggtatgtttttttttttttttaggggtttttttattttttcgtattttttttttttttaggatgtattagtttttgttaggggttttttttttttttttttatttaggagagtttttattttttttttaggagtgttggaattgtaggggttagggttggggaaatgtgttattatttttagtttttgatttatttattttgtttttttatagg

SEQ ID NO: 354 - DNA, 6722 bp, Artificial Sequence
  chemically treated genomic DNA (Homo sapiens)
tttgtggagagatagggtgggtgggttagggattggggatggtgatatatttttttagttttggtttttgtagttttagtatttttgggaagagggtgaggatttttttgggtggggagggagagagagagtttttgataggggttgatatattttggggagaggggggatgcgggaaagtgaagaagtttttgggaaggagagaggatatatttggttggggtgggtgaggatattttgggagaggagaatgagattttttgggatggtaagatttttgggaggttttttttatttttgtagcgttattttttgtttttttttcgtatacgtattttgtattttggttttgtgaattttttggattttggatgtttgttttaggtattggaggatcgttgtttagatagttttttttagaagtagtgtaggcgtttttttttttcgtagttttttcggtttatttttgtattttagttttagttaggtttagtatttggcgtttttttttgtgtaattatttatagaattttagaagtaggttttttttttagttttattttataggagggatggttgaggttttgggagggtaggcgggttgttagtattattaggtagttaggagtggtattgggtttaaatttttggttttttggtttttttttgtttgggttgaggagttagtttgtggtttgttttggtttgtgattttgtgtttggtttttattttttgtaagttgtatgtgttaatttaggggttaggggtgagtttagtttttgggttgggttgttggtgattgaaggggtttagagcggggtggagattgggggtgtttttgagtgagacgaggcggtttaggttggttgtagtgtttaattcgggtttttttgggaagttttagtttttagttaggttttttatatggttagtttttttttttggaggtaggtggaggagggaggtgaggaagagagaaggaggaagagatggggagaggggtcgagtatttttatcgttacgggtttaagatttagacgtgaattttaatttttgtttttagtgtttttttgggtggggaatttttttttttgaatttttgggttagcgtggttatagtttttgttagttgtttttgagtaggtgagggggagtttatgagatatttatttttttagtgttgagaagggatttttaatagagagaggtatttgaggtttaaggtagagaaagttttttttttttttgatagacgttgaatgttgttatttttaagttttttttttgtttttagttttggtgtttagttaagagtaattttagttttttattttggtttgtggggaataggaggtgggggaggtgatttttgtttttgtttttttgtgtgagattgtggacgttttttttttttcgttgggttttttttagttttattttggtttattttggtatagatacgatttttataggtattttttttgggttttttattttttgttttttttttttttttttttgagtttttttttttttgtttgtgttttttttgtagtttttatagttttttttatttttcgttagtttttgttttttggttatatatttaggtagatagtagatagtaggaagaggaggaagatggtggtaggtagagtttggaggatttttggatttttaggtatttttttttagtgggttggttagtttgagttgtagtagttttagggtattagatttttattttaaattttattttattttttgtttagtttttcggagatgggttttagtggttttcgttattgggttttttgtttgttgggtttggggatagtttttgtcgggtatgttttaggttgtgagtggagagaaattgttttttgtatttgtggtggttataatttttttgagaggtggttgtttgggtgggggaagaggttggtttaagggttggttcgttattgttgagtttttggaaggaagtttagggaatttgagttttgggtatgtgttatgggtaggtgatggttttgagtttgatttttttttttgtttggatttgggtaaattttgttttttttttgattttatttttttgttttttgggattagaaataaggatttaaaggggttgttatatgtatagaaatggtttatagtaggcgtttagtaaatgttagttattataaatatttatgaagaataaataaggtaggttgatttgtggttgattattcgtgtgattaggtgggtattttgatttttcgaagtttgatattttttatttgtgagatgaggattagaatgtttttttgttttattatgtgatacgagatggtgtttttggtatttaaggagtgagaattatgattagttttttattggaattttttttttaaaaaaataggttagttatggtggtttatgtttgtaattttagttttttgggaggttgagataggagaattatttgaggtcgagtttgagattagtttggttaatatggcgaaattttatttttattaaaaatataaaattagttagatgttgtggtatatgtttattattttagttatttaggaggttgaggtaggagaattagttgaatttaggaggtggaggttgtagtgagttgagattatattattgtattttagtttgggtgataaaagcgaaattttgtttttaataataataataataataataataatatatatttttttttttttttttttttaagagggatgggattttgttatattgtttaggttggttttgaatttttggttttaagtaatttttttgttttagttttttaaagtgttgggattataggtatgtgttattgtgtatagttagaagttgttttatattgatttgttatgattggtaaggtaggttattttttattttatagagggggaaatcgaggttagagaggggaggttgttatttgcgggtgttatatagtttaggggtggtggatagagatttaaagttatttttgtgttgtttttagttttttttgagtatgtttggtaggagggaaatgaggtttgagtggggagggcggagttgttgagatatttgtgagtagttaggggatttttatatatatataaggggatatataaaataaatttattgtagggagatttttggtagtaaatattgagaagtaaatgaaaagtttatttgtgggagaatgggtgtatatattgtggtaaagtgagttaatagaatgttatagaataggggaaggtgttataaggtcgttttagaaatagtataaatattagaaaaaatatcgtagtatgatatagttgatttgtttttaaaaggcgttcgttgtttagggatatacgtttgtagtagaggtgtagattcgtgtaggggagtggtaaacgtttagtttttgggaggggttatttttgggggacgttagggttgggtttggggagggatatatagagatatagagagtttattttgttttggttttattttttgtgttattttttttttttttttttttttgagacggagtttcgttttgttatttaggttgaagtgtagtggcgtgattttggtttattgtaatttttgttttttaggtttaagtgatttttttgttttagtttttttagtagttgggattataggcggttattattacgtttggttatatttttgtatttttagtagagattaggttttattatgttgggtaggttggttttatatttttgattttaggtaatttatttattttagttttttaaagtgttgggattataggcgggagttatcgtggttggttattttttttttttttttttttagagatagggtttttttttgttattaaggttggtgtttagtggtataattataacgttaaatttttgggtttaagtgatttttttgttttagttttttaagtagttgggattataggtgtatatattatgtttggttatttttaatttttttttttttttgagatagagtttcgttgtgtagtttaggttggagtgcgatggtgtgattttggtttattgtaattttcgtttttcgggtttaagtgatttttttgttttagttttttgagtagttgggattataagtagatgttattatgatcggttaattttttgtatttttttagtagagatggggttttatcgtgttagttaggatggttttaattttttgatttgatgatttattcgtttcggttttttaaagtgttgggattataggtatgatttatcgtattgggtttattttttaaattttttgtaaagatagggttttattgtgttgtttaggttggtttggaagttttgattttaagtgatttttttagtttggtttttcgaagtgttgggattataggtattgtattttgttttgtttgtgttatttaaattgggttgtgttttataggttttttttatattatgaatattgaatgttaaatatttgtatgtttgaagtattttagattttgttttttgagatggagttttgttttgttgtttaggttgaagtgtagtggcggtataattttggtttattgtagtttttattttttgggtttaagttgtttttttgttttagttttttaagtagttggaattataggtgtgtattattatgtttagttaatttttttttttatagatatagggttttattatgttggttaggttggttttaaatttttttttttttttttttttgagacggtgttttatttttgtcgtttagattggagtataatggtgtaattttggtttattgtgatttttattttttgtatttaagcgatttttttgtttttacgtttagttaatttttgtattttttagtagagatagggttttattatgttggttaggttggtttcgaatttttgattttaggtgatttatttgtttcggtttttttaagtgttgggattataggtgtgagttattattttaggttaaggttttaaatttttgattttaagtgatttgtttatttttgttttttagagtgtagaattttaaaaaagtgtaattgttagttgggcgcggtggtttacgtttgtaattttaatattttgggaggttgaggcgggcggattagaaggttaggagattaaaattattttggttaatatagtgaaatttcgtttttattaaaaatataaaaattagtcgggtatggcggcgtgtgtttgtagttttagttgttggggaggttgaggtagaatggcgtgaatttaggagatgggaaaagggtaatttttatttacgtagaagagtttgggttttaagagtttaggatttttttataatttagttttgttaattgattggttatttgaaatttagtttttttttttataatatgggtataaattttttatttgataagattgtaagaatattttgtagtgtatttggtatagtatttaggatagttttgtagttttgggaattaggattttaggtgttttgttggggttattagtttttttgtattttaatttttcgttataatttttttttaggaataagtttggttttagatttggaagttttaggaatttatttttaagagttttcggtggttgagtttttttttaggttttttattgttttttagtggttggagcggcgcggttgcgggattgtaggtttgttcgggatatttagattttgttttttatttgggaagcgtaatgtttgttgttgtgtaaatcggacgtttggtattgagtttttatgttagttttgggaaatgtttttattaatggttaaaagaggaaattagagtttagaatggggagtgattggtttgtagttagagtgtaattttttgggttttttttttgaggtatagagtttttggagtggttaggtttaggatgtagttgggttgtttgggtttatatgatggttttagttgtgggatatttggtaagttatttagtttatggtttattttatttatttttaaagtatttttcggtatttattttatagagttgttgagtgtaaataacggtgtttttaatatttttattgattttttttttgaaatggagtttcgttttgttgtttaggttggattgtaattgttcgattttaatttattgtaattttcgttttcggggttcgagcgatttttttgttttagttttttgagtagttgggattataggtgcgcgttattatgtttaattaattttggtatttttagagatagggtttttttatgttggttaggttgtttttaagtttttaattttaggtgattagttcgtttcggttttttaaagtgttgagattataggtgtgagttattgtgtttggtcgatattttttaaatttttacgttttacgtttggggattgttaattgaattgtttagtagtagagttatttagagttaaggttttttacggtattttgtttagttttttaggagttagtaggtttatatacgaggagacgaaggtttagaggataaggtgtatagggttacgtgggattaggggtagagttgtgatttaaattttagtttgaattttaaaatttaggttcgtttttttttaggaaatgggttagattttaggaataatttggataggggaattttgggagatattggttaaattagtttagtttttttaattgggagggatatttggttatagcgg

SEQ ID NO: 355 - DNA, 5971 bp, Artificial Sequence
  chemically treated genomic DNA (Homo sapiens)
ataggtagttttttttttggttatttggataatttttttagtggtgatttttgagattttagtgtatttgatatttgagtagtgtatattatatttaatatgtagttttttgttttttattttttttttaacgtttttttattgagtttttaaagtttattatattatttttgtgtttttgtatttttatagtttagtttttatttataagtgagaatatatgttatttggttttttatttttgagttattttatttagaataatggtttatagttttaattaggttgttgtaaaaagatgttatttcgtttttttttttttttttttttttttgagacggagtcgtattttgtcgtttaggttggagtatagtggcgcgatttcggtttattgtaagtttcgtttttcgggtttatattatttttttgttttagttttttaagtagttgggattataggcgtttgttattacgttcggttaattttttgtatttttagtagagatagggttttatttggttagttaggatggttttaattttttgatttcgtgattcgtttattttagttttttaaagtattgggattataggtgtgagttataatgtttagtttattttatttttttttatggttaagtagtattttataaagaggtgtatatatattatattttttttatttatttataggttagtaggtatttaggttggttttatatttttgtaattgtgaattgtgttgttataagtatgcgtgtgtatgtgttttttagaaaattaaaattatattaagtattttttttaattatagtggaataaaattagaaatttattttaaaaggaatttttaaaattatataaatatatggaaattaatttgtttttgagtgatttgggggttaataataaaattaagatggaaatttaaaaattttttgaaatgaatgataatgatataattttttaaaatttttgtgatatagtaaaagtggtagtaagaggaaagtttatagtattaaatgtttatattaaaaattttggaagattataaatgttttaaggtattagagaaataaaaataaattaaatttaaatttagtagaagagaagaaatgagaaaaattagagtagaattaaatgaaattgaaataaataatataaaagattaattaaaataaaaagttgggtcgggtatagtggtttatgtttgtaattttagtattttgagaagtcgaggcgggtagattacgaggataggagtttgagattagtttggttaaaatggtgaaattttatttttattaaaaatataaaaattagttgggtgtagtgttgtacgtttatagttttagttatttgggaggttgaggtaggagaattatttgaatttaggaggcggaggttgtagtgagttgagattatgttattgtattttagtttgggtaatagagtaagattttattttaaaaaaaaaaaaaagttggttttttgaaaagataaaattgatagattattagtaagattaattaagaaaagagagaagatttaaataagttttattagaaatgatattggagatattttttttattttaagtttttttagatttcgtttggagttttttttggtattagggataggaagatttgtagagcgtagggtgtttaagtttatatattttttgagttttgaatggtggaagaaaaaaggttttatattgggtgagaaatagagataatttgggataatagttatagttatttatttttttaggtattcgtgttatttttcgtatttttcgttttttttagggcgtgtcgtttattatatttattaagtattttagatgtaggatggtttttaatgtgtatagttgtttttcgattaacgtattgttggggtcgggcgtagtggtttacgtttgtaattttagtattttgggaggttgaggcgggtggatcgtttgagtttaggagtttgagattagtttgggtaatatagtaaaatttgtttttataagaaatatatagattagttaggtgtagtagtatgatttgtagttttagttattcgggaggttgaggtgggtgaattatttgagtttaggtggtagaggttgtcgtgaatggagattgtattattgtattttagtttggataatagagtaagattttgttttagaaaaattttagaaaataataataaaaaaacgcgttattgggtttatttttattttacgaaaatgaggaattttggttattgagaggttaagaatgggtgttgttttatgggtgttgttggtatgtggggtagggaattttgttttgttagttaatgtttttttcgttttaggtatttatcggttattgagattagcgcgattgttttgatgtatgtgtagacgtttttttcgttggggtagagttatttttagtagagaattattggtaatttggggaggttttttggttgttatattgttgggttaggatttaaatttacgttttttttagtaggtttttttttagttatagtagtttagtagatttaggatatttgggttggagaaggaggtaggggtttgagtttttttttttttgaggtttttttttttttcggtattttagggtggttgggggtcgttgtttttttgtttttttattttttgagttttttgttttttcgttcgattttggtttttattttttattttgatgttgtttttttggaaagggaggtgtcgttagaagttagaatgtgaagtttcgggtagtcgagggtagaggtaggggtaggtttgtgaggttttttgttttgggaagaaaagggtattatgagtttaaaatggggtttagggttgttgttattagtgagggaatagtacggtttaaaatgtgataaataattttgtaggcggtggggttttcgttgttttcgttttttttgaaaatagatttttgttcggtatgaatgggaatgaagtttaaaggttatatttgtatttttgtttacgggatgtgtgtgttttttttttttggagtgggagttgttttttatttgtttttttaaattttttattttaatattttttggggtataggtagtttttttggttatttggataagttttttagtggtgatttttgagattttagcgtatttgttatttgaggatgggtgttaattgttttttattaattttcgtgttttttatagttcgttgagttttaggattagttttagagtaggttttatattatagggtttaggtaatatatttgtgtgagtatgtatatatatatatatatatattttttataaatacgtgtgttttaagttttttttagttatattttttaattttggggagatattagttttaaagttaatgaaggattttgtcgttaggggtttaggaagagtattttttaaattatgagatttttagattttgttttatttttttcgggttagtttttttttagttatttttattagtatgcgggtttatgggttttaagttgattttaggtgatgtttatatttttgagttgtttattttatgaattgaatatttgatagttttttagagaaatgtttttttatttggaatatttggaaataagaaagaatatttggggttgttcggaacgggttgtttttcggatgaaattttaatttttttgtttttgattttcgtggtttaggttttggtttgtattttttgagagtggtttttattttattaggttcgaggtttaggttaagatttaaagagggattatttagattttttgttttttaattatggtatgggaggtggttttgtttttttttaaatttagatagatttgttttagtatagattggaaaacggagggttgtgaggagagtgagaggtggatagagggtatcgacgatttagtattttttttttttttgggggtcgaggatgagagataaaaaagaagttgttaggaaatataaaatttagagggtttagttgtagggttgaggtttgtaagtatgttgtgtatatttgtgtatgttgtgttttgtataagggtatttttgaaggggttgtattggatttaggggtaggggcgtaaaggtgagtttatattagtttttgagtattgtggttttatttagtattttgaggataggtaggatatagttggaggatttgagggtttttttatattagtttttgttttttgtttaagattttttggatttgtagataataatttaacgtatttagagttttatagttaagaattttttgaagaagtttttagtggttgcgtggtggattttcgtaaagttgtttttatttatatttattttgtttggtagtttttatatatttttttatagtatgaggaagggaggttttttattaagatttggattgaatttttttttagtggttgttatatttgatttgtttttgttttagaatttttgtggtttttattttttatagggttaatttttaatatggttgtttgtattttagttaagaggttttgttttgggtttttttagatgtttgatttgggtttgtggttgttttgtttttttttagtgttttttttttcgttgggtgaggaatagtttaggatagaggagttaagtttaggtttatttataggataggtgtttatttcgtttacggtttaggaatagagatttgtcgggttcggtttttcggggagttggtagacggtagaggggaggttggttggtttaggggatgattatcggtggggtaagtatagatagaggggagtataggttttttttagaagattgagaggttttttagaggtatttatagaggattttagttgtgttgtttaagttgggcgatcgttaaattttagcggtttagttgataaaagtttgtttttttttagggttttcggagagttggtgttttttttgggttttaatttgtatggtaggaaggggtttggtgaggaagaggcggggaggggataggttgtagtcggtgtagttatacgtttttttttaaggagtttcggacgttgttacgggtttggggtcggggatagagcggtgattatggttaggttggcgttgttttttgtgtttagttattggatggtggcgttgttgttgttgtttttaggtatagaatttacgacgaggtttgtggggtttgtttttatttttagttgtttgggttttgcggttttgttttttgtttgttttattttttttttttgttttttattttttatcgtttgttttttttttatggttttggggtttgggtttgtgggtgttagttgtacgtggtgatgggtttaggagtttgtggttttagttttttttttgtttggagagtattaggttgagttgggtatgaggagtaaattagagttagtaattaggatcgtggaagaattaggtttaggaggaagagaggttgagggcggtgtttgggggtcgggaggggagaggttgttttaatcggattttggaagatgtaagatttaaatgtggtttttttttttgggaggtgaaagatttttcgggttgtgattttttttttgtttttttttaaaaaaaaaaaaaaaaagagagatagggtgtttttatgttgtttaggttggttttaaatttttggatttaagcgatttttttgttttggttttttaaaatattgagatttttttgttttttttgttttatttagatgtttgtttaaagttattatgagggttaaaggtagaaagggggttgggggtagggttttcggtatttttattttatatttgttttttaagtattgggggtagggaggatcgaggggttttgaagttgttgttatggaaggaggaagtagtttcgggaatatagagggtatgtaggggtggggtagtttaggttagaggaggttttgattggtttcgtttatttttttttatttagtagt

SEQ ID NO: 356 - DNA, 5971 bp, Artificial Sequence
  chemically treated genomic DNA (Homo sapiens)
gttgttgggtgggaggaagtgggcggggttagttagggttttttttggtttgggttgttttatttttgtatgttttttatgttttcggagttattttttttttttatgatagtagttttaagatttttcggttttttttgtttttagtatttgggagatagatatggggtgggggtatcggaagttttgtttttagttttttttttgtttttgatttttatggtggttttgagtaggtatttgaatgagataggagggatagggaaattttagtattttgagaggttaagataggaggatcgtttgggtttaggagtttgagattagtttgggtaatatagggatattttgtttttttttttttttttttttttaaagagagataggaagaaagttatagttcggaggattttttattttttagaggaggggattatatttggattttgtattttttagggttcggttgggatagttttttttttttcgatttttaggtatcgtttttagttttttttttttttgagtttagtttttttacggttttggttgttaattttggtttgttttttatgtttagtttagtttgatgttttttaggtaggagaggaattggggttataggtttttgagtttattattacgtgtagttgatatttatagatttaggttttagggttatgagagggagataggcggtaaagagtgagagatagaggaggagggtggagtaagtaggaggtagagtcgtagggtttagatagttggagatgagagtaaattttataggtttcgtcgtgggttttgtatttgagagtagtagtagtaacgttattatttagtggttgggtataggagataacgttagtttggttatggttatcgttttgttttcgattttaaattcgtgataacgttcgaggttttttggaggaaaacgtgtaattgtatcggttgtagtttgtttttttttcgttttttttttattaggtttttttttgttatgtaaattgggatttaggggaggtattagtttttcggggattttgggggagggtaggtttttgttagttgggtcgttaaggtttggcggtcgtttagtttgggtagtatagttggggttttttgtggatgtttttggggggttttttagttttttgggggaagtttgtgtttttttttgtttgtgtttattttatcggtggttattttttgggttagttagttttttttttgtcgtttgttaatttttcgaagggtcgagttcggtaagtttttatttttgggtcgtgagcgaaataggtatttgttttatgaatgaatttgaatttagtttttttgttttgaattattttttatttagcgggaagaggagtattgaagaaggatagggtagttatagatttaggttaggtatttggaggggtttagagtagagttttttggttggagtgtaggtagttatgttggaagttgattttgtggaggatgggagttatagaggttttggagtaagagtaggttaagtgtggtagttattgggagaagatttagtttaggttttggtgagaggttttttttttttatgttgtgaaagagtatgtaggggttgttaaatagggtggatgtaggtggagatagttttgcgaaaatttattacgtagttattgggggtttttttagggagtttttaattgtgggattttgagtgcgttgaattgttgtttgtaggtttagggggttttgggtagggaataggagttggtgtgggggagtttttaggttttttagttgtattttgtttgtttttagagtgttggatggagttatagtgtttaggaattgatataaatttatttttgcgtttttgtttttgggtttaatgtagtttttttagagatgtttttgtgtagggtataatatgtataagtgtatatagtatgtttgtagattttagttttgtagttgagttttttgaattttatgttttttggtagttttttttttgttttttattttcgatttttaggagaggaagagatgttaaatcgtcggtgttttttgtttattttttattttttttataatttttcgttttttagtttgtgttggggtaggtttgtttggatttagggagaagtagaattattttttatgttatggttggaaggtagagggtttgggtggtttttttttagattttggtttaggtttcggatttgataaggtgggggttatttttaaggggtgtaggttaggatttgagttacggaagttaggggtaggagggttaaggttttattcgaggaatagttcgtttcgggtagttttagatgtttttttttgtttttagatgttttaaatgaaaaaatatttttttgaaaagttgttagatgtttagtttatggaataaatagtttagaaatataaatattatttgaggttagtttgaggtttatgggttcgtatgttggtgagggtggttggagagagattgattcggggggagtggggtaaaatttgggagttttatggtttaggaaatattttttttgagtttttaacgatagagttttttattaattttggggttagtgtttttttaaagttggggggtataattgggaaaggtttggggtatacgtgtttgtggggggtgtgtgtgtgtgtgtatgtgtatgtttatataggtgtgttgtttggattttgtggtgtggggtttattttggagttggttttagggtttagcggattgtagggggtacggaggttggtggggggtagttggtatttatttttaggtgataggtgcgttaaaattttagaaattattattaaagaatttatttaggtaattaaaaaaattatttgtattttagaaaatattgaaataaaaaatttaaaaaaataagtgagaagtagtttttattttagggagggaagatatatatatttcgtggataaggatgtagatgtggtttttgggttttatttttatttatgtcgggtagggatttgtttttaggaggggcggaggtagcgggggttttatcgtttgtagggttatttgttatattttgagtcgtgttgtttttttattggtgataatagttttgagttttattttgggtttatgatgtttttttttttttagaataggaggttttataagtttatttttgtttttgttttcggttgttcggggttttatattttgatttttgacgatatttttttttttaggaaggtaatattaaaataaggaatgggggttagggtcgggcgaagggataaggggtttagggggtggggaagtaagaaggtagcgatttttagttattttaggatgtcgggagggggaagaattttagggaaagaagagtttagatttttgtttttttttttagtttaggtgttttggatttgttgggttgttgtgattgggaaaagatttgttaagaaggacgtgggtttgagttttgatttagtagtgtagtagttaggaaatttttttaggttattagtggttttttattaagggtggttttgttttaacggagggagcgtttgtatatgtattagggtaatcgcgttggttttaatgatcggtgggtgtttggggcgggaggggtattggttggtaaagtagagttttttgttttatatgttaatagtatttatgaggtaatatttatttttaattttttagtgattaaggttttttattttcgtaaaatagaaataagtttaatagcgcgtttttttgttgttgttttttggggtttttttgagataagattttgttttgttgtttaggttggagtgtagtggtgtaatttttatttacggtaatttttgttatttggatttaagtgatttatttattttagtttttcgagtagttgggattataggttatgttattatatttggttaatttgtgtattttttgtagagataggttttattatgttgtttaggttggttttaaatttttgagtttaagcgatttattcgttttagttttttaaagtgttgggattataggcgtgagttattgcgttcggttttaatagtgcgttggtcgaagggtagttgtgtatattgaaggttattttgtatttgaggtatttggtgaatgtggtggacggtacgttttgaggagggcgaggagtgcgaggagtggtacggatgtttggggaggtgggtagttgtgattgttgttttaagttgtttttgttttttatttaatatgaggtttttttttttttattatttaaggtttaaaggatgtgtgggtttgagtattttgcgttttgtaaatttttttgtttttgatgttagagagggttttaggcgaggtttggaggaatttaaagtgaaaagaatgtttttagtgttatttttaatagagtttatttggattttttttttttttttggttaattttgttaatggtttattaattttatttttttaaagaattagtttttttttttttttgagatggagttttgttttgttgtttaggttggagtgtagtggtatgattttagtttattgtaattttcgttttttgggtttaagtgatttttttgttttagttttttaagtagttgggattataggcgtgtaatattgtatttagttaatttttgtatttttagtagagatgaggttttattattttggttaggttggttttaaatttttgttttcgtgatttgttcgtttcggttttttaaagtgttgggattataggtatgagttattgtgttcggtttaattttttgttttaattgattttttgtgttgtttgttttaattttatttggttttgttttgattttttttatttttttttttttgttgggtttgagtttaatttgtttttgtttttttggtattttgaggtatttgtggttttttagagtttttgatgtaggtatttaatgttatgaattttttttttattattatttttgttgtattatagaggttttgagaagttgtgttattattatttattttaaagaatttttaaatttttattttgattttattgttaatttttaaattatttaagaatagattaatttttatatatttgtataattttgagggttttttttggagtggatttttagttttattttattgtggttggagaagatatttgatataattttgattttttaaaagatatatgtatacgtatgtttatagtagtataatttataattgtaaagatatggaattaatttgagtgtttattaatttatgagtggataaagaaaatgtggtatatatatatttttttatggaatattatttagttataaaaaggagtgaaataggttgggtattgtggtttatatttgtaattttagtattttgggaagttgaggtgggcggattacgaggttaggagattgagattattttggttaattaggtgaaattttgtttttattaaaaatataaaaaattagtcgagcgtggtggtaggcgtttgtagttttagttatttgggaggttgaggtaggagaatggtgtgaattcgagagacggagtttgtagtgagtcgagatcgcgttattgtattttagtttgggcgatagagtgcgatttcgttttaaaaaaaaaaaaaaaaaaaaggaagcgaaatagtatttttttgtagtaatttggttggagttgtaggttattattttaagtaaagtaatttaggaatggaaaattagatagtatatgtttttatttgtaagtgggagttaagttatgaggatgtaaaggtataagaatgatataatggattttgggaatttagtgggggaacgttgagggaggggtgagggataaaagattatatattgggtatagtgtatattgtttaggtgttaggtgtattaaaattttagaaattattattaaagaaattatttaggtaattaaaaaaaaaattatttgt

SEQ ID NO: 357 - DNA, 6587 bp, Artificial Sequence
  chemically treated genomic DNA (Homo sapiens)
  unsure 575..576: n is a or g or c or t
attttgtatagttggtatatagtatgtttttagtaagtgatgaattaaatagttttttattttgaaaaacgtgtttgatttatatatgaattattaatattagggttgttttttgtaaataatagatttttattaagtatgtattaagtgaatttataattataaatatatgatgtttatattggataattagtatattaaagaatatcgggttttaatttatttcgtaggttattagttattggattagggtgatttttttattttttttaagtatttatatttatttgtaaaataaggattatggtttttttattatattataggttatattagatttatgaaagatatagtatttttaagataggttttatttaaggatatgattttgtttttattaatttttaagttaaatattttaaggttagataaattgggggattagagagaatagtgtgaatatattcgttattgagttgttattattgtgaagagtaagggtttagtaaagagtgtattagaatgtgtgatgaataagtttggagatatataaaaaattttattggtaatattannatatttttaaaaatgtttaatattattaattattatattatgatatattattttttattatttagaattgttattataaaaaagtgaaaaataaataaatagatgttggtaaggttgtagagaaaagggaatatttatatattgttggtgggaatgtaaataagtttagttattatggaaagcgatttgaagattttttaaagaattattttaaaattattatttgatttagtaattttattattagatatatatttaaaggaaaagaaatttttttattaaaaggatatttgtattagtatatttattgtaatattatttataatagtaaagatttggaattaatttaggtgtttattaatggtagattggataaagaaattgtggtatatatattttatggaatattatgtagttagaaaaaaggatgagtttatgttttttgtagggatatggatgaagttggaaattattatttttagtaaattattataaggataaaaaattaaatattatatgtttttatttataggtgggaattgaataatgagaatatttggatataggaaggggagtattatatacgggggtttgttatgggttggggggaggggggagggatagtattaggagatatatttaatgtaaatgacgagttaatgggtgtaatatattaatatggagcgtgtatatatatgtaataaatttgtatattgtgtatatgtattttagaatttaaagtagaataataaataaaaattgataataaaaaaattaattaaaaaaaaagagttataggtaggaagagtaagatgttaagtataggaggaagagtgtgtggtgggttagtaagaagacggtttttattttgaacgagggttagttttgaaagttatttgtttttattttaagtattttggtgatttttattttaaagaattagaaagaatgtgatagtattttaagaggaagaggtgaatttttttattttgatgagtttgttgttaattttagtaggttgtggtatttttggggagtattatagttttaaagtttagattagttgttttatgatgggtgtaggttttatagatatgtttagatgaagttatatttaaaaatgaatttttaaattttacgggagggttattttagaatatgaaaaatttttttgaaaatttttgttagtgtaataggttttgtttatttggtaatagtgagtttattgtgggaaaggggtttttttagtagttaggttagtatcgtgggttttgagtaggtaatttgtaaatgatagtattgaggttattgttaggagttagtttagttttttttgtggatgttgaacggaagggtaggaaggttgagtttaggttagttttattagtatgaggaggtgaagtggttttaaggttaagagtagaaagatggaatttttatttttatagagattattttgtttaggggtaaagtaaagggttaggttttttttacggtgtcgtaatagtttttgtattaatttttgagtgataaagttgtatttttttttcgttatttttttttgttgggttttttatagtttgtgattgtgtttttattttatttataatgttttttattgtataaatatttttaatttttatgaatttaaatttgtgtatttttttttttttcgtggtttttaagttttgtgttttgtttattttagaattataaaaatatatttttataaatttatttttttaattttttatataaaaatttttaaaagaatttttatgtgaattatttttaaaagaattttttttatttttattatagtaaagttaaggatggatttataaaaaaataagtggtattaaagaatttatattgaggagtagtaatttttgttttatttttttttaattttgggtttgttttttagaataaatttatttaaagtttttttgttttgttttgttttgtttttgaaatagaattttgttttgttatttaggttggagtgtaatggtataattttagtttattgtaattttcgtttttgaagtttaagtaagttttatgttttagtttttttagtagttgggattataggtatgtattattatgtttagttttttggttttttttttttttttggagagttggggttttattacgttggttagttggtttcgaatttttggttttaagtgattcgtttattttagttttttaaagtgttgggattataggtatgagttattgtgtttagtttttttttaaattttttatttggttttgttttgttttgttttgttttttagtaatataggtattcgggttcggttttttttgttcgtttttatttattttatttttagtgtttagaaatttattttagaaatttgtggtttataggttatgtttttagatatattgtaggaggaagaggaattaaatatattttattagtatataattttggaagagaagttttttgaattttataattaggattggggaaattttgtaaagtatttttttggtgttttttttttttagtttttttgattaagttatattaaagcgttaatggtaaagttgtttaatgtgtgtttttttaaggtaggttaggattttattgggatttttaaaatttgagggtgtttgtgatcgttaaaatttgtatttatgtagttttttatgaaatttttaaaattcggttgggtgtagtggtttatgtttgtaattttagtattttgggaggtcgaggagggtggattataaggttaggagtttgagattagtttggttaatatggtgaaatttatttttattaaaaatttaaaaattagtttggtatggtggtatacgtttgtagttttagttatttaggaggttgaggtagaagaattgtttgaatttaggaggcggaggttgtagtgagttaagattgtattattgtattttagtttgggcggtagagaaagattttatttaaaaaaaaaaaaagaaaataaatttttaaaattttgtatttttttgtttttttaagttgatatttataattttttattattttaaatatttggaaaaaaaattatttttagtgtattgtaataatgtattaagtagaagtggttaaaattagtgaaaatatttttttgatttgaataaatgtttaagaaaatagaaaatatgaatttatttttaatttatgttttttttatttgaaaatgtaatgttgatttattagaggtaaggtaggaattgttatatttatattttttgtaattatttaaaatatgtatttgagattagaataagatataggtgaagaagggtgtttattaggttttttttgttaatatagaaggagatagtgtagtggagtttttttatagtaagttttgtttttatgatttttaaagttttagtattttaaattttaggtgaatagggtggtatttattaagttttgttataaatttgttgttgagatgaaggaagtcgtcgttgtagttagtattttttatttatacggtttgttttttttttggttggtgtgggaaggatggcgttttttttttttttttttttttgagatggagttttgttttgttatttaagttggattgtagtgttgtgatttcggtttattgtaatttatgtaaggtgttgttaggttttatttgtgtaaataagtatattggtttagtatgggttagttgtttatttataggggttttagaattttataaagggatatataggggtgggtggtaatttagttggaaatgggagtgatgggtatgattaaagttttttttattttattagaggcgtatttaattgtggttagggtgattagaatttattgtttagcgtggttggtaggagtttattttttgaagatggtgggatttagaggtgggagtagagttgggtggttttgtgagttgagtatttttttaaaagtgttttttatatatgaggttgatagtttatttttgtagggatttaggagtaattttgggtgttaaaataaaatttgagattagtatagaaatagttagtttatgaagttggttttttattatatagtaaggttagttagatgttttttatttttttcgggtattatttttttttttttttaggtcgtttggtgttcgtggtgttttatgtttgttagtttatgtacggtggtgagggaggttgttgtgtgatttgttttagttatagtttttataaaagtaattagaagaagacggtagtagagggcgtttttttaaatattttgtttaatttttggtattgataagtattgagtgaatttaaattttttgtaaagtaatagaagttagaaggggaaatgtcgtttttttgaagattatttaaagaaaaagtgatttgttattgttttatagattgtaagaagagaatattttagaagtggagttttattttgaaattaaaggatttaaagaaaaagtggaatttttttttagtaagtaagtatatttattattattttattatgggatagtttggtagaattagttattagtaattttattgttttttaaataaataatatttttgttattattttttggatttaggtttgtttttaaaggaatttttagggttttatttttataggaggttgtggtttttcgatatatttggagtattatagtgagaattgtggtttattattttaaaatattttagattttagtaaatattgtttttgtgggtcgtatttgaattttttaagttagtaaaattttagtgaaagtgggaaaatcgtttgagttcgggaggttgagattgtggtgagttatggttacgttattgtattttagtttgtgtgatagagtaagattttattttaagaaaaataaattttggtgaataagttttttttaattaattttgtttaaaatggatgatggttaataaaataatatggcgtggttggaattttagttttagggtggtttttaaagaggatatttaagtattttttgagtagtacggggttgtgttttggtagtagtttgaaggggtgatagtggagtatagtgtttatttttattttttaattttgatatatttattggaaaaattaatttttagttattttatatgatagtatataattttttttttttttttttttgagatggagttttattttgtcgtttaggttggagtgtagtgttgtaattattttggtttattgtagtttttattttttggatttaagtaattttcgtgttttagttttttaagtggttgggattataggtatttattattatatttggttaatttttgtatttttggtagaaatggggttttgttatgttggttaggttggtttggaatttttggttttaagtaattcgtttattttagttttttaaagtgttgggattataggcgtgagttattacgtttggttttggagtatataattttgataagtaacgtttgtagtgtttttttttttttttttttttatggatagatttttttggttattgagattttatatttttttatgatatattatttgagtagagggtttaaagaattgagatatttgtttttttatgttaatatgttaagaaagaagttgttttataatttaggttttgttttggataaaatatatttttattgtttgttttatgttttttggtatgtttagaagaggatttgaatttttgtaggttggttaatagatatggagggtttttagagtttttttgtttttaattaaatttttattttatttattaagtagaaagtttttttatggaagggttgtggttggtttttggaattggtttttttatagaatttttattcgtttttttttagggttacgttttgttttaaaggttgtttaggttaagttttttaatatatttttgtaggttattcgagagttttgtaatttaaagtatttatatttttttttttgaatgatttttatttgttttttttttagg

SEQ ID NO: 358 - DNA, 6587 bp, Artificial Sequence
  chemically treated genomic DNA (Homo sapiens)
  unsure 6012..6013: n is a or g or c or t
tttgaaaaaggaataaataaaagttatttaggaaggaaggtgtgaatattttgagttgtaaaattttcgagtagtttgtaaaaatatattggagagtttaatttaagtaatttttaaagtagggcgtgattttgaggaaaagcgaatggaaattttgtgaggggattagttttaagaattaattatagtttttttatgaaaaggttttttatttaataggtggggtgaagatttggttagaaataggagagttttaaggattttttatatttgttagttaatttgtaaaagtttaaatttttttttgaatatattaagaaatatagagtagatagtaagggtgtattttgtttaaggtaggatttaagttatgaaataattttttttttgatatattaatataagaaaataagtattttaattttttaaattttttatttaaataatatattataaaggggtatgagattttaataattagaaaagtttatttataaaaagggagggaaaaaaagatattgtagacgttatttattaaaattatgtattttagggttaggcgtggtggtttacgtttgtaattttagtattttgggaggttgaggtgggcggattatttgaggttaggagttttagattagtttggttaatatggtaaaattttatttttattaaaaatataaaaattagttaggtgtggtggtgggtgtttgtaattttagttatttgggaggttgaggtacgagaattgtttgaatttaggaggtggaggttgtagtgagttaagatgattgtaatattgtattttagtttaggcgatagagtgagattttattttaaaaaaaaaaaaaaaaaaaattatgtattgttatgtgaggtggttagggattaatttttttagtaaatatgttaaaattgagaaatgaaaataaatattgtgttttattgttatttttttaggttgttattaggatatagtttcgtgttgtttagagaatgtttgagtgttttttttggagattattttagagttagagttttagttacgttatattgttttattagttattatttattttagataggattagttaaaagagatttatttattagaatttgttttttttaagatagaattttgttttgttatataggttagagtgtagtggcgtgattatagtttattatagttttaatttttcgagtttaagcgatttttttatttttattagaattttattggtttgagaaatttaaatacggtttataaaaataatatttgttaggatttaggatattttaaaataatgggttataatttttattatgatgttttaaatatgtcgggaagttatagttttttgtgggaatgagattttaagggtttttttgagggtaagtttggatttaggaggtggtagtagaggtattgtttgtttaaaaagtagtgaggttgttggtaattagttttattaagttattttatagtaagataatagtaaatgtatttatttgttgaagaaaaattttattttttttttaaattttttgattttagggtaagattttatttttgagatgttttttttttatagtttataaagtaatgataaattattttttttttgggtaatttttagagaggcgatatttttttttttaatttttgttattttatagagggtttgagtttatttagtatttgttagtgttaggagttggatagggtgtttgaagaagcgttttttgttgtcgtttttttttagttgtttttgtagaggttgtggttggggtaaattatatagtagttttttttattatcgtgtatggattaataaatatgaaatattacgagtattaggcggtttaggggaggagaagaatggtgttcgagaagagtgaggggtatttggttagttttgttgtgtgatgggaggttagttttatgggttggttgtttttgtgttggttttaagttttgttttagtatttagagttatttttgagtttttgtaggaataagttgttaattttatatgtaggggatatttttgggagagtgtttagtttataggattatttaattttatttttatttttgaattttattatttttagagagtgggtttttgttagttacgttggatagtgaattttggttattttagttatagttgagtgcgtttttggtgggatgaggaagattttagttatgtttattatttttatttttaattaggttgttatttatttttgtgtgtttttttgtaggattttggagtttttgtgagtgagtagttgatttatgttggattagtgtatttgtttgtataggtggaatttgatagtattttgtatgggttgtagtgagtcgagattataatattataatttagtttgggtaatagagtaagattttattttaaaaaaaaaaaaaaaaaaaagacgttattttttttatattagttagaaagagagtaaatcgtgtgggtgagaaatattgattatagcggcggttttttttattttagtaataagtttgtggtagagtttagtggatattattttatttatttgagatttggaatattgaagttttggaaattatgaaggtagaatttgttatgaaaggattttattgtattgtttttttttgtattggtagaaggggtttagtgagtatttttttttatttgtgttttgttttggttttagatgtatattttgaatagttgtaaggaatatggatgtgataatttttgttttatttttagtagattaatattatatttttaagtaaagggaatatagattggaggtaagtttatgttttttatttttttgaatatttatttagattaaagaaatgtttttattgattttagttatttttatttgatatattattataatgtattggaagtgattttttttttaggtatttaaagtaatagaaagttatagatgttaatttaaaagagtaaagaaatatagagttttagaaatttattttttttttttttttttagatgaagtttttttttgtcgtttaggttggagtgtagtggtgtaattttggtttattgtaattttcgttttttgggtttaagtaatttttttgttttagttttttgagtagttgggattataggcgtgtgttattatgttaggttaatttttaaatttttagtagagatgggttttattatattggttaggttggttttaaatttttgattttgtgatttatttttttcggttttttaaagtgttgggattataggtatgagttattgtatttagtcgagttttagaaattttatgagggattatatgaatataaattttgacgattatagatatttttaaattttaagaattttagtgaaattttaatttgttttggagaaatatatattaaataattttgttattagcgttttgatgtgatttaattaaagaggttggaagaaaggaatattaggaaggtattttatagagtttttttaattttgattgtaaaatttagaaggttttttttttaagattatgtattaatgggatgtgtttaattttttttttttttataatgtgtttaggagtatgatttgtggattatagatttttaaggtaaatttttggatattggaggtgagatggatgaagacgggtaaaggaagtcgaattcgaatatttatattattggaaaataaaataaaataaaataaaattaagtaaaagatttaaaaggaggttgggtatagtggtttatgtttgtaattttagtattttgagaggttgaggtgggcggattatttgaggttaggagttcgaggttagttggttaacgtgatgaaattttagttttttaaaaaaaaaaaaaaaattaaaaaattgggtatagtggtgtatatttgtaattttagttattgggaaggttgagatatgagatttgtttgaattttagaggcggaggttgtagtgagttaagattgtgttattgtattttagtttgggtgatagagtaagattttgttttaaaaataaaataaaataaaataaaaaaattttaaatgagtttgttttgaggagtagatttagggttggagaagaataaagtaggaattattgttttttagtgtaaattttttagtgttatttatttttttgtaaatttatttttggttttattgtaataaaagtaaaagaaatttttttaaaaataatttatataaaaatttttttaaaaatttttatgtgaaaaattgaaaggataaatttatgaaagtatatttttataattttagggtgagtaagatataaaatttggaagttacgaaaaaagaaaagatatatagatttgaatttataaaaattaaaaatatttgtataatgaaagatattataaatgaaatgaaaatataattatagattgtagaggatttagtaggaagagatgacgagagggagatgtagttttgttatttagaggttggtgtagaggttgttgcgatatcgtaggggaagtttggttttttgttttatttttgaataggatgatttttgtggaaatgaaggttttatttttttgtttttgattttggagttattttatttttttatgttgataaagttggtttgagtttaatttttttattttttcgtttagtatttatagggagggttgggttggtttttggtagtggttttagtgttgttatttgtaggttgtttatttagggtttacggtgttagtttgattgttgggaaaattttttttttatagtgggtttattgttgttaagtaaataaaatttgttgtattgataaaaatttttaggggagttttttatgttttaagatgattttttcgtgaggtttagaagtttatttttagatatgattttatttgggtatgtttataaggtttgtatttattatagggtagttgatttaggttttaaggttatggtgttttttaggagtgttatagtttgttaaagttggtagtaaatttattaaagtgggagagtttattttttttttttaaaatgttgttatattttttttggttttttgagatggaaattattaaaatgtttaaaatgaaaataagtgatttttagagttagttttcgtttagagtgagggtcgtttttttattaatttattatatatttttttttttatatttggtattttattttttttgtttgtgattttttttttttaattaatttttttattattaatttttgtttattattttattttaagttttagggtatatgtgtataatgtgtaggtttgttatatatgtatatacgttttatgttagtgtgttgtatttattaattcgttatttatattaggtatattttttaatgttattttttttttttttttttagtttatgataggttttcgtgtgtgatgtttttttttttgtgtttaagtgtttttattgtttaatttttatttatgagtgagaatatgtggtgtttggttttttgtttttgtgatagtttgttgagaatgatggtttttagttttatttatgtttttataaaggatatgaatttatttttttttttggttgtatagtattttatagggtatatgtattatagtttttttatttagtttattattggtgggtatttgggttgattttaagtttttgttattgtgaatagtgttgtaatgaatatattagtgtaggtatttttttggtagaagaatttttttttttttgggtatatatttagtaatgggattgttgagttaaatggtgattttaaaatagttttttgaggaatttttagatcgttttttatagtggttgaatttatttatatttttattaatagtgtataagtatttttttttttttgtagttttgttaatatttatttatttattttttatttttttataatagtaattttgagtggtgagagatggtatattatggtgtgatgattagtgatgttgagtatttttaaaaatgtnntgatgttattaataaggttttttatatatttttaagtttgtttattatatattttaatgtattttttgttaagtttttgttttttataataatgataatttaataacggatatatttatattattttttttagttttttagtttgtttaattttgaaatgtttgatttgaaggttgatgaaaataggattatatttttaagtaaggtttattttgggaatattatgttttttataggtttaatatgatttatgatgtgatggaaaaattatggtttttattttataggtgagtataggtgtttggagaggataaggaaattattttgatttaatagttggtaatttgcgaggtaagttgaagttcggtgttttttggtgtattagttatttagtataaatattatgtatttgtagttataaatttatttaatgtatatttagtgaaggtttattatttgtagggaatagttttagtgttgataatttatgtgtgaattagatacgttttttaagatgagaggttatttgatttattatttattgaggatatattatatgttaattatatagagt

SEQ ID NO: 359 - DNA, 18598 bp, Artificial Sequence
  chemically treated genomic DNA (Homo sapiens)
  unsure 248, 251, 261: n is a or g or c or t
ttatgtagttataaaaaatgatgagtttatgttttttgtagggatatggatgaaattggaaattattatttttagtaaattatcgtaaggataaaaaattaaatatcgtatgtttttatttatagataggagttgaataatgagaatatatggatataggaaggggaatattatattttggggattgttgtggggtggggggaggggggagggatagtataggagatttattttttaatgttaaatgnagngttaaagggntggtgtatttttttgtaaagtttatttgtttatttgttgttcgtgtattttttttggtgaggtatatgtttagattttttgttttttattaaattgggttgtttgtttttttatttttgagttataagagtttattgtgtattttggatattagttttttattagatatattttttgtaaatattttttttttaatttttggcgtgtttttttatttatataatggttgatatatgtttttgttttaaggaggaagggttttaaaaatataatttatagtagtagtaaaaataaaaatttattgtaaatgttttatgtttatttttaggtgatgttagggaattatggatttagtagggtttaattaaaggggagtgttaagttttgggggttgtggttgataatttttttttattggtaattgtgtagtagggttgggagtaagaagataattttagttttgagttgtattatttttaaattaagaataatttaggaattgtgtttacggtgaaattttggttttttttatatagattatattatgtataggatatgaatttttgtttatgaatttaagtatatatgaaattattattttgaaaattttttttaatttaatttaattttattggtgagttttaattttgttagttgaaaaagagattgtaattgggttatgtaggagtttttttttttttttgtagtttagttagaatttaagaagtttatttggtaattggaaaatgatggaagggttttaagtttttagtttgttttggttgttattggtatttttattatttgagtttatagtggtttgtgaagttcggtagttttttgtttttatgttatagtggggaatgagaatatttattgatgttgggttttatgagtaaagtatgttgtttttttaggtatgagttattatatttgaggttgttattttttcgggagtattgatggaggggtagttgggtttttattgtttataggatttagataattattttttgtttttttttttttttgtattttaaaagtattttttttttttttttttatttttaagttatcggtattattttttttatgggtttttataaaagtttggatgaatttttgaatttgtattttttttgtttttttttttgtattaagaaagtttagaaaataaatattaattaacgttttaataaataatgttgttttaattatttgtggaaattattttgtattagaattattattagtatcgttttttagagtgtttttagatttgattattggtcgtaggaggttatttttatataataataaatagatggttgaaattggaaaatttagttaaatgtttagatgtttttagatttttacgggtttttggttttggtatatggagtagattttgattgtgtggtttttaggggattttttttggtgaagtttggtgaggttaatttttatatttatatatattagttattgtgtgtagtttgtttttttttggttgtttttatttgtagttttggtttttttagttttgagagcgttggagaatgaggtagtggaggaagtagttttatatagaaagtagtttttgaagtaattttagtaattttttttttattaaatataaggaattgattttttttattgggttcggtttttggttagttaaggataatattgttgattattattacggttggttttattttatttttggttttgatgatatatgtgggagttagaggaattttgattggttgattgttggtttgttatataaataagatggggtaagggggttgcgatatgatttgatatgtgaaaaaaaaaaaagtcgtggttagtaattttttgtaattgttgaaaggttaatttaatttttgattttttaataaaagtgattttgtttattgtttgttttgttttgagagttttttttgttaggaggtaggttgattgatttagggagaagggtgttggtggtagagttgttaatgggtgagggttttagagattatcgatatgaggggtagttgagaatattgtagtatttagttgagaggagagattattaataaaatttataaaattagtttttagttatttggaagggtttatataaaaggataaaataatatgttttggtagttttagaaaataggatagagataagtagttggtatttatggattggaggagtgagtggtagtagtttggggattatttataaaaaagatatttttttgttaatttttttttttaatagtgaattttttaatttgataagtaagaaagtataggttagatacgtatttgttatgatattgaaggggtttttgtttgagtgagagattggaatgatgagttttgaggttttttatagtttagtaattttagttaagttggagaataagagaattttatgatattatattatttttttatttttgttgtttgttttattatttatttttttttattttttttaatattattttacgttatagtattggaggaggttgttttaaataggaattgaaataagtagattaaagaagtgttatggaagggaaaataataaaataatttgttttttaagagtttattattgttaggatttgtgttaagtattatatatatgttatgttatttaatcgttatgatatgtttatgagatatttagtattatttttgtgaggaagttaaagtttagagaggttaaataattgttttaagaatatataggtattaagtagtggagtagggtttgaatataggtttttatgattttaaagtgtagtgtgatatgttatttttattgatttgtttatggaaaatgatattgttttttaatttagtattaatataaagatttttttttaaatagatttatttaaagtatgttataaaaatattatataaataatgaaatagattttatatgagtatgaagtggtattagtagttagaatgatgaaagtttggggaatattattttaaatattttgatagttagttttttaatttagtttgttttatatttggattgttgagtataaggaaaagaaggaaatatgaaaattaagtgaaatatgagttattttttttgtgttttgataggtgggtaattgattatatgttataataagaaaattaaatgaatttttttaaataatagtaaaatttgtgattgtaaaatttagaggaaaattttaggtgggatttatttgtatgaaggatgaaatttttaaggtttgaatatagaatggttgagaggaagtgatgattttgtgagttaagattttggattttgggggagttttgtgggtttgagaagttttgggtgaaaggtgaagggttttataggtttgtttatagatttttgtagtgatagaagggagatttttgtgtaaaggttaaagtaagaattgggaaagtttgaaaagaaaataggaaagtaataatgaagatgaaataattatttggtatattttgttatatgatttataggtaaggttttttttgttttttataataatgtagtaaagaagtgattatgagttatattttataagtgagaagattgatatttaaatatgtttaataattggtttagggtttagtggttaagttaggattggatttcggattattagttttaaatttatatttttttttttgtattatacgtttttgtgtggatgagtttttttaattttgttaataataaattgttattttgttatttttaatgttttttgttttataggatatagttagtttttaagagattagggaggtatgtttagagggtgttgttttttttttttgaagtttaagtgttatagattttagaggtatataaatgttttttatattgagtagaggattttgtagtgtttgattagggtagaaaaaggaggtatgtatttgggggaggattatatacgagtgaaatttgttttcgttgaagtattaggtttggagaaatttattgggtatttatatattttttttatttttgtttatgatttgtagttaaatttaagagtattatttatttttaggaatagtgtattaaggtaatagaaatattttagatttatataattggggttagattaggattatttgaaaatgaaggttgtgtatgttaattgttttttaataggatgggtggagagatgtatttaatgaatgattttggggaagggttagaagtgaagtatatggtttttttgtttttatttattgaaggttgttttttgaagtttcgtggagtttagtgtttgttatatggttgtttatatttgttgaattgaattgtatttttatttatgggttttaaaggttgtgtgtattttgggatttttgggaatttgttagggaaggtgtttttgttatgtttgtggatggggttttttttgggggttttttagggttttatatttatgtttcgagggtacgtttgtagttatttttattagtggaaatgtttatttgtcggtagaagttatttggaattaagtaagagtattgtttttggttgtggtgttgtttttttagttagtttttttttttgtatttgagttttatcgttagttttggtattatttttttttttataaggagttttaggaggtacggggagttcgtaaatattttttttggtttatttttattattttgtttttgtgttttttgggaatgttgttgtgtttatgtatttggtttttttttggagttatagtggataggtatttgtgataggtatgtttgtggaggtttagacgtttagggagtggtatgagataaagttgtaagttgtatttggggtagaaatgttgatgtgttaatggtcggttagagaatgagtaaaagggattgtagagagtatgtttaaaatttttgattattaggtttgttttttagattgattatattggaggtgggatattataaaaatttgtttttttttgttagatttttttatttgtttttcgtgagttaagagataaaataggtaggaaatagaaggtgttatttattaaataattggtagttgtttttggttttggggtgttggggttttcgagtagtttttgttttagaagaagtagtttaaagatgttagttcgtttcgtttgagttttttgtgttagtgggaaatttagagaagggggattttttttttttgtagtttttttgtaatggatttatttggtttttttgtttgattttttttttttttggtttagagatttttttttaatatttttttttatttaagtgttttattttaatattagttttatttggtattagagattaagatttaatttaaaaagaaatatttttgggttaaaaaagagtttaagtaagtgattgaatataatgtgttttatatacggtgaatttatttgtatttgtatttgtaaacgggtttaaaatattatttttattaatagtaatttaaggttttggagagttaggtgaaaatagtttttgataaagggaattttttattttttttaaattgtaataatgaaggaaatgaattgtttattttatatgtaattttaattttgggattaaggttttgtattaaaatgcgtttatttatgtgtttagatttgtagttcgtgttatgtttgttgttgtagatatcgttaatattatttatgtgagttattttgtgtataatggaagtttttataaatttttatttatttatttttaatatagttattaagtgtttgttatgttttaggtattagggatttaataggtagtataaaagatataaggaaaagttgtatttttgttttttagtttagtggggaaattatattaatttaattatattaaatatgattatatagtaatagtgttttaaagggaaggaaattgttttatgtgattatattagttgattaattattaagtttttgtatttgatattttggttagtttattttttttgaattttatatgtttttttttgggtgggggtgaggatgggattttatggagttgaggttagggtaggtagggagaaaatatgagaaagatgaagagataagttaagttagattttttagtagaaaaattaaggttgaaatattatgttttaaaaattagattgaggtgggagttgaggttaggggtttttaggttaggggattgaagttttaaagagataaaattagagtaaaagtaagtatagagagtggtagagaggtttttgggtatttttttatagtttattttagtgttggtaatttattttttatggttaggtaggtaagagtatttgtggggtgggagaaaggatagggttataggttgggtatatagttttttattggtttttattttttttttttttttttatatagtgttgttttcgaattgtatattggtttatattcgggttgaggtttgggaaataggcgttattttgaatatgtgtggaggaagaaaagtgtgtttttagtattttttatttttttattacggttttgagattttaatatcgggaagtatttcgttttttatcggtttttttttatttatggacggatatgatttttttttaagttttatgttttttttagataaattaatttgaatttaatgtttaatggtttaaaaataaataaaaaaaatttttttttttttagttagtatttgtattttaataggggtttttaaaaaatgttttagtttaaggaatgagtaatgtgggaattttaagtagtagggtaggattggtgtatagtatggggagagaaggttttttaagttgtggttttgaaatgttggttttttttttttgattatgatgttgtttttgagaaaataagaattaggttattttaggggattaggatgggtatggtttttttttagtgagttttatgagttttatatttgatagttagagttttcgagtggatgagtatagattagaagaagtattgtgaaattttgtatgatttttatttttttggtaaaaaggaaaaaaaatcgtttttaaatttattaatagtttgaaatagggtgtgttttgatttagaaagtttcgattttagatataattcggagaattaggcgtgttttgtatatagatttgtttttgggggatcggaaaagttaaatgttatcgttatgttatgtttttttttttaggttagtgaggggaacgtattttttattttaatattttagttgtttataatattggaaggtggataaaagtattttttgttttttttaaatttgcgaagatattttttttttgtatttatttatttttgatgtagttttttttatgtttgtatggaaatattgtgtttttaaatgagttttagaaagaataatttacgaaagaaaataagtattcggttagaaaaatttttataaatggggaataagggggatttgttttaaggagagattggaaattaagttagatataaaatttagtttaagttagaaggagatatggttggtgggagtttgaggaaaatagagtttaggatggaggacgtttttatttttagttatgttttttgtttattagatattaagaagtgtttatgttttatcgaggtagtttttatatttattttttttttattatgtcgattgtttttttattgttttaggtttattattttaagtcgacgagtttgtaatattggtttttttgattattttgatattagtcgttattttttgataggtttattttttttaagttgttattatattatttttttgtttttaaattattaattttaaatttttaattttttgttaaattaaatatgaattttttatttgattttttatgttttattaggttattttgttttttgttttatttatagaaattaattttttattatttatttaaagataatttttgttgtaggttagttagttttttttattgttttgtaaaaattttatggttatttttttatttttatgtgtttttaaaaattgttatttgattgtgttttagaaagtcgttaaagaatatatattaatgaaaagtattaaaaaggttatatttgatgttatgtgtgtattaaaaatatggttgaaatatttatttagtgaaatttaattaatattaaaaagtggttttttcggaagtattagttttttgagatttattaaatagatgtttcggatgtagggttatatattattaggaatttgtttagggaagaattattggaagtttgtaaagttttttaaggatagaggacgatagttattacgttgagttttaggaaattaattattgttattgttaaaggaagatagcgttttttagaggaagattgttaaatagtgtagtggtttaggttaatagtttttataagtgggagtattagaatgagtggatttaattatttaaaattaatatagggtggaattttatttgttataatagaaattaattcgtgtaagttttaatatgtagggtatagttttgagattaagtttgatttatttgttaaagtttagtttaattattattatttttatattatttttttaagttgtaggagtgtttgttgttttttatgttttttgaagttttggattatttgtagttagtttagtagattttatttagatagggattttttaaatgtattatattgtttattgtgttaaaaatgagaggaattgatttagggtgagagcgatggagtgtttagatgtttttttttatttttttttatttttggaaatgtaatgagaattttagaggtgaattgaaaagttatgagtttaattatttatttaattcgagattcgtttttaaaatgttttttttgtgttattatttttattttggtttgaatagtatttgtgatagggagtttattattttataagaaaatttagttattgtttgtagttttttattaaaagttttttattatttggaattgaaatttggttttttgtaatttttagttattggaattatttgttttttagtaatagtgtatgtatttttttatggaagggtttttatatatttgtagatatttagtatatatttgtaatttttttttttttaggtttattattttagtttttttagttgttttttatttgatataattttattatttattagtgaattttgttgtttttttttttgataaatcgaatttgttagtgttatttaagtataattgattttatagaacgtgatattataagcgatgtggtttgattagtatagagtttagtgaatgaattttatattaggattggatgaaatttatttagttatattatattaatatttatgtgatttttatgtttattatggatagattattttttttgtgtttattttttttttttatatagttgttattttaaaattgaagtatagatttttatatttatttttaggagatttattatgttagtattagtttttttttttaggttttatgaatgttaatttagttaatttatttttgagttatttgttttattttgtgttatttgtatagtataagtttgatttttgttgtttttattagtagttttattaaatatataaaagtgaaatagtgaaatatagagttttgtagtatttattgtgggattagttttttagataagaatgatgtagttgttgagttaaatgaataaatgaataaattaaataatattttgtttttattttttatattgatttattattatattttgttaattataattttaaatattttttgatttatttattttttttttattttatttgttattattttagattaaatagttatttttttttatttaaataattgtagtagttaattgattggtttttttgtatttgttttggtttttttattatttatttgttatatagaaattatggttatttttttaaaatgtaaatttgatgatattagttttagttttaatttttttggtggtttatatataaagattgaaatttttaattgattaataatatacgtgtgatttggtttttgtttatttttttagttttgttttttatttgtttttttattttggttatagggattttttcgtatttttttttacgtgtttttttgttttagcgtttttgtatatgttgttttttttgtcgagaattttttttgttaatttttaagttttttatttatttagtatttatttatttaatttgttttgtttgttttttggtatgttataaattgtttttaaatttagtagtttagaataatgaattttttatttttttttataatgtttggggttaggaatttgagcgggttttggttgatttttttgttttttatgttattaattgatattatttgatgttattaagttgatggatgggttgatttggagatgtattgtttagtttggtagttattggttatttgaaatgtagttagttttaattgagatgtgttataattataaaatatttatatgattattgaagatttggtgttattaaaaaatttaaaatattcgttaataatttgtattttgattatatgttgagattataatattttatatatattagataatataaaatgttattaaaattaatgttatttatttttttttaatttttttaatgtgattattataagtttttaaattatatttgtggtttgtaattgtggtttgtattgtattttttttttttgagatggagttttattttgttgtttaggttggagtgtagtggcgagatttttgtttatcgtaagttttgttttttaggtttaagtgatttttttgttttagttttttgagtagttgaaattataggtgttcgttattatgtttagttaatttttgtatttttagtagagacggggtttttttataatggttaggttggttttaaatttttgattttaggtaatttgtttatttcggtttttttaaagtgttgggattataagtatgagttattatatttggtttgttttatatttttattggatagtgttgatttaaagtaggagttaagtagttttttttatgaaaggttatatagaaaatgtttttagttttgtaggttatgtagtttttattatagttgtttaatttttttattgtattgtaaaagtagttatagataataatttataatagatatagtagtgttttagtataattattaataaaaataggtggtagttagatttggtttataggttgtagtttgttgatttttgatttagaagatttaagattttatttatatgtttggtggtttggtagggataggtggaaggtttagttgggattattgatttaaatagttatatagttttttttagtatgatggtttcggggtagtgggatattttacgtggtggtttagaattttagataaggtatttttagagagataggtagaagttgtgaggttttttatgattaagttttcgaagttttagaatattttttgtattgtattttatggttaaataggttatttaggttagtttagatttaaagagaggagatttaattttatttttttatgggaggaggagtagttaaggatatgtgtttttttttaatttattatattattttttagattttagtttaggttggttttgttatgggtttttaaagtattatgaattttttttttgtagtatttgttatagttagttttatatttttttgtatgattatttgattattattttgtttttttattaaattgtaggtaattacgtgaagaggaattgtttttggttttgtttattatatttttagtattaaatataatgtttggtttaataaatatttgtggaagaaacgaatgaatgaatgaattaatagtaaatgaatgaatgagtaataattgtattaatattaattttatatttttttatattgttgttacgtatattataagatattttgttagaagttttgttaaaatttaaatatatttgatttttagtaatttttttattttgtagtttagaaattttataaagaaggaaataagtttattttattttttttagtattttaaagagggtttttgttttgagttgtttaagagggtttttgttttgagttgttgtttattttgtaaatattgttcgaatatttattgtgtgttaggtatagagagtttttttttgttgtaatttggataggtattagttttttagcgtgggtttaggttttaggtgtatattattgtgtatcgtttaagttatatttagaagagttttggggaaatatgattatttgggtagaaaaggaaggaattaagaagaggtatttttgtgtttgaggtttgaaggagcgtgtgggtttttgtttaggtaaagggtaggatgaggggaggtggggtggtagtagttagtaatggggtgggatagcggaatgtagaggatgaaattttaggttttggtgttttgagaagtaacgttgtgtagtatgttatatttagaggtaaattaaggttttagggagttgatgttgtattggagttttattttttttttagcgagttggtgacgtgttagtttagtaggtttggtttatttaattataagtatgaatcggtagaaggtaatgagttgggttttgagtgttgttgggttgaggtcgatttaattttttttttatagagattgtggtgttttttgttttgtttagggtaagaatttttgtatattttataagaagttaaggattatttattattttttatattggttttggagtttgtattgtagttatttgtggatatttttttttttttttagtgttaggtgggggattaaggtttatatgtttttataattttttaatttttagaataagtttgatattgagtagatgtagtaaatgtttgtttgaaagattattttaataaataattttttgaggtattagtaaattttttagtattttttttgatatttcggttattattaatattttatataaagttgtgaaataagtttttttttttgttgttttttaatatttattgtggatttttttttttattttttgttttattttttttgtatttttttgttttattttattattggttgttgttattttattttttttattttgttttttgtttgaatgagagtttatatgtttttttagattttagatataaagatatttttttttagttttttttttttttgtttaagtagttatatttttttagagtttttttagatatggtttagatggtttatagtagtgtgtatttgaagtttaaatttacgttgggaagttggtgtttgtttaggttaaagtggagaagtattttttgtatttggtatatagtgggtattcgagtagtgtttgtagaatgaatagtagtttagggtagaaatttttttgatgtaaagggatattttggggttttttttttttttattttagtttgtttttttgagagttttttcgattttaggagttattattatatttggttttaggttgtgttgttttcgtttgttttagaggttagataatattagagttttttttattggtttttgtggtagagtaaaaattggttggtatttttaaacgtgttatattagtgtgaaagaaatataggttgtatgggtttaaattttagttgtattatttattagttgggtagtttagggtaagtattgtgatttttttgagattttatttttttatttgtaatatggggataaataattttattttgttgtgagtagtaataatatgattaattatttagttaatttttatttatgttttttgatgggttagatatataaagtaagtgaaagtggattacggtaggtgttttttttggtttttggagtgaatttttatttatatggaggtttttttttttagatttttgattagtttatttattttatttatagattttattttgtgtttagttgatagaaatttttttttagagaattttttcggtaaatttttaggttttttttttttttatttttttttttgtttttttttttcgaaggtaagagtttttattttataggtttattggagaaagttatggtttttggttgtggttggaggtttatttttgagggagtggggatatttttatatttttttacggttaatgatattggagaaattggttttttaatttagtttatattttcgtatatatatattatatattatggttagaatggagagaaattttttatatggggtatttgtattttatgaaagaaaattatattaattttgagtattttaatattttattatagtagggttattgataaattaagtgtttagagtgttttttaggatggtgtgtggtttttaaattaatattagtgaagtttattggaaggattgttatttttgggttaggttaggattttgaggagagatgtgtttgttgttattaaatttttgatagattttggtagaagtgtgttaggtttattttggatagttttagaggataaaattagtattgacggaaggaaggtaaggagaagtagtttttaatttaggggaagagagagtttttaaattgagaaattaaaaatggtattgattttttgttagggttagtgtttttttttattgtgtgaattataggggttatttgtttaagattttttagagtaatattgattttatgtaattatttgaatgaaaggtgatttgttaaatttatagtaaaatataatttgatttgtgtttttgtttgttatgttattttagaagaaaaattgtttttggttaggtcgaatataatggttttttggtttgtaaattatgagcgatttttatattaggtgggagtttagatttaaagggtttttttttttttttttttttttttgtagtagttagtttaatgagtaggaagttgtttttattgttattttatattgaattttttttattttgagtatgattatttttttaaatgtatgagatagttatttttagttttatatattatttgtatattttttttgttcgtttttagtttgggtttttggttttttttttattgatttatagaagtttttttatatatagaaaattaatattttgtgattagttgtaaatatttttagttgttgaaatatatagtaggtgttttatgtaagagttgaatagttggtttttgattgttgttttttttttttttagttaatagattttagagtttgggtattatttattgagttaaagttgatattatataagcgtagagtatgggaatagagttttttgtttgatttttgtgagtttttttatattaaattattaatagtaatttatttattatagaatatgagaattgaataagtgttggtaaggatgtggagaaattggagtttttgttttagttgtcgatgggaatgtaaagtgatgtcgttgttatggaaaatagtgtagtagttttttagaaaattaaaaatagaatgattatatgatttagtaattttttttttgggtatatatttaaaagaattgaaagtagagttttaaagagatatttatatagttttgtttatattagtattatgtataatagttaaaaggtggaagtaatttaaatgtttattaaaaatgaatggataaataaaatgtagtatgtatatatagtggaatattatttagttttagaaagaaaggaaatttaaatatatgttataatgtggatggtttttgaatatattatattaagtgaaataagttagttataaaaagataaatattgtatgagtttatttatattttaagtagttaaatttatggaaatagaaggtggaatggtggttggtaagagttgagaggaggagagaaagaagagttattgtttaataggtatagaggtttagttttgtaagaatgaaagagttttgaagatggatgtagtgatgattgtataataatgtgaatgtattttatattattgtatatttaaaaggtgagatggtaaattttatgtgtattatgttataattaataaaggatttttaaaaatttatgagatttaattttatcgttttttattgttaaagattataaattagaaaatacgttggtaaaaggtatatgaaaataagtatttttgtgttgattagagtataaacgtataattttataaattaataaagatttttaaataataaagatttttaaaatttatgagatgtaattttattattttttattgttaaagattataaattagaaaatatgttggtaaaaggtatatgaaaataagtatttttgtgttgattagagtataaacgtataattttaggggagaataatttgtaattattttttaattttttggttaaacgattttgtttttaggaatatagtttatttttatttgtgtgatatggtatataattaaggttttttattgtaataaaagattggaaataacgttaagtatttattattagtggtttggaaatatatatatattattgttatttaatagaatataatagattaatatgtaatttttagtatgaggatattcgttatatgttgatatagaataatttttaaggtagttatatgtgtgtaaaatcgtatatagtatgttattatttgtgtttaaaaataaaaagaaaatagaatatgggttaatgtttttgtttagttttgtttaaagtaattttaagtagaggtaagaaattggtaatatgtaatagtgattatttttgttatttttgtggaagaaaattagatagttaagggataaggttgggaggtagatttgttttttattatttattatttttattttttaaatttagtattatttatatttagtattatgatttatttaaaaatatttattaaaaaaagaaaaggtatagtttagaaggaaaaaaaatataatagatatttttagtttaatgttttgtattgggtgttatgagagtagaggaaagaaatatatatggtttttagataatatcgtttggggtatatatttttgttattcgattaagaatagttgtgtatttttttttggaaagaattgatttgtttttattaatagatttatgaatttagtggatagatttgtgaattaatttattggttaggtttttttttttatattggttgttaaaaagttataagttaaatttatgttttttttagtgtaaattgggtagatttttagggtaagtatttagtattggttttgtttttggttttgtattatatttttgtatttggtttgtttttttatttgttttttatgttggttattttttttgtgtatggttatattattttgaatgtgtttgatcgtatttaatgttggttatttttttttattttttgtttttttataagttattaagtagtttttttggtgttagttagggtaagtgcgtgggtagtgaaggagggaggagggagaggaagaaagaagatagaggttataaagtaaagtatatttttttttttggttttattatgtagattaagtgaattgtttttaaagcgtggtttttaggtcggtagtattgttattattttatgttgttaaatataaaaatttatgggttttattttaatttattaagttagattttttgtggttgaggtttaggaaatttttaggtgatttttatttatatttaagtttgagaattataggaaaataaaaggaaggtagatttttaagcgtaaatgtaatattaatcgattgtttttattatgtttgttatgttggttaagataaataatattagttattgtaataattaattttttaaattttattttttgttaatattataatttattgtagattagttgtgggagaggtgtaaagagagttgttttattagtttattaagtaaattagattttttttattgtgagattttgcgattttttaggtttttggatattttttttggattttttgttgttaagaaggtaggagagggaggaaagagaagagattttagtagttagatttggaagaaatattttttttgtttataattttattggttagaagttagttttatggtttgtataattgtaggggaggttgggaaatgtgatttatcgatggagttaagagtaaaaggaaatggttttgatgaagttttggtattgtttttgtatattcgagaatttaagtgaattttaaattttacgtttaggttatgttttggtgaatatcggtttttagtttttttttttaattaagttttattttttttttttcgattttagt

SEQ ID NO: 360 - DNA, 18598 bp, Artificial Sequence
  chemically treated genomic DNA (Homo sapiens)
  unsure 18338, 18348, 18351: n is a or g or c or t
gttagagtcgagaaaaaaaaggtaaaatttgattagaaaaggaaattgaaaatcgatgtttattaaaatatgatttggacgtggagtttgggatttatttgggttttcgggtgtgtagagataatgttagggttttattaaagttatttttttttgtttttagttttatcgataggttatattttttagttttttttgtagttatataggttatgagattggtttttagttaatggaattgtgggtagaaaagatgttttttttagatttggttgttaaagttttttttttttttttttttttttgtttttttagtagtaggggatttagaggaaatgtttaagggtttagaaaatcgtaaagttttataatggaagagatttggtttgtttaataaattaataaagtagttttttttatattttttttataattgatttataatggattgtgatattggtaaaaaataaaatttgagggattgattattgtagtagttagtattatttattttgattaatataataggtatgatgggggtaatcggttagtattgtatttacgtttagaaatttgttttttttttgtttttttgtggtttttaaatttgaatgtgagtaaaaattatttgagagttttttgggttttaattatagaaagtttggtttagtaagttgggatgaaatttatgaatttttatgtttaataatataaggtgatgataatgttgtcggtttaaggattacgttttgagagtaatttatttaatttatatgatgaagttaagaaaaaggatatgttttgttttataatttttattttttttttttttttttttttttttttttttattatttacgtatttattttaattagtattaaaaaggttgtttagtggtttataaggaagtaaagaataaggagaggtgattaatattagatgcgattaggtatatttaggatggtatggttatatataggaaagatgattaatatgagaaataggtggaaaagtaaattaaatataggaatatgatatagagttaaggataaggttagtgttaaatgtttgttttagaaatttgtttaatttgtattgagggggatataaatttggtttatagttttttaatagttaatgtaaaaaggaaaatttaattagtgaattaatttataggtttgtttattaaatttataggtttgttgataaaaataaattaattttttttaggaaaagatgtataattatttttgatcgaatagtagaaatgtatgttttagacggtgttgtttagaagttatatgtgttttttttttttgtttttatagtatttagtgtaggatattgggttagaagtgtttgttatgttttttttttttttagattatattttttttttttttaataaatatttttgaatagattatggtattaaatgtagatggtattaaatttgaaagataaaggtgataaatagtggaaagtaagtttgttttttagttttgttttttagttgtttagtttttttttatagaggtaataggggtgattattgttatatgttattagttttttgtttttatttaaagttattttagataaaattaaataaaaatattgatttatattttgttttttttttatttttaagtataaatggtagtatattatgtacggttttgtatatatatgattattttggagattattttgtattagtatgtaacgagtatttttatgttaaaagttgtatattagtttattgtattttattggatgataataatatatatatatttttagattattagtgatggatatttaacgttgtttttaattttttgttgtaatggaaaattttgattatatgttatattatataggtgggagtaagttatatttttagaagtagaatcgtttgattaaagggttgaagaatagttgtaaattgtttttttttgagattatacgtttatgttttgattaatataagagtgtttatttttatgtattttttgttaatatgttttttaatttgtgatttttagtaataggaaatggtgaaattatattttataagttttagaaatttttgttatttagaaatttttattagtttatgagattatacgtttatgttttgattaatataagagtgtttatttttatgtattttttgttaacgtgttttttaatttgtgatttttagtaataggaaacggtgaaattagattttataagtttttagaaattttttattagttgtggtataatatatataaaatttgttattttattttttgagtgtatagtggtatgaaatatatttatattgttgtatagttattattatatttatttttagaatttttttatttttgtaaaattaagtttttatatttattaaataataattttttttttttttttttttttagtttttgttaattattattttattttttgtttttataaatttgattgtttagggtataagtaaatttatatagtatttgtttttttgtgattggtttattttatttagtataatgtatttaagggttatttatattgtagtatgtgtttgaattttttttttttttaagattaaatgatattttattgtatgtatatattatattttgtttatttatttatttttgatggatatttgagttgtttttattttttggttattgtgtataatgttggtatgaataaggttgtatgaatatttttttaagattttgtttttagtttttttgggtatatatttagaaggggaattgttagattatgtggttattttatttttaattttttgaggaattgttatattattttttatagtagcgatattattttatatttttatcgataattggaataagagttttaatttttttatatttttgttaatatttgtttaatttttatattttgtgataagtaggttgttgttggtgatttagtatgaggaagtttataggaattagatagagaattttgtttttatattttgcgtttgtgtggtgttagttttggtttaataggtaatgtttaaattttgaaatttattggttggaagggagggagatagtaattaggaattagttgtttagtttttatatggaatatttattgtgtattttagtaattgaaaatatttgtaattagttataaagtattaattttttatgtataaaagagtttttataaattaataagaaaaaggttaaagatttaaattaaaagcgggtaaaagaaatgtatagatagtatgtggaattggaaataattattttatatatttgaaaagatggttatatttaaaataaaagaaatttaatataaaatgatagtgagaataattttttatttattaggttggttattataaaaaaaaaaaaaaaaaaaagagggttttttgaatttgaatttttatttaatatgggaatcgtttatggtttgtaaattaaaaaattattatgttcgatttaattaaagataattttttttttggggtggtatgataaatagggatataaattaaattatattttattataaatttaataaattattttttatttaaataattatatgaaattagtattgttttaaggaattttggataaatggtttttgtaatttatatagtggggagaagtattgattttgataaggaattagtattatttttgattttttagtttggaaattttttttttttttgggttagaagttgtttttttttatttttttttcgttaatattagttttgttttttgaagttatttagagtaagtttaatatatttttgttaaagtttgttaaggatttggtgatagtaaatatatttttttttaaaattttggtttggtttaggagtaataatttttttagtaagttttattaatgttaatttggagattatatattattttagaaaatattttggatatttagtttattagtgattttgttgtaataggatgttaaaatatttaagattgatatgatttttttttatgaagtataagtgttttatatgaagaatttttttttattttagttatgatgtgtgatgtgtgtgtgcgagggtgtgggttgggttaggaagttagtttttttaatgttattggtcgtgaagaagtgtagaaatgtttttatttttttaggaatgaatttttaattataattagaagttataattttttttagtgggtttgtaaagtggaaatttttgttttcggagggagagagtaaaaaggggaatggaagaggaaagaatttaagaatttatcggggggattttttgagaggagatttttgttagttaagtatagaataaggtttatgaataaggtgggtgaattagttagaaatttaaaaagaggagtttttatgtaaatggaggtttattttagaaattaagaagagtatttgtcgtaatttatttttatttattttgtatgtttggtttattagagaatatgaataagagttggttaaatgattaattatattattattgtttataatagggtgagattatttgtttttatgttatagatgaaggaatggagttttagagaggttatagtatttgttttaggttgtttagttagtaaatggtatagttgagatttaaatttatgtagtttgtgttttttttatattggtgtagtacgtttaaaaatgttaattagtttttgttttgttataggagttagtggaaaggattttgatgttatttagtttttgagatagacgggagtagtatagtttagggttaggtgtgatggtggtttttggaatcgagaggatttttagagagatagattggggtgggagaagaaggggttttaaagtatttttttgtattaagagggtttttgttttgagttgttgtttattttgtaaatattgttcgaatatttattgtgtgttaggtatagagagtatttttttattttaatttggataggtattagttttttagcgtggatttaggttttaggtgtatattattgtggattatttaagttatatttagaagagttttggggaaatatgattatttgggtagaaaaggaaggaattaagaaggggtatttttgtatttgaggtttgaaggagtatgtgggtttttatttaggtaaagggtaggatgagggaggtggaatggtagtagttagtaatggggtgggataggggagtgtagagaggatgaaataggaagtgagaggaggggtttatagtagatgttggagagtaataaagaaaaagatttattttataattttgtgtagaatgttagtggtaatcggagtattaggaaaaatgttgagaagtttgttggtgttttagaaggttatttattgaggtagttttttaggtaaatatttgttatatttatttagtgttagatttgttttagagattgaggggttgtaaagatatgtaggttttggttttttatttggtattaaagagaagaaaaagtgtttataaataattataatgtaggttttagggttagtgtggaaggtggtaggtagtttttggttttttgtgaggtatataagagtttttattttgagtaaagtaggggatattatagtttttgtggaggaaggattaggtcggttttagtttagtagtatttagggtttagtttattgttttttgtcgatttatatttgtggttggataagttaggtttgttggattggtacgttattagttcgttgagaggagagtagagttttagtgtaatattagttttttggggttttggtttgtttttgggtgtgatatgttgtatagcgttattttttagagtattaggatttgaagttttattttttgtatttcgttgttttattttattattggttgttgttattttatttttttttattttgttttttgtttgaataagagtttatacgtttttttagattttagatataaagatatttttttttagttttttttttttttgtttaagtagttatatttttttagagtttttttaggtgtggtttagacggtatatagtagtgtgtatttgaagtttaaatttacgttgggaagttggtgtttgtttagattatagtagagaagaattttttgtatttggtatatagtgggtattcgagtagtgtttgtagaatgaatagtagtttagggtagaaatttttttgagtagtttagggtagaaattttttttgagatattgggaagagtaagataggtttatttttttttttataaagtttttgaattataaaataagaaggttattgggaattaaatatatttgaattttagtaaggtttttgatagagtattttatgatatacgtgatagtaatatggagaaatgtaggattaatattgatatagttattatttatttatttatttgttattggtttatttatttattcgttttttttataaatatttattgaattaagtattgtgtttggtgttaggaatataatgagtaaaattagaaatagtttttttttacgtggttgtttatagtttagtagaaaagtaagatagtgattaagtaattatatagagaaatgtaaaattagttatgataagtgttataaaagagaggtttatggtattttgagagtttataataggattagtttaaattgagatttgaagaatgatataatagattaaaaagaaatatatatttttggttatttttttttttatgaagaggtagagttggattttttttttttgaatttgggttagtttgagtgatttgtttgattatagaatatagtataagggatattttgggatttcgagagtttggttataagaagttttatagtttttatttgtttttttgggagtattttatttggagttttgagttattacgtaagatgttttattatttcgagattattatgttggagaggattgtatagttgtttgggttaatggttttagttgagttttttatttatttttgttaagttattagatatatgaataaaattttggattttttagattaggggttagtaaattatagtttgtaggttaaatttggttattatttatttttattaatagttgtattggaatattgttatgtttattgtaaattattatttatggttgtttttgtagtgtaatggaagagttgaatagttatgatggagattgtatggtttgtaaagttgaaaatattttttatgtggttttttatagaaaaaattgtttgatttttgttttagattagtattgtttagtaagaatataaaataggttaggtgtggtggtttatgtttgtaattttagtattttggggaggtcgaggtgggtagattatttgaggttaggagtttgagattagtttggttattatggggaaatttcgtttttattaaaaatataaaaattagttgggtatagtggcgggtatttgtaattttagttatttaggaggttgaggtaggagaattatttgaatttgggaggtagagtttgcgatgagtagagatttcgttattgtattttagtttgggtaatagagtaagattttattttagaaaaaaagaatataatataagttataattataagttatagatataatttgaaaatttgtagtagttatattaaagaaattaaaaagaaataggtgatattaattttaatgatattttatgttatttgatgtatgtgaaatattataattttaatatgtaattagaatataaattattaacgaatattttaaattttttggtggtattaaatttttaataattatgtgggtgttttatagttatagtatattttaattaggattggttgtattttaggtaattagtggttattaaattggatagtgtatttttagattagtttatttattagtttaataatattaggtgatattaattgatggtatgaggaatagaaaaattagttaaggttcgtttaaatttttgattttaaatattgtgagagagggtaaaggatttattgttttaagttgttaagtttggagatagtttgtaatatattaagaggtaaatagaatagattgaataggtaggtgttaagtaggtgaagggtttgggagttgataggaagagttttcggtaaagggaatagtatatgtaaaggcgttgaggtaggagggtacgtgagagaaggtacgaggaggtttttgtggttaaaatgaagagataggtgaaagataaggttgaagaggtgagtaggggttagattatacgtgtgttattggttagttaaagattttagtttttatatgtgaattattaaagaaattagagttgagattgatattattagatttgtattttgaaaagatgattatggtttttgtgtagtaaatggatgatagggaagttaggatagatgtaggaagattaattagttggttattgtaattgtttgagtgaaagaagatggttgtttggtttgggatagtagtaggtgaagtaagggaaaagtggatagattaagaaatatttagaattataattaataggatatggtgatagattaatatgggaaatgaggataaagtattgtttgatttatttatttatttatttgatttagtaattgtattatttttgtttaaaagattgattttatagtggatgttataagattttgtgttttattattttatttttatgtatttagtaaaattattaataaaagtaatagaaattaaatttatgttgtgtagatggtataaaatgagatagatagtttaaaaatgagttagttgaattaatatttataaagtttgaaaagagagattaatattaatatgatgaattttttgagggtaagtgtaagaatttgtattttagttttgaaataataattgtgtaagaggaagaagtggatataggagaaatagtttatttatagtaaatataaaaattatataagtgttagtgtggtatggttaagtaaattttatttaattttagtgtaggatttatttattgaattttgtgttaattagattatatcgtttgtggtattacgttttgtgaggttagttatatttgaatgatattgataaattcggtttattaaggggaagggtagtaaggtttattagtgaataatgaaattatgttaaatgaagaataattaaaaggattagggtaatgaatttgaagaagaaaagattgtaagtatatgttgggtgtttgtaaatatgtaagggtttttttatgggaggatatatatattgttgttgaagggtaagtagttttaataattaaaagttatagggagttagattttagttttagatgatggaaaatttttaatagagagttataagtaatgattggatttttttgtgaggtgataagttttttgttataagtattatttaaattaaagtgggggtgataatatagaagagatattttaggagcgaatttcgaattgagtaagtggttgaatttataattttttagtttatttttaagatttttattatatttttaggaataaggagaaataaaggagaatatttggatattttatcgtttttattttgagttagttttttttatttttaatatagtagataatatggtatatttaaaggatttttgtttgggtagagtttgttgagttggttataagtgatttagggttttagaagatatggagaatagtaagtatttttatagtttggaagggtggtgtaaaggtggtaatagttgagttgagttttgataggtgagttagatttggttttagaattgtattttgtatgttagaatttgtacgagttgatttttgttatagtagatgaagttttattttgtattggttttaagtaattaagtttatttattttgatatttttatttatgagggttgttagtttgggttattgtattgtttaatagtttttttttgagaaacgttgtttttttttaataataataatggttaattttttagaatttaacgtggtagttatcgttttttgtttttgaaaggttttgtaagtttttaataatttttttttagatagatttttgataatatataattttgtattcgaggtatttgtttaatgggttttaaagaattgatgttttcgaaagaattattttttagtgttgattgagttttattggataaatattttagttatatttttgatatatatataatattaagtataatttttttgatgttttttattggtatatattttttgacgattttttgagatataattaaataatagtttttaaggatatatggaaatggaggagtgattatggaatttttataggatagtaagaaaagttgattggtttgtagtagaggttgtttttggataaataatgggagattagtttttataagtaaagtaaggagtaagatagtttaatagggtatggaaagttaaataaggaatttatatttaatttaatagaaaattggaagtttggaattaatagtttgggagtagaaaaatggtgtaatgatagtttaaagaaaataagtttgttaagaggtgacggttggtattagggtgattaagaaagttagtattataggttcgtcgatttgagatggtgagtttgaagtagtaaagaggtagtcggtatgatgaggaagggatgggtgtgagggttgtttcgatggaatatgaatattttttggtgtttggtggatagaggatatgattggaggtggagacgttttttattttgagttttgttttttttaagtttttattagttatgtttttttttagtttaggttggattttatgtttgatttggtttttagtttttttttggagtaaattttttttattttttatttgtggagatttttttgatcgaatgtttgttttttttcgtgagttgttttttttgaaatttatttgagagtatagtgtttttatatagatatgaggagagttgtattaaggatgagtaggtgtagagaagaaatgttttcgtagatttagaaggagtagagggtgtttttatttattttttaatattgtaggtaattgaaatattaaaatgaagaatgcgttttttttattggtttagaagaaggagtatagtatggcgatagtatttagttttttcggttttttaagagtaaatttgtgtataagatacgtttagtttttcgagttgtatttagaatcgaaattttttgaattaaggtatattttattttaaattattgatgaatttgagaacgatttttttttttttttgttaaaaaggtaaggattatgtaaagttttatagtgttttttttagtttgtgtttatttattcgagggttttgattgttaggtatgaggtttatagaatttattaaaagggagttatgtttattttggttttttaaggtagtttgatttttgtttttttagaaatagtattatggttaaagagaggaagttaatattttagggttataatttgaggggttttttttttttatattgtgtattagttttattttgttgtttggaatttttatattatttattttttgggttaaggtattttttgaaagtttttgttaaaatgtaaatgttagttggaaggaagagggttttttttgtttgtttttaagttattaggtattaggtttaagttaatttatttaaaaaggatatggaatttagaaaggaattatattcgtttatgaataaaggaggatcgatagggaacgagatgtttttcggtgttgaggttttagggtcgtgatggggaggtggaaagtgttgaagatatatttttttttttttatatatatttaaaatggcgtttattttttaaattttagttcgagtgtaagttaatgtatagttcggaaatagtattgtataggagaagagaggagagataagggttagtaaagggttgtgtgtttagtttatggttttgtttttttttttattttataaatatttttatttgtttggttatgaaaggtggattgttagtattagaatggattgtggaaaaatgtttagggatttttttgttattttttgtgtttgtttttgttttagttttatttttttgaagttttaattttttggtttagggatttttaattttaatttttattttagtttgatttttgaaatatggtattttaattttgatttttttgttgaagaatttggtttggtttatttttttattttttttatgttttttttttatttgttttagttttaattttataaaattttatttttatttttatttaggaagaggtatatgaaatttaagaagaatagattaattaaaatattaaatgtaaaggtttggtaattaattagttgatatagttatatagaataatttttttttttttaaagtattattgttatgtagttatgtttagtgtgattaaattaatgtgatttttttattaggttagaaaataagagtgtagtttttttttatgttttttatgttatttgttaagtttttagtatttggaatatagtaagtatttaataattatattaggaataaataaatagagatttataaaagtttttattatatataggatagtttatataaataatattaacggtatttgtagtagtagatataatacgaattgtaagtttgagtatataaatagacgtattttagtatagggttttagttttaagattgaggttatatgtaagataaatagtttattttttttattattatagtttaaggggagtaggaagttttttttgttaaaaattatttttatttggttttttagaattttaaattgttattaatagagatgatattttaagttcgtttgtaaatgtaaatgtaaataggtttatcgtatgtgaaatatattatgtttaattatttgtttgggtttttttttgatttaagaatatttttttttaaattagattttggtttttggtgttaagtggggttaatattgggatggggtatttggatgggaagaaatattggggaagggtttttggattagagaagggaaaggttaaataggaaagttaagtaagtttattgtagagaggttgtaagaggaggaaattttttttttttggattttttattggtataggggatttaggcgaggcgagttgatatttttggattgttttttttagagtagaggttgttcggagattttagtattttaaagttaagaatagttgttaattatttggtaagtggtattttttattttttgtttattttgttttttagtttacgaaaaatagatgaagggatttggtaggaagagatagatttttgtaatattttatttttaatgtagttaatttgagaagtaaatttgatggttagaggttttaagtatgttttttgtaattttttttatttattttttggtcggttattagtatattagtatttttgttttagatgtagtttgtagttttattttatgttattttttaggcgtttgagtttttataaatatatttgttataaatgtttgtttattgtagttttaaaaagagattagatgtataagtatagtagtatttttaaggaatatagaagtaaggtggtaagaataaattaaaaggagtatttgcgagtttttcgtattttttaaggttttttgtagagagagaaataatgttaggattgacggtagaatttaaatatagaaaggggaattgattagagaaataatattatagttagggatagtgtttttgtttggttttaaataatttttgtcggtaggtgggtatttttattgatgagaatgattataaacgtattttcggagtatgagtgtaaagttttgggaaatttttaaagggagttttatttataaatatgataaagatattttttttgatagatttttagagattttagagtatatatagtttttgaagtttatagatgaaaatgtagtttagtttaataaatgtgggtaattatgtgataggtattgagttttacggggttttagaagatagtttttaatgagtgagggtagagaggttatgtgttttatttttagtttttttttaaaattatttattaagtatatttttttatttattttgttagaaggtaattgatatatataatttttatttttagatgattttaatttaattttaattgtatgaatttagaatgtttttgttattttggtatattatttttggaagtgggtggtatttttgagtttggttataagttataagtagaagtgggaaaggtgtgtaaatgtttagtagatttttttaaatttagtgttttagcggggataggttttattcgtatgtgatttttttttaggtgtatgttttttttttttgttttgattaggtattgtaaagttttttgtttagtgtgggggatatttatgtgtttttgaggtttgtggtatttgagttttaaaagagagaagtagtattttttgggtatgtttttttgattttttggaggttagttgtgttttgtgaagtaggagatattaaaagtgataaagtgatagtttgttgttgatagggttggggaggtttatttatataaaagcgtgtggtgtaagggaaggggtgtgggtttggaattggtggttcgaagtttagttttggtttgattattggattttgggttagttattgaatatgtttgaatgttagtttttttatttatgaaatgtgatttataattatttttttgttgtattgttgtgaaaaataaaggaaattttgtttgtaaattatgtggtagagtatgttaagtagttattttatttttattattatttttttgttttttttttagatttttttaatttttattttgatttttgtataaagattttttttttgttattatagaggtttgtaaataggtttgtaaaattttttattttttatttagggttttttaaatttatagggtttttttagggtttagggttttgatttatagggttattatttttttttagttattttatgtttagattttggaaattttattttttatatagatagattttatttggggtttttttttggattttataattatagattttgttgttgtttgaaagggtttatttgatttttttattgtgatatatgattaattatttatttattagagtataggggaagtaatttatattttatttaatttttatgttttttttttttttttgtatttagtagtttaaatataagataggttaaattgaaaggttagttattaaaatatttggagtagtattttttaaatttttattattttagttattagtattattttatatttatgtaaaatttgttttattatttatatagtatttttataatatattttaagtaaatttatttagaaaaaaatttttgtgttaatattaaattagaaagtagtattattttttataaatagattagtaaaaataatatattatattgtattttggagttatagagatttgtgtttaaattttgttttattatttaatgtttgtgtgtttttggggtagttatttaatttttttgagttttggtttttttatagaagtaatattaaatattttataggtatgttatgacggttaaataatatggtatatatatggtgtttagtatagattttggtaatagtaggtttttaaaaaataagttgttttattgtttttttttttatagtatttttttaatttatttattttagtttttatttagagtagttttttttaatgttgtaacgtagaatgatattaaaaggagtaaagagagatgaatggtgaggtaggtagtagaaatgagggggtgatatggtgttatggaatttttttattttttaatttagttagagttgttggattgtaagggattttaaaatttattattttagttttttatttaagtaaggatttttttagtgttatgatagatgcgtgtttagtttgtgtttttttatttgttaggttgggaaatttattattagaaaagagagttaatagaaaaatgttttttttataaataatttttaaattattgttatttatttttttaatttataagtattagttatttgtttttgttttgttttttagaattattagaatatattattttatttttttatataaatttttttaaatagttgaaagttgattttgtaaattttattaatagtttttttttttagttaaatattatagtgtttttaattgttttttatgtcgatagtttttaggatttttatttattggtagttttgttattagtatttttttttttgagttagttaatttattttttagtagagaaggtttttagggtagaataggtagtgaataagattatttttgttaaagagttagagattgaattagttttttaatagttgtagggggttgttgattacggttttttttttttttatatgttaagttatatcgtaatttttttgttttattttgtttgtgtgataggttagtagttagttaattaaaatttttttgatttttatatatgttattagagttaagggtggagtggggttaatcgtgatggtggttaatagtgttgtttttggttgattagaggtcgagtttagtggagaagattagttttttgtgtttggtgaggaggaagttgttgaggttattttagaaattgttttttgtgtggggttgttttttttattgttttattttttaacgtttttaggattgaagaggttaaggttgtaagtagaagtaattagaggaggataggttatatatagtagttggtgtgtgtgggtgtggaagttgattttattaaattttattagagagagttttttgaggattatatagttaggatttattttatgtgttagagttagaaattcgtgggagtttagaaatatttgaatatttagttgagttttttaattttagttatttgtttgttgttatatggaagtggttttttgcggttagtggttaagtttaaaagtattttaggaggcggtgttgatggtagttttaatatagaatagtttttataaataattagagtagtattatttattgaaacgttaattagtgtttgttttttaagtttttttgatgtaagggggaaagtagaagagatataagtttaaaggtttatttagatttttgtgaaagtttatggaagagatgatatcggtggtttagaggtgaaaagagaggaagagagtgtttttgaagtgtaagaagaagggagggtaggggatggttgtttgggttttgtgagtagtagaaatttaattgtttttttattagtgttttcgagggggtagtaattttaggtgtgatggtttatgtttagaaaggtagtatgttttgtttatggggtttagtattagtagatatttttattttttattgtggtatgggggtagggagttgtcggattttatagattattatgggtttagatagtaagggtgttaatggtaattaggatagattagggatttgaggtttttttattattttttagttattaggtgaattttttgaattttgattgggttgtaggaaaggaaggagatttttgtatgatttagttatagttttttttttaattggtaggattgaggtttattagtgggattaagttgagttaaaggaaatttttaaagtgatgattttatatatatttggatttatggatagaaatttatattttatgtataatataatttatgtgagaagggttaggattttatcgtaaatatagtttttgaattatttttaatttagaagtgatgtagtttaggattggggttgtttttttatttttagttttgttgtataattgttaataaaggaggattgttaattatagtttttaggatttgatatttttttttaattaaattttgttgggtttatagttttttgatattatttgagagtgaatataagatatttgtaataaatttttatttttattgttattgtaaattgtatttttaaaattttttttttttaaagtagaaatatgtattaattattatatgaataaaaagatacgttaaagattggggaaaaaatatttgtaaaagatatatttgataaagggttggtatttaaaatatataatgaatttttataatttaaagataaaagaataaatagtttaatttaataaggagtaaaagatttgaatatatattttattaaagaaggtatacggatagtaaataagtagatgagttttatagagagatatattanttttttaatnttntatttagtattaggaggtaaattttttatgttattttttttttttttttttattttataatagtttttagagtgtgatgtttttttttttgtgtttatgtgtttttattgtttaatttttatttatgagtgagaatatgcggtgtttggttttttgtttttgcggtagtttattgagaatgatgatttttaattttatttatgtttttataaaggatatgaatttattattttttatggttgtatag

SEQ ID NO: 361 - DNA, 5919 bp, Artificial Sequence
  chemically treated genomic DNA (Homo sapiens)
agtatgatttgtttttttaagttataggtaattgaaatatagattttataatatacgatgtaatggttttattgggttttatatttttattttacgaagtataacgatatgttgatttaggagaataagtaggaaagaaaggttttagaaattttatatgtagattaatatatagatagatttttggtttgaaagatgattttttttgttttggagtatagatttatgattaattagtagaagttagaaggtagatttttatagataaaaaattttataattatggaggatgttttgtatttttacgttttttagttaggagaatattttataatgaaaagtggagagttttttaaaatatattataatggtcgggcgcggtggtttacgtttgtaattttagtattttgggaggtcgaggcgagtggattataaggttagaagatcgagattattttggttaatatagtgaaatttcgtttttattaaaaatataaaaattagttaggcgtggtggtaggcgtttgtagttttagttattcgggaggttgaggtagaagaatggcgtgaattttggaggcggaatttgtagcgagttgagatcgattattatattttagtttgggcgaaagtgcgagatttcgttttaaaaataaataaataaaataaataaaatatattataacgattagtaaagtatttagtgagtggggcgggtaggtagggatgttatgaatagaattgtttaatttaataagttgaaagtaatttttattgaggaatatggtaggtaattatttattaaaaattatttttaggttagggatagtggtttacgtttgttattttagtattttgggaggttaaggcgggtagattatttgaggttaggagtttaatagtagtttagttaatatggtgaaattttgtttttattaaaattataaaattagattaggtgcggtggtttacgtttgtaattttagtattttggggggtttaggtaggtagattaattgaagttaggagtttaagattagtttggttaatacggtgaaattttgtttttattaaaaatataaatattagttgggtatggtggtaggtgtttatatttatttagttatttaggaggttgagataaaagaattgtttaaatttgggaggcggaggttgtagtgagttaaaatcgtgttattgtattttagtaggtgaaagagtgagattgttttaaaaatataaataaaaataaaaataaaaatattgatgaattattttgtgattattttgtagcgggttttgatattcgttggcgagatggtgttttaaatagggtttataaaattatgtaattgattaagagaggtttgagtatttataaggatatgttggatttttatttgttttatttaggtttaataattattaatattttgttatatttgttttgtttatttttattagttgttgtttttgtttttgttttggttaaagtatgtaaaagtaaattttagatatcgtgttattttaattttataaatttaaaatgtatgagtatttttttgtataagtataatgttattttatgttagataaaattattaaatttagtttatataaaattttatgaatatttggaaaaatgttttatgatttttaaaattaggatttaaaatataagtatagtttttttgttaagagttttaggtgggtgggtgtgaatagattttttttaggatatattaaggaatatagtaaaagaaaaagatttgaaattgtagtatagcgaggaaagttatattaaggagaattttttagaaatttgtgatattaaatatttagggagaaagtagggttgggatataatgtatgtattttagtatagtagaaattatttttattttattttttttttttttgtagaaatttttttttttttttttttttttttttttttttttttttttgtatatagtttagtatagtaaaaattatttttattttattttttttttttttgtagaaattttttttttttttttttttttttttttttttttttttttttgatatagggttttgtttttttattttgcgtgtagtggtacgtttattatttattgtagttttaaatttttaggttgaagttattttttttattagttttttaagtggttaggattataggtgtttattattaagtttggttaattttttttttttttttttttgagatagagtttcgtttttgttgtttaggttggaaggttggagtataatggtacgattttagtttattataattttcgtttttcgggtttaagcgatttttttgttttagttttttgagtggttgggattataggtatgtattattacgtttagttaattttgtatttttagtagagattgggtttttttatgttggttaggttggttttaaatttttaattttagttgatttatttgttttggtttcgtaaagtgttgggattataggcgtgagttattaagtttggtttaggtttggttaatttttttacgtttcgtagagataaggttttattatgttgtttaggttggttttgaatttttgggtttaagtaattttatgattacggttttttaaagtgttgggattataggtgtgagttattatattcggtttttttattttttttttttttttttttttttttatttttttgagatagagttttgttgttgtttaggttggaatgtaatggtgtgatttcggtttattgtaatttttgttttttaggtttaagcgatttttatgtttcggttttttaagtagttgggattataggtgcgtattattatgtttagttaatttttgtatttttagtagagatggagttttattatattggttaggttggtttgattttaagtgatttattcgttttagttttttaaagtgttaggattataggtatgagttattgtgtcgggttttattttttttttttttttttttttttttgagacggagattcgttttgttatttaggttggagtgtattggtgtgattttggtttattgtaatttttgttttttgggtttaagtgattttttagttttagttttttgagtagttgggattataggtatgtgttattatgtttagttaatttttgtatttttagtagagacgggggttttattatattggttaggttggtttcgaatttttgatttcgtgatttatttgttttagttttttaaagtgttgggattataggcgtgagttacggcgttcggttttattttttttttaatgtgtgttgtaattttagttgattttgttgggggaggatttggaattatttattgagtattttattattagaataagagaagttataagatattttattttttttttatttttaattttttttagagtagtacgggatattttagatttttttattattttattttcgttttttgtttttgttacgaggtttaattttttagagtttttttatgtgatgtttagttgagatttttttgtttatttttttagttttagaataaaaggtttgggttgtgtttattcgtatttattttaagaggagaggattgtatttttttagtgtttttatttaatattatattttttgattttttattttaaattttttattttaagagacgttttttaaaagagttttttgtatattttatttttttggagttcgtgttttagtttattgttaaggaagttttagaattagtgttatagagattttttatttttttgtttttttaagtatatgagattatttttaggtaaaattttaaatttttatgtagggagggagtttaggtgtttatatttttattaaattaaatgagtgggagacgtttgaaatattgtcgttattttttattaggaggatagaaattagagtagggggaatttatttttaagtttatatttgtttatgtttatatatttatatatattttttgtagtttttatagttagtaaagtatttattatagttaaatgaagaaggtatttttttagtattagatttattgtgtttttttttttagtaattaaaggtattggggggattgggataggtttttatataagaaaagggtgtttatttgtatagttttttttttttttttttagagaaggtttgggaggggtcggaggagaggaaaaaggaaaaattgataaagggattttggtttttagatattgtttttttattttgttatttaatgatagtttttggttttattgggttatttttattttgatgtattttcgggtaagagttaattgaaaggtagttgcgtaatatatattagatataatagtttattatgggagagtgaattaaattaggaattttttaaaaagatagaaatagaattttgtattttaaaatagagatagtgtcggggtatgttatgaggtagaggtaacgatttttttgaggtttaggatttttttgtaacgagattttcggttttttggtttttaaaggaggtttttgggttaggtggaatttaattttaggtcgatatatattttttttaggattggtgaaaatagtgagttagaaattaagaaatttttatagattagagatataggtaggaaatttggatttaaagtaggtatttgggaagagtgtttagtcgttttatcggggaagaaatttgtttagtttttaagaattaaatttgtttggggcgggattatttgcggggaggagcgttgggttcgtttttcggttttgacgttgattaatagaaaggtttgggggcggagttagggaaacgcgggaagtaggggcggggtttttggtggcggtcgggaattcggtgggaggcggtaatattgttttaagttggttaaattgataagagcgagaggtatattgcgttttatttcgattcggggttacggtattgggttttgttttttttttttcggttttcgagagttagggttcgttttttgtagggtttttaggttttcgttttagggtcgggttgattcgattcgttggcgttttatggagaatttttaaaaggtggaaaagatcggagagggtacgtacggagttgtgtataaagttagaaataagttgacgggagaggtggtggcgtttaagaaaattcgtttggatacgtgagtggtttttgtattcgggatttttaattggggatttttttgattgttttttttaattttttacgggcgggtagtcgtttagggatcggaagagagtagggagggatttttttagaagtggagaggtgggttgggggttagtagaaggtgaagagtatatttatattttttggggagagtatagggtggtgtggaatttatggaaaattttttttttaaattgagtcggatcgtgtttttaaatgtgcgattatagattcggggagagaaaggaggtttttgagatgaggtttaagattttttatggagtggagttatgtgggaatcggcgagaatcgtttttttgaatgaagagttttttttattgttttatttttattttagaatttttttttttttttaaagaatggtagttgaattttattggtttttttggggaggttgggggttatttttgtatttttttttttttattatagtttttttgttttatttttattaggcggttttatttatttatttttgggaaaagaggagataatggttttaatatatttaaaaattatattttgattatttaagaattagtttttattattattttttttttttttttatttttttagggggtgttgggtggtgtttttttgggggaaagaaatgattaggtgggggggaaaggaatatttgtaattatatttttatttttgtttttttaatttttttaagt

SEQ ID NO: 362 - DNA, 5919 bp, Artificial Sequence
  chemically treated genomic DNA (Homo sapiens)
atttggagaggttgggaaagtagagatgggaatatggttataaatattttttttttttttatttagttattttttttttttaaggagatattatttagtattttttaggaaagtgagagaagagaaagggtgatggtaagagttaatttttgggtagttagggtgtggtttttggatatattaaggttattattttttttttttttaggggtaggtaagtaaagtcgtttggtgaaggtgaagtagggagattgtaatggaggggaaaaaatgtaggagtagtttttagtttttttagaggggttagtgaggtttaattgttattttttggaaagaggagagaattttaaggtgagggtggggtagtgaagagggttttttatttagaaaggcgattttcgtcggtttttatataattttattttatggagagttttggattttattttagagatttttttttttttttcgagtttgtagtcgtatatttgggggtacgattcggtttagtttgggaagaaagttttttatggattttatattattttatattttttttagggagtataagtatattttttattttttattggtttttaatttatttttttatttttaaagaagtttttttttgttttttttcggtttttggacggttattcgttcgtggggggttgggggggataattaaggaggtttttagttaggagtttcgggtatagaggttatttacgtgtttaggcggatttttttaagcgttattatttttttcgttaatttgtttttggttttgtatataatttcgtacgtgtttttttcgattttttttattttttggaagttttttatgaagcgttagcgagtcgggttagttcggttttggagcgggggtttgggaattttgtagaaggcggattttggttttcgggggtcgaggagggggaaatagggtttagtatcgtggtttcgggtcgggatggaacgtagtatatttttcgtttttgttaatttggttaatttgaaataatgttgtcgttttttatcgagttttcgatcgttattagaggtttcgtttttgtttttcgcgtttttttggtttcgtttttaggtttttttattggttaacgttagagtcggggggcgagtttagcgttttttttcgtaaatgatttcgttttaggtaagtttggtttttgggggttagataagtttttttttcggtggggcggttgaatattttttttaagtatttgttttgggtttaagttttttatttatgtttttagtttgtagggattttttgatttttaatttattatttttattaattttggggaaaatatgtatcgatttaaggttaaattttatttggtttaggagttttttttggaaattaggaagtcgggaatttcgttgtaaaggaattttgggttttagaggagtcgttgtttttgttttatagtatatttcgatattgtttttgttttgggatgtagggttttgtttttgtttttttgagaagtttttggtttaatttatttttttatgataaattgttgtgtttggtatgtgttacgtagttgttttttagttagtttttgttcgggagtgtattaagatgagagtgatttagtgaaattagaaattgttattgagtagtaggatgggaaagtaatgtttagggattaggatttttttgttagtttttttttttttttttttttcggttttttttaggttttttttgagggagaagaggaagggttatgtaaatgagtattttttttttatataggggtttattttagtttttttagtgtttttggttgttggagggaagaatataatggatttggtgttaaaaagatgttttttttatttggttgtgataggtgttttgttggttgtgggggttataaaaggtatgtgtggatatgtggatatgagtaggtgtgaatttggggatgaattttttttgttttggtttttgtttttttaatgggagatagcggtaatattttaggcgttttttatttatttgatttagtgaggatgtgggtatttgggttttttttttatatggagatttgggattttgtttgaaaataattttatatgtttggaggggtagaaggatagaaggtttttgtggtattgattttgaggtttttttggtagtgagttggagtacgggttttaaaggggtgaaatgtgtaggagatttttttaggaaacgttttttggggtaggagatttaaagtggggagttagagaatgtggtattgggtaagaatattaaggagatataattttttttttttgggatgggtacgggtgaatatagtttagattttttgttttggggttggagagataggtagaggggttttagttgagtattatatgaaagggttttgggggattgggtttcgtgataggagtaaggggcgggggtggggtggtgagagggtttggaatgtttcgtgttgttttgaggagagttggaagtggagaaagaatggggtattttatgattttttttgttttagtggtgggatgtttaatagatgattttagatttttttttagtagaattaattagggttatagtatatattagaaagggaatgaggtcgggcgtcgtggtttacgtttgtaattttagtattttgggaggttgaagtaggtggattacgaggttaggagttcgagattagtttggttaatatggtgaaattttcgtttttattaaaagtataaaaattagttgggtatggtggtatatgtttgtagttttagttatttagaaggttgaggttggagaattatttgaatttagaaggtagaggttgtagtgagttaagattatattaatgtattttagtttgggtgatagagcgagttttcgttttaaaaaaaaaaaaaaaaagaaaggggatgaggttcggtatagtaatttatgtttgtaattttagtattttgagaggttgagacgggtggattatttgaggttagattagtttggttaatatggtgaaattttatttttattaaaaatataaaaattagttgggtatggtggtacgtatttgtaattttaattatttgggaggtcgaggtatgagaatcgtttgaatttgggaggtagaggttgtagtgagtcgagattatattattgtattttagtttgggtaatagtaagattttgttttaaaaaaataaaaaaagaaaagaaaagaaaagagataaggaggtcgggtgtagtggtttatatttgtaattttagtattttgggaggtcgtggttataggattgtttgagtttaggagtttaagattagtttgagtaatatagtgagattttgtttttacgaaacgtaaaaaaattagttaggtttaggttaggtttggtggtttacgtttgtaattttagtattttgcgagattaaggtaggtggattagttgaagttgggagtttgagattagtttgattaatatagagaaatttagtttttattaaaaatataaaattagttgggcgtggtggtgtatgtttgtaattttagttatttaggaggttgaggtaggagaatcgtttgaattcgggaggcggaggttgtagtaagttgagatcgtgttattgtattttagttttttagtttgggtaataagagcgaaattttgttttaaaaaaaaaaaaaaaaaaaattagttaggtttggtggtgagtatttgtggttttagttatttgggaggttaatgaggaagatggttttagtttaggagtttgaggttgtagtgagtgatgaacgtgttattgtacgtagggtgagagagtaaaattttgtattaaaaggaaaggaaaggggaaagggaaaggaaagggaaggaagtttttgtaggaaagggaaaaatggggtgagggtagtttttgttgtgttgaattatatatagaaaggagaggagaggggagggaaggggaggggagagaggtttttgtaggaaagggaaaaatggggtgagggtagtttttgttgtgttgaaatatatatattatattttagttttgttttttttttagatgtttagtgttatagatttttaggaagttttttttgatgtgatttttttcgttgtgttgtagttttaagttttttttttttattatattttttaatgtattttggaaagagtttgtttatatttatttatttaaggtttttaataaaaagattgtatttatattttggattttgattttaaaaattataagatatttttttagatatttatgaaattttatatggattgagtttgataattttgtttagtatgaaatgatattgtgtttatgtaagaaaatatttatatattttaaatttgtagggttaaaataatacgatgtttgggatttgtttttatatattttagttaaaataaaaataaaaataataattagtaaggataaataaagtaaatgtggtaaggtgttgatagttgttggatttgggtggggtagatggaggtttagtatatttttataaatatttagattttttttggttagttatataattttgtgggttttgtttaaaatattatttcgttagcgggtattaaaattcgttgtaaaataattatagagtggtttattaatatttttatttttatttttatttatgtttttgagatagttttatttttttatttgttggagtgtaatggtacgattttggtttattgtaattttcgttttttaggtttaagtaatttttttgttttagttttttgaatagttgggtgaatataagtatttgttattatgtttagttaatatttgtatttttagtagagatagggttttatcgtgttggttaggttggttttgaatttttgattttagttgatttgtttgtttaggttttttaaagtgttgggattataggcgtgagttatcgtatttggtttagttttgtagttttagtagagatagggttttattatgttagttaggttgttgttgaatttttgattttagatgatttgttcgttttggttttttagagtgttgggataataggcgtgagttattgtttttggtttaaaaataatttttaatgggtgattatttattatgttttttagtagaggttgtttttagtttgttgggttgggtagttttgtttatagtatttttgtttgttcgttttatttattaaatgttttgttagtcgttgtaatatgttttatttattttatttatttatttttgagacggagtttcgtattttcgtttaggttggagtgtagtggtcgattttagttcgttgtaagtttcgtttttagggtttacgttatttttttgttttagtttttcgagtagttgggattataggcgtttgttattacgtttggttaatttttgtatttttagtagagacggggttttattgtgttagttaggatggtttcgattttttaattttgtgatttattcgtttcggttttttaaagtgttgggattataggcgtgagttatcgcgttcggttattgtgatatgttttaaaaaattttttattttttattatgaaatgtttttttagttgaaaaacgtagagatgtagagtattttttatagttgtaaaattttttgtttataggagtttgttttttagtttttattgattggttatagatttgtattttaaaataaaaaaggttattttttagattaaagatttatttgtgtgttgatttgtatatagaatttttggagttttttttttttgtttgtttttttgggttagtatgtcgttgtgtttcgtaaaataagagtatagagtttagtaaggttattatatcgtgtattatggagtttatattttagttatttatgatttagaggagtaaattatatt

SEQ ID NO: 363 - DNA, 5546 bp, Artificial Sequence
  chemically treated genomic DNA (Homo sapiens)
aggaaggatatatagatatacgggagattgtggtaattggcggggaagggtggttttgggaaaagagtaaatgaaataggttttttggagggtttttgagtttaatagttaaaaggttttcgtttaattttcgagttttttttttgtattttatttgtagtgggtttttggtgttgatcgttaggatttggtatttgaagtagtagagtttatagttttaggagtttttttcgttgatttagcggatgaggtagggttgatgcgtgtagcgtattgagtcgtcgtagcggtaggggtttaagagttttttttggaggaagagtgaggaggggttttgttagttattattatttcgattttatttagtcgcgtttttcgatagggaaattttttttttaggttatttttttattttaaataatttaggttttttatttaagatagggtaagaggttaagtaaggttgtaatagaaaagaagttttttttggagattaagggaaattttttatattaaagagatgaaagatggaaagggatggggggattagaggggagaagggttgggttttttttttttttagaatttgggatgggtagtttttaagattttttaaaagaaaggtttttttttaggatttggagggaggggagtgttagagtttttgagttatgtttttttttttttattttattattgtaaagttattttatagatttggcgtaaattgggatgggttatggttttcggtttttacgtattaaaaaggggagaaatcgcggaggtgggagtgaagggtgtttttttttaattatggaattaatttttattatatagagatattttttggtattattttgggataattttgtttataaaattttaataaagaatattttttagaatgagatagaaagttgtagaatgggaagtgaaaaaaagtgttttacggggagaaatattgagttaagtaagggcgttggttgggtttttttttttaaggggggtatagaagtatttttttttttgtttatttgtaagagaataggtttttttagtttacggagattttggggcgagggaaataggagagaatagtagtttttgttaatgggtgagagggattttgcgtttttcggggagaaagttttatttttttttggggatttttgatttttcgatataaataagcgttttaggagttttttgttagtttttcggttttattttatttttatttcgtgttttggggttcgtttagtttttttaggcgtcgcgtttgttcgcggttttcgttgatattttaggtgcgcgtttttatttttcgcgttcggttaggtgtttaggtttgatttgtttcgggttttggaagtagattcggtattgaggggttcggagttcgttgtttaggttattgttgagcgatagggcgtttagcgcgttcgggggcggtagcggcggcgcgggcggcggtaggggttcggttcgcggttttttgtcgtcggttaggtttcgggttcgcggtttcgattcgtagtattttttttcgtcgtcgtcgtcgtttcgggtggagtagttagcgaagggcgtttagtcgtagtcgttttttcggttttttcggggttgcggttcggttcggggtcgtttttcgtttgttagtattagtagttttagttcgtttagaaatatgcggagtcgagatttgagtatcgttcggatatcgggggcggggggtagcgtgtaaggggggttcgttagcggcggggggaggggagaggataaggtcgggaagggggcgcgcgttagagagtcgagtcgggtcggggttttcggggtttgcgatagtcgtttattgttgttatcgtcggggtttcggtgtttgcggggtcgagcgggttggcggttcgggggcggcggggtgggcggttatggttagggtagggggcggggaggggggtttagggtgtcgtatttcgcgggtttgggtttggagcgggtcgggttttcggggttacgcgttcgggtttttttgcggcggggtcgttttttatcgtcgttttttcggttttagttttttttcggtttcgggattaggtttggttcggttcgtgcgttcggcggtggtaaatgtcggtttttttcggcggcggcggcggcggagattttttcggagtggcgggcgggcggggcgggcgtcggggagcgggtgaaggatggagggaggggcggggcggggagggggagaggagaaggggtcgcggttgcgtattttcgcgggtgtttcgtacgagtaggtgtttttaggggcgggggtaagtgtgggatttcgaggagggtggaggaaggggagtggttaaggaaggggagtgtgtatataagttgattaggtgtgtgtttgggagtgggggatgagcgggtgagtatggaaggtgagtggttaaatgacgtaggtgtattagggagggtgaggtttgtgtaaaatgggaatgtgtaaagaaagagttgtgtaagtgtcggaggtgtgagggaggtatatgggtaggggtgggatttagtaatatatttttatttaagggttgaaaagtgtgatcgatggggattgggaaagagaggtgtgtaaggaatggatcggaaagttttattattgggaaagagggtgtgtaaggaatggaatcggattgtttgagaaatagaagtttgtgattgtaatgtgtgaaggaggtgagggagggagtaggggaggtaggcgtgttaaagggatgggagtgttttttttggtatttttttgtttttatttttattatattgaagtgaataatatatatatttatttttttttttttatggagatttttttttgaggttaagttttatttttattatattttttttttttttatatttatattttttttttttttttttttgtaaagttgagggaaaagggattttaggggagtttattgggttaaatatattgggaaaaaatttaattagtgaaagagtaattaatagaagaagggaggggatagagtttgggatagattgttaaattaaggttttttaatagaaagtgatggagagatagtaatgtttttatgaagtatttaaatgttttggatggattaatgaatgaattagaaaaaggggttgggatttaagtagatagagaggacgttttttgttgtaaagatagtaagttgtgaaggttttatgtggaaggtgaggttgaagtggggaatgttggtgtgggaagggagtttgaaaaatttatagataattattttagttttttagaaggtttataaagtatttatttttagtaaggtagttaataaaatatttattttttgagttttttagttagtttagtttttgaggttttttttattagtgttttagttgtttttgttaggaggggtttagggttataagtattaggatggaaagaggaggtatttgtattaatatgtattttattttgttttaagttatggtttatatttattttttagtttgaatttttatatttttagttagatggttaaggaaaatagaagttagagtggaaggagtggtaaatagggtaataaaatggttttagattttagataaatttttataaatgagatattaatcgttttttttttttatttttatatttttaaagggttgggagataaagattttggagttaataaaataaagtaggagaaatttatttgtgtttatttaggtgtttgggtagaggttatttgggaataagtgtgttttggatagtgttaagtgttaagaaagcggtattagggaaaaagagggaagtataataattttaaatgagtagttataaggtttgtagaagggggtatgttatttttatttattgtggtggtttggagggtgtagggggtgtggtggtaatttttttgtatatgtgtaattttgtattcgttttatatatgatgtgataaataatattatatatatatatatatatatagaagtatatatgtatatatataaatattatataattatagaatttttttattggaaaaaaaaaaaaaatttaaaaggttaagtatttttgttttttgtttattaataatttttttgttagatggttttaggtttttgtattaatatttttagggaggtttggaagttggaaaagtgagaggattattttgttattgagtttgttggattattgtattaatttgtttttcgttattttttaatcgtagttttgtttttaaatgggtattgtttattttttattgtagaagattttattgttggttatatttttatagatagtcgtattattattttaaagggttagtgatagatattaaaaataaaataaaaatttatatatatattggaagtaagtatttagtaaaatgttgtagaattaatgaatgaaataatgatataaatgagagtatgtttttttatggtggagcgaaaaggtgatagtattatttttggtattttaatttttattttttttttaatgtagataggttgaaagatcggtagtgagattggagtttagtttttagatcggtagtgagataattttttagtcgggagttgggttttgggtggtttaggttgttatggtatcgtttcgggttttatttttttttgttttttttatcgttttttttttgtagcgggggttgtggtagttagttacgtgttcgtcgcgtagttatatttttgttttttagagtaatgttaagcggttacgtgtgatagtaatagattacgtggttgttatcgttttttcgtttttttatatttttcgttttttttttagtcgaagtattttttgttcgttttttagcgtatgggtggcggttacgtgtttagaacgttcggcgttcgtttcgtttttttagttttcgcgcgtttttttggtagttggttatatggtgagggtgggggtgagggggtttttttagtttgcggtttgtgtttatggtcgggttttttgcgtttagttgtttcggatcgagttcgggtgtatggggtcgtaggaatcggtttcggggtttcgataacgggtcgtttttatagtatttcgggttggcgtgaggtaagtgtagtttttttttaggaatgagaattagtgttcgttttttttatagttttttacgcgttcgtttcgcgagttggttatggaagggtcgtttaagggcgggaagtggggtttttgtggttatgggaaagtataattttagggattgaggtgtaggattttcgatgtaaggtatgtgttatgtgtgatttttgtgcggggcgcgattgttttaaaggaaaaagcgttttttattgtagggttttacgtggttggaggggttggtattgagttattgtgttatttttggggtcggttttaaggaagattgggagcgggggatgggatgttggtggtgttttttgcgttttttttttgggagtttttttgttgttgtaggtttatattattttaattttgtaagcgatttttggtgataggagtttgtgattgtagg

SEQ ID NO: 364 - DNA, 5546 bp, Artificial Sequence
  chemically treated genomic DNA (Homo sapiens)
tttataattatagatttttattattaaaagtcgtttatagagttaggatggtatgagtttgtagtaataaagggatttttaaaaaaaaagcgtaaagaatattattagtattttatttttcgtttttagttttttttggggtcggttttagagataatataatgatttaatattaatttttttagttacgtgaggttttgtaatagaaaacgtttttttttttgggataatcgcgtttcgtataaagattatatatgatatatgttttgtatcgaagattttatattttagtttttaaaattatatttttttatgattataaaggttttatttttcgtttttgagcgatttttttataattagttcgcgaaacgaacgcgtggaaagttgtgaggggggcgggtattggtttttatttttgggaagggattgtatttattttacgttagttcggggtgttgtgggggcggttcgttatcggggtttcggagtcggtttttacggttttatatattcgagttcggttcggagtagttggacgtagagggttcgattatagatataggtcgtaagttagagaggtttttttatttttatttttattatgtgattagttgttaaagaggcgcgcggaaattgggagggcggggcgaacgtcggacgttttgggtacgtgatcgttatttatgcgttgaggggcggataggaggtgtttcgattgggaggagggcgaagagtgtaagggggcggaggggcgatggtagttacgtgatttgttgttattatacgtgatcgtttgatattgttttgaggagtagaggtgtggttacgcggcgggtacgtgattggttgttataattttcgttgtagggggggagcggtgagggggataagagagggtggagttcgaggcggtgttatggtaatttaggttatttagagtttaattttcggttgaaggattgttttattatcggtttgaaggttgaattttagttttattatcggttttttagtttgtttgtattggggagggggtgggagttggggtattagaggtgatgttgttattttttcgttttattatgagaaaatatatttttatttgtgttattgttttatttattaattttataatattttattgagtgtttgtttttagtgtgtatgtgggtttttattttgtttttggtgtttgttattggttttttaaagtagtggtacgattatttataaagatgtagttaataatggggttttttataatagggagtaaataatgtttatttgagggtaaaattacgattaaaggatgacggaaggtagattaatatagtaatttaataggtttagtgataaggtaatttttttatttttttaatttttaaatttttttgggagtgttaatgtaaagatttgaggttatttggtagagaagttattgatgagtaggagataggaatatttgattttttaagttttttttttttttttagtaggaaggttttatgattatgtgatatttgtatgtgtgtatatatgtttttatgtatatatgtatgtatatgatattatttattatattatatataagacggatataggattgtatatgtgtaagaaagttattattatattttttgtattttttagattattataatgaatgaaaatgatatgtttttttttgtaaattttgtgattatttatttggagttattgtgtttttttttttttttttagtgtcgtttttttagtatttagtattgtttagaatatatttgtttttaaatggtttttgtttagatatttaggtagatataagtagattttttttattttgttttattggttttaaggtttttattttttagttttttgggggtatgggagtaaaggaggaaagcggttagtgttttatttgtgagaatttgtttaaaatttaaagttattttattattttatttgttattttttttattttaatttttgttttttttaattatttggttgagaatataagagtttaaattagaagatgaatataaattatgatttagagtaaaatagaatatatattaatatagatgttttttttttttattttgatatttgtagttttgggttttttttggtaagggtagttggaatattagtaagaaaaattttaaggattgaattgattaaggggtttaagaggtgaatgttttattggttattttgttaggggtgggtgttttgtaagttttttggaaggttaagataattgtttgtgagttttttaaattttttttttatattagtattttttattttagttttattttttatataagatttttatagtttattgtttttgtaatagaagacgttttttttgtttgtttgggttttagtttttttttttgatttatttattagtttatttaaaatatttgaatattttatgggaatattattgtttttttattattttttattgaggaattttaatttggtagtttgttttaggttttgttttttttttttttttgttaattatttttttattaattaaatttttttttagtatgtttgatttaatgagtttttttggaatttttttttttttagttttgtaaaggggaggagagggagaatgtaagtgtaagaaagaaaaaaatgtgatgggggtagaatttggttttagagggaagtttttataaaaggaaaggggtaagtgtgtgtattgtttattttagtgtagtggaggtgagggtaggagagtattaggaaagatatttttatttttttagtacgtttattttttttgtttttttttttattttttttatatattataattataggtttttgttttttagataattcgattttattttttatatatttttttttttagtgatgaagtttttcgatttattttttatatattttttttttttagtttttatcgattatattttttagtttttgggtaaaggtatattgttgagttttatttttgtttatgtattttttttatattttcgatatttgtatagttttttttttgtatatttttattttgtataagttttattttttttggtatatttgcgttatttaattatttattttttatgtttattcgtttattttttatttttagatatatatttagttaatttgtgtgtatattttttttttttggttatttttttttttttatttttttcgggattttatatttgttttcgtttttggggatatttgttcgtgcggggtattcgcggggatgcgtagtcgcggttttttttttttttttttttttcgtttcgtttttttttttattttttattcgtttttcggcgttcgtttcgttcgttcgttatttcgggggggttttcgtcgtcgtcgtcgtcggaaggagtcgatatttgttatcgtcgagcgtacgggtcgagttaagtttgatttcggagtcggagggggattgggatcgagagaacggcgatggggggcggtttcgtcgtaggaggattcgggcgcgtaatttcgggggttcggttcgttttagatttagattcgcggggtgcggtattttgagttttttttttcgttttttgttttggttatggtcgtttatttcgtcgttttcgggtcgttagttcgttcggtttcgtaagtatcggagtttcggcggtggtagtagtgaacggttgtcgtaggtttcgaagatttcggttcggttcggttttttagcgcgcgtttttttttcggttttgttttttttttttttttcgtcgttagcgagttttttttgtacgttgtttttcgttttcggtgttcggacgatgtttaagtttcggtttcgtatgtttttgaacgagttgaagttgttggtgttgataggcggggggcggtttcgggtcgagtcgtaatttcgggggggtcggggaggcggttgcggttgggcgtttttcgttggttgttttattcgggacggcgacggcgacgaggaggagtattacgggtcggagtcgcgggttcggggtttggtcggcgataaggagtcgcgggtcggatttttgtcgtcgttcgcgtcgtcgttgtcgttttcgggcgcgttggacgttttgtcgtttagtagtagtttggatagcggatttcgaattttttagtgtcggatttgtttttagggttcggagtaggttaggtttgggtatttggtcgggcgcggagggtggaggcgcgtatttggggtgttagcggagatcgcgagtaggcgcggcgtttaaggaggttgggcgggttttaggatacggagtgggaatggggtgaggtcgaggggttggtaggggatttttggagcgtttgtttgtgtcggagggttaagggtttttaggaaggggtggggtttttttttcggagagcgtaaaattttttttatttattaatagggattgttgtttttttttatttttttcgttttagggttttcgtaagttaaggggatttgtttttttgtaggtgggtagaaaggagagtgtttttgtgttttttttgaagggaggggtttagttagcgtttttgtttagtttagtattttttttcgtggggtatttttttttattttttattttgtaattttttattttattttaaagagtattttttgttaaaattttatgggtaaagttgttttagaatagtgttagggggtgtttttgtgtagtgagaattgattttatgattaaagggaaatattttttatttttattttcgcgattttttttttttttagtacgtggaaatcgaggattataatttattttagtttgcgttagatttgtgaagtaattttataatgatggggtgggggaaggaaagtatggtttagaagttttaatatttttttttttttagattttaagaggaagttttttttttgagaagttttaaagattatttattttaaattttaggaaaagagaagatttagttttttttttttttaatttttttatttttttttattttttatttttttggtatgggaagttttttttgatttttaagggaagttttttttttgttgtagttttatttagttttttgttttgttttgggtgaaaggtttgagttatttaaggtgggaaagtgatttgaagaggaggtttttttgtcggggagcgcggttgagtggggtcggggtggtgatggttgatagggtttttttttattttttttttagggggagtttttaagtttttgtcgttgcgacggtttagtgcgttgtacgtattagttttgttttattcgttggattagcgagaggggtttttggagttgtgagttttgttattttaagtattaggttttggcgattagtattaagaatttattgtaggtgaggtgtaaggagaggattcggagattgggcgaggattttttagttattggatttagggattttttaggaagtttattttatttattttttttttaaagttattttttttcgttagttattatagtttttcgtgtgtttgtatatttttttt

SEQ ID NO: 365 - DNA, 10369 bp, Artificial Sequence
  chemically treated genomic DNA (Homo sapiens)
attaaaatataaatattgggtggggcgagttatcgtttgacgtttggtcgtgagatgtttcgggagtcggggttttttcgttgtagatatgacgaagggttttgttttaggaatttattttaaagaaaaagaagatgatgtgttatagtttataagtgtaggagagaattttgataaattgatagttggaaagttgagagagattttgaatatatttggattatttttgaaggtaggtaagattcgaaatttttatggtttgtattaggatttttttagcgtggtgttagttggtttcggtaaaaaggtagttagaatcgacgaataggaaaattggtaggaaggtaaagaaaatattagagttgttgttgtagtaggatgtaggtagatttaagatttggagttttttttcgtggaggtggatttttgtagagatgtttaggttgttgaggagggcgcggtgtttggtttttatgaatacgatgatttaaagtaaaaaaagaagatggttatgtcggtgaagttttatggaattggggattaggaggtttggtagaaaggagttttgtttgtttttgggtagaatttggtatgatggagacgttagttagcgagatgatgttaattagatttgtcgaaattattgagaagaattttaaaagcgttagtagtaaatcgagttttatattagatttaggttttggattgaggaataggtaatgggattattttttagtgtggttaaaggatttgacgagtttttagtttttttggaaatttattatataggtagttttaatgtagataaattattttttgtttgttgggaaaggaattatttttgatagtggtggtatttttattaaggtttttgtaaatatggattttatgagggtcgatatgggaggagttataattatatgtttagttattgtgtttgttgtaaattttagtttgtttattaatattataggtttggtttttttgtgaaaatatgtttagcggtaaggttaataagttgggggatgttgttagagttaggaataggaagattatttaggttggtaatattgatgttgaggggaggtttatattggttgatgcgttttgttacgtgtatatatttaattcgaaggttatttttaatgttattattttaataggtgttatagatgtagttttggggttaggtgttattggggtttttattaatttattttggttttggaataagtttttcgaggttagtattgaaataggggatcgtgtttggaggatgtttttttttaaatattgtataagataggttgtagattgttagttggttgatgttaataatattggaaaatatagatttgcgggagtatgtatatttgcggtatttttgaaagaattcgtgatttattttaagtgggtatatttagatatagtaggtgtgatgattaataaagatgaggttttttatttatggaaaggtatgatcgggaggtttataaggatttttatagagtttttatttcgttttagttaagataatgtttagtttagatatttaaaaatgtttttattttattttaaattggatagttgaagttaaaaggtttttgaatgaatggatgaaaatattttaaaggaggtaatttatatttaaaaatgtagaatataatgaaatttttatgttttgattttttttttattttatataaagatttatatattttttttttgagacggagttttattttgttatttaggttggagtgtaggtggtatgattttagtttattgtaattttcgttttttaggtttaagcgatttttttattttagttatttgaatatttgggattataggtgtttattattatgttcggttgatttttgtatttttaatggagacggggttttattatattggttaggttggttttaaaatttttgattttgtgatttgttcgtttcggttttttaaagtgttgggattataggcgtaagttattacgttcggttagtatatatttttaattgagaagtaaaattgtattttagatttgtgatgttaggaatatgagtaaattgaaaattattaattatttgttagaaataataaatttaattttttgtgtaaaaaaaaaaatataaatattagttgggtatggtggtgtatgtttgtaattttagttattcgggaggttgaggtagaattgtttgaatttgggaggcggagattgtagtgagttgagattgtgttattgttgattttgttttaaaaaataaaataaaataaaaaaataaaatgaaaataaaaagttagggttgtttttgtttaataatgttttatttttgtttcgttttttttttggggttttattttttgggagtttgtgtgaaggtgaatttttttgaaagttgattgtttttatttgggattttttagtttttttttgagaaatggtgatattgtttttagtattttttttttttttttaggtagtttttgtagttattattgagttttttttatattttttttttttaggtttgggttttttattttttattatttttttattttatgttgttttatcgtattttggggagggggttggattgggtatttttgttttttaggttgagtttttttttatttttatgttgtttgttttttaggaatatgtttgggtagtaggttgtggttttgattggttttttggtcgttaggaatatgttttaatatgttgagttttggtatagaagaggttggtggttattttgtttttgggttgtttgtttttaggtgaggaaggggatggtaggagataggagatttttaaagattttaggtaaattttagtttgttattttgaatagggtatgtgatttgttagtagatttttgcgatagggttgggatttgatgtatgtgtgtttgtgtgagtgtgtgttgggagttagattttgtgtgtgatttttaatagtttgtttttttgttttttttagggtagaagtttttttttagagtgtgtttgggtatatatttaagtgtatggttgtaaatttttttttttaaagtattgaatagtattagatatttagtaggtatttaagaaatattgaatgtcgtggtggtggtgagttagaagttataaaaaaaatttttttttaaaaataataataaaaagaattattttattgtgaagtttagtattataaaaatttaaataatttattataagtttttattaaaaaaaattttttttttaaagtaaatagatagataatgtttagtttatttgaaatgtttgaaagtagaggggttttaaggtagtgggagaaggtgtttgttttttgttggatatttgataattagttttttggatggtttggatgtataggagcgaaggtgtagatagtagtggggtttagagtggggttttgaggttgtgtcgtggtttttttggggtttagttataattttggtttgattttagggcgaggtaggttaagggggtttgttattgtgtttttttatttttatttgggtttttatttttatagtagaggagaaagaagtttgtttttttcgaggttagttgcgttagaggaagaagattgggtatgtttgggtagagatttttagattttgagtagtttgagatgttagtaattgtagttgttttaagtttgggttttgttttttagtgggatttttgtttagatgaataatttattttttgtaattttttaaaagtaaaattgtaaatgttttaggtatagaaaggaggtaaaggtgaagtttaggggaggttaggggtgtgaggtagatgggagcggatagatatattatttatttttgtgtttgttagaagaattagtagatatttttagaattgttttttatttatgttatttttataaattatttgtaaatgagggttatttggtatttttgttattttggagttatagaaataaaggatgataagtagagagtttcgggtaggaggtaaaagttttgtgttttaattatagttatttttttgttgtatgatttgagttaggttattagatttttttgagttttagtttttttagtagtgtatacgggttatgtggggagtatttaggagatagataatttattcgttaaatttttttttttttggttaataaagttgttgtaattatagggattttttttgtttaggtgagtgtagggtgtagggagattggtttaatgtttaatttttttgtttttttggagattaggttgtttttttttggtagtttttttaattttttttttttcggaagtatgtgataattaataattttgtatatttaagtttagtggattttaatttttttatttgtgaaataaacgggattgaaaaattattttggttttaagatgttttgttggggtgtttaggtgttttaggtgtttttgggagaggtgatttagtgagggattagtgggaatagaggtgatattgtggggtttttttggaaattgtagagaggtgtatcgtttttataatttatgaatttttatgtattaatgttatttttttgatttttttagttgtattgggtaaatttttgtttgttagagtgggttagcggtgagttagaaagggggtttattttaatagtgttgtgtttttttggagagtgttaatttattttttaagtaaaaaaagttagatttgtggtttatttcgtggggaaatgtgtttagcgtattaacgtaggcgagggattgggggaggagggaagtgtttttttgtagtacgcgaggtttcgggatcggttggtttgttggaattcggttaggtttagttggttcggcgttgggtagttaggagtttgggtttcggggagggcggtttcgggcggcgcggtgggtcgagcgcgggtttcgtttttttgaggcgggttcgggcggggcggttgtatattagggtcgcgttgagttgcgttagttgaggtgtgagtagttgtcgaagttagttttttgtggagtcggagttgggcgcggattcgtcgaggtatcgaggtatttagaggaggtgagagagcggcggtagataataggggatttcgggtcggcggtttagagtcgagttaagcgtgttcgcgtgtgtttttgcgtgttcgcgaggatgcgtgttcgcgggtgtgtgttgcgtttataggtgtttttgcggtaggtgaatgacgggcgtgggtcggtgcgcgttcggtttgcgtatacggtgtttttaagtgcgcgggtgacgagagtcgggatgtgtcggagatttcggggcggagagcgggattataagtataggaatttttggttacgtttttcgtttttggaaatttagttggggcgagggagggcgtggacgggatcgttttgggagttcgtttttggttgcggttggttttaggttttaggcgtagtttgttcgcggcgtggggatgaagttcgtgtttttggaggggtttaggaagggcgaggaaagcggagtggagtaagttcgtttaggatcggtttcgggtggttttgggatttaatttgcgtcgttttggtttaggttttaggtttaggttttttacgttattgtgtttattatttggttgagcgttgaggttagcgcgggttgttttttggtttttgggaatgtgttaggattcgttttttaaggattagcgaggaggtgatttattgtgataaggagattttagggaacggattgtatgaggttagaatttcgttcgggatggggtatagcgggattttagaagtttttttttttgttttttcgcggttttcgtttttttatcggtatagtgatttatttggttggaatagtttgtttttaaggaagtcgggtattggaggttcgggatatcgcgtcgggttttcgtttcgcggcgcgttgtaggggtcggggagttacggttttgttttgggcgggttttaattagtttgttagtcggggaagggtaagggttttttttattttttttttatcgcggtcgggagaatcgcggtttagtttgttttcgggtcggggcgttggatttcggggcgggagcggagtttacgtttggatgggaggcggggagggtttatgtttttgaggggtggggggtttggggggtacgacgttgtttagggtttttattagttgtttcgggggtttagggtttttcgatttagtttagatttttttttcgaaagttatagggttgagcggagtaggggggcgagtcgttttttggggcgtcgtcgtttggcgcggattatagcgcgtttttttcgttttaaatttttgggggatatttgcgtttttttcgtgaggaaaagtattttggagttgggttaggaatttggggcgtttaggtagttttttttttttttgtttttttttacgtcgcgtttttgggaggatttgcgagcggttttgttttcgttgttttcgtttatttttattttttagggatttgatttatttcgtgttttgggcgtggagataaggtggaggggtcggttttcggcgcgcgcgcgcgtgcgtgtttgcgcgggcgtgtgtgtgtgtgtgtgtgtgtgtgtgtgtgtgtgtgtttgtgttagagacggtataagagcgcgcggttttttaatagcggcgggagtttcggaagtttggtcggtttagcgtgacgtgttcgcggtttttcggtttttttttattttttttttttttattttagggtgacgcgtagtcggagtggaagtagttttggcgggcgagtagcgttttgtaggaaattgatttattattattttttttagcggttcgaggttttgtttacgtattttttatttcgcgcgtgattttttggaggtcggcgttttttttcggttttggcgggaatagtatataggttttttcgcggagtggggttggtcggcgcgaatcgtcgcggttatttttgggtttattcgagattaatttttatgttattattatttttttaaaggagtattttttaggtttaatagtatttattgagtttttattggaaattaaaatatggttgaagtttaaggtaggaaggttaataaaggaggttatttttaattgtttttaaaataagggtttgcgtttttgagttttttttgggttgaaagttattatgagtatgagagtagattttgatgggggaggagaggtttatgagagttataagagaaggaggggtggtagaagaggagagggtgtttgtttagattttagttttgttttgaattttcgagagttagggaatatttagtattttgatgaagttttaggcgggcgttttttttttgtgtttatgatgtattgagatttagaatgtttattttaaatatattagtgtgttttcgtttggttggtaatttaagagtgtttatttgaggaattgtgttaaatatttgtttgaatttttaatttggattaagttggtttcgggaggtagggttttagtaatttatattttgaaaaaattttttaggtgtttttttttttttttttttttttttttttttttttttttttttttttttttttttttttttttttttttttttttttttttttttttttttttttttttttttttttttttttttttttttttttttttttttttttttttttttttttttttttttttttttttttttttttttttttttttttttttttttttcgatagagttgtattttgttatttaggttggagtgtaatggtattattttggatttaagtagtttttttgttttagttttttaagtaatcgggattataggcgtgattttttcgtttttatgtttagatttttttttttttttttttttttttgagatgcggtttcgttttgttatttaggttggagtgtagtggcgtgatttcggtttattgtaagtttcgtttttcgggtttacgttatttttttgttttagtttttcgagtagttgggattataggtgttgttattatgttcggttaatttttttttgtatttttagtagagacggggttttatcgtgttagttaggatggttttaattttttgatttcgtgtttcgtttttttcggttttttaaagtgttgggattataggtgtgagatattgtatttaattatttagttaatttttatttatttttatttttagtagagatagggttttagttagttgtttaggttagttttggatttttgggtttaaatgatttttttatttttgttttttagagtattaggattataggtataagttattgtttttggtttttttaagtgattgtgatgggtttttttggttaagaaattttaaaattagagagggagtggggtttaatattatagtataggatttagggtaaataggtttgggtttagattttggttgtgttatttatgaattgtgtgatgttaggtaagttatttaatttatttgagttttggttgttttttttgtaaaaagggagttaatagatatttattttttaggaggattgatatttttaaattgtttagaatagtttttaaatataaaaatatataaataaattttaatttatgtttagtagagggtggatagaggttatttgagggttttgtttattgtattgggtgatttttttatggggtagtggtttttggtttttttagttgtatgatttaggggtaagttttatattttttttattttttgttttttaaatttggtgtgaagttattaagagtttttttttttaattagttgggacgtgaaattgtgggttttattgattataagtagtggggtgaggtggggtggagtagatgtggtatgtgtttcgggttttttgttttatgaggatttagtagagtttttatttttagaaattgtaagttgggatttgtttttaggaaaatttagttgttgttaaggtcgtgtagttatttagttttggagttaagttagagtaggtaggtaggtgttagggtttttttatgggtaaatttatttttcgtttttttttttttgaagggggaggagaggagttaggtagattagttatttttaattttttttttgtttgtaaaacggtttttttggatataggtaatacgaggtaggggttgttaggtgtttagattttagattatttgatgtgtttggtaggatgtggtttagtttgggagaaattattttttgcgttgtttcgttcggtttttttttatttttaggttattcgtttgacgatatttttgggaaaggtttttagtttatagtatttgttagttgttgtttgaaggaggtagttggtagggggaagtgataggggggaggtttagtaaaattgaaggtagagaggaataattatatttttgtttttaatgtatttttttatacgaagtgttgttggtacgttatttatattaatttagttaatttttatgtttattttttgagatagttattattattatttttattttatagatgaggaaattagagtttagataagttaagttgtttgtttagggttatttagtaaaatttggattttagtttaggtgatttggttttagagtttttttgtttaattattaggatatagttttttatttagttttgttttgtttgttttgttgtatggattttgtgattaattttttgagtatgtgtttgtagttatgttttttaaatttgtatatggttttatttatggatgaggaaattgagatttagagatattaagtggttttttaaagtttacgtagtaattggtagagttaggattataattcgggtgttttttgttttaaagtttcgggtatttttatttggtagagtagggttattttatttggggatttgggtcgggggatttaggaggttggaggaattgttagattgtttttttttttgggaattgattttttggttagggttgcgattaggaaattgttggattttggtaatttatatatatttggggggtatttatatttatgagggatatttttggggggaaaataaattgattttagttgataatatttggtggtaaataggattttggtttttgtttttgtaatagatttgtttttgttgatattagtttgttttttagttgtttgtttttttagtgattttggtgtgttaggttggttgagttttgttggtgggggttaggttttttgtgggaaggaagtaggaagattagttggaaggagtgagagagattttttggtaggaagacgttatttgaggtgatatagtaaagttcggttaggtaatatagtgtttaattttcgtcgtgattagggttttttttgtatttttgttgtagg

SEQ ID NO: 366 - DNA, 10369 bp, Artificial Sequence
  chemically treated genomic DNA (Homo sapiens)
tttgtagtagagatataaggaaggttttggttacggcggagattagatattatgttatttggtcgggttttgttgtgttattttaggtgacgtttttttattagagggttttttttattttttttagttggtttttttgttttttttttataggaggtttgatttttattagtagagtttagttagtttggtatattaaggttattgggagagtaggtaattgaagggtaagttaatgttaataaaggtaagtttattgtaagagtaaggattagggttttgtttgttattaggtattattagttaaaattaatttgttttttttttagaggtgttttttatgggtgtgaatgttttttaaatatgtgtgaattgttagagtttagtagttttttaatcgtagttttggttagaaggttaatttttaaaagaagaaatagtttgatagtttttttagttttttaagtttttcgatttagatttttaagtagggtaattttgttttgttaagtaaaagtattcgggattttggggtaaaaagtattcgggttgtggttttagttttgttagttattacgtaagttttaaaaagttatttaatgtttttaggttttagtttttttatttataaatggggttatgtataagtttaaagagtatggttatagatatatatttaagaaattgattatagagtttatgtagtaaggtagatagaatagagttgaatgaaaggttgtattttggtggttaagtaggagggttttggagttagattatttgggttggagtttaggttttattaggtgattttgggtaagtaatttaatttgtttgagttttagtttttttatttataaaatggggatagtaatagtgattgttttagaggatagatatgagaattaattgagttaatgtaggtaacgtgttagtagtatttcgtatagagaagtgtattgaaaatagaagtatgattatttttttttgtttttagttttattgagttttttttttattatttttttttgttaattattttttttagatagtagttgataggtgttgtaggttgagggttttttttaaggatgtcgttaggcgggtggtttaggggtaaggaggggtcgggcggggtagcgtaagggatgattttttttaggttgagttatattttgttaggtatattaggtgatttgaagtttagatatttggtagtttttgtttcgtgttgtttgtgtttaaggaaatcgttttgtaggtaaaaagaaaattaaaggtggttggtttatttggttttttttttttttttttaggagagggaaaacggagagtgagtttgtttatgagggagttttggtatttatttgtttgttttggtttgattttagggttgagtgattgtacgattttggtagtaattggatttttttagggataagttttaatttgtagtttttgggggtgaaagttttgttgagtttttatgaggtaggaagttcgggatatatgttatatttgttttattttattttattttattgtttgtgattagtggagtttatagttttacgttttagttggttgggagaggaggtttttggtaattttatattaagtttaaagggtaggagatggaagagatatgagatttgtttttgagttatatagttaaaaaggttaaaggttattgttttataaaggggttatttagtatagtggatagagtttttaaataatttttatttattttttgttaggtatgagttgggatttatttatatatttttatgtttgggggttgttttaagtagtttaaaaatattaatttttttaaaaagtggatatttattagttttttttttatagaagaggtaattaaggtttagataagttaagtaatttgtttaatattatatagtttataagtggtatagttaggatttgaatttaggtttgtttgttttgagttttgtgttgtagtattgaattttattttttttttaattttgaggttttttaattagagaggtttattataattatttggggaggttaggggtagtggtttatgtttgtaattttaatattttgggaggtagaggtgggagaattatttgagtttaagggtttaagattagtttgggtaattagttgagattttgtttttattaaaaataaaaataaataaaaattagttgggtggttgggtgtagtgttttatatttgtaattttagtattttgggaggtcgaggagggcggagtacgaggttaggagattgagattattttggttaatacggtgaaatttcgtttttattaaaaatataaaaaaaaattagtcgggtatgatggtagtatttgtagttttagttattcgggaggttgaggtaggagaatggcgtgaattcgggaggcggagtttgtagtgagtcgagattacgttattgtattttagtttgggtgatagagcgagatcgtattttaaaaaaaaaaaaaaaaaaaaaaaaatttgggtatgggggcggggggattacgtttgtggtttcggttatttgggaggttgaaataggaggattatttgagtttaggatggtgttattgtattttagtttgggtgatagagtgtaattttgtcgaaagaaaagaaagaaagagagaaagagaaagaaagagagaaagagaaaggaagaaagaaagaaagaaagaaagaaagaaagaaagaaagaaagaaaagaaagaaaaagaaagaaagaaagaaaaagaaagaaagaaagaaagaaagaaagaaagaaagaaagaaagaaagaaagaaaaaaagaaagaaagaaaagtatttagggagtttttttaaaatatagattgttgaggttttgtttttcgagattaatttaatttagattgaagatttaagtaagtgtttggtataattttttagatgggtatttttgggttgttagttaagcggagatatattggtatgtttgaaatggatattttgggttttaatatattataggtataaggaggaggcgttcgtttagggttttattaaggtgttggatattttttggttttcgggagtttaagataggattaggatttaggtaggtattttttttttttttattattttttttttttttatggtttttataggtttttttttttttattaaaatttgtttttatgtttataataatttttagtttaaagaaaatttagaaacgtaaatttttgttttagaaataattaaaaatagttttttttattggtttttttgttttagattttagttatattttaatttttagtaagagtttagtgaatattgttgaatttaaggagtgtttttttgaaggggtggtaatggtataggggttgatttcggatgagtttaggagtagtcgcggcggttcgcgtcggttagttttatttcgcgggaaagtttgtgtgttattttcgttagggtcgggagggggcgtcggtttttaggaaattacgcgcggagtgggaggtgcgtgggtagagtttcggatcgttggagggagtagtgatgagttagttttttgtaaggcgttgttcgttcgttaaaattgtttttatttcggttgcgcgttattttggggtggggagggggagaatgggaggggatcggggggtcgcgaatacgttacgttgagtcggttaggttttcgaaattttcgtcgttgttgggaaatcgcgcgtttttgtgtcgtttttgatatagatatatatatatatatatatatatatatatatatatacgttcgcgtagatacgtacgcgcgcgcgcgtcgggagtcggtttttttattttatttttacgtttaaagtacgggatgagttagatttttggaaaataaaaatagacgggagtaacgaaaataaaatcgttcgtaagtttttttagaaacgcgacgtggagggaggtaaggagaggggaagttgtttgggcgttttaagtttttaatttagttttaagatgtttttttttacgaagagggcgtaagtgttttttaggggtttgggacggagaggacgcgttgtggttcgcgttaggcggcggcgttttagggggcgattcgtttttttgtttcgtttagttttgtagttttcggagagggaatttgggttaggtcgggaagttttgagttttcgaggtagttgatagaggttttgagtagcgtcgtgttttttagattttttattttttaaagatatgaatttttttcgttttttatttaggcgtgggtttcgttttcgtttcggagtttagcgtttcgattcgaggataggttgggtcgcgattttttcggtcgcggtgggaaagaggtagaggagatttttgttttttttcgattgataggttggttagagttcgtttagagtagggtcgtgatttttcgatttttatagcgcgtcgcggagcggggattcgacgcggtgtttcggatttttagtgttcggtttttttgggaataaattgttttagttaaataggttattgtgtcgatgggaggacggagatcgcgaaggggtaggggagagggtttttggagtttcgttgtattttatttcgggcggggttttgattttatatagttcgttttttggggtttttttgttatagtgagttattttttcgttagtttttaggggacgggttttggtatatttttaagggttaggaaatagttcgcgttgattttagcgtttagttaggtggtggatatagtggcgtaaaggatttgaatttgggatttgggttagggcggcgtagattggattttagagttattcgggatcgattttagacgaatttattttatttcgtttttttcgttttttttgggtttttttagggatacggattttatttttacgtcgcgagtaaattgcgtttggggtttggagttaatcgtagttaaaggcgagtttttagaacggtttcgtttacgttttttttcgttttagttgggtttttaggggcggggagcgtgattagggatttttgtatttgtaatttcgtttttcgtttcggggttttcggtatatttcgattttcgttattcgcgtatttagagatatcgtgtgcgtaagtcgagcgcgtatcgatttacgttcgttatttatttgtcgtagaaatatttgtgaacgtagtatatattcgcgaatacgtattttcgcggatacgtagggatatacgcgggtacgtttggttcggttttgggtcgtcggttcggggttttttgttgtttgtcgtcgtttttttattttttttgagtgtttcggtgtttcggcgaattcgcgtttagtttcggttttataaggaattgatttcggtagttgtttatattttagttggcgtagtttagcgcggttttgatatataatcgtttcgttcgggttcgttttaaggaggcgggattcgcgttcggtttatcgcgtcgttcgggatcgtttttttcggggtttaggtttttggttgtttagcgtcgagttagttgagtttggtcgagttttagtaggttagtcggtttcggaatttcgcgtgttgtaggagggtatttttttttttttttagtttttcgtttgcgttggtgcgttggatatatttttttacgaagtgagttataaatttggttttttttatttggagaatgagttggtattttttaggaggatatagtattgttagaatgagttttttttttggtttatcgttgatttattttggtaggtaaggatttatttaatgtagttgaaaagattaggaggatgatattaatatataaaaatttataaattataaaaacgatgtatttttttgtaatttttagaaaagttttataatattatttttatttttattgattttttattaggttattttttttagaagtatttggagtatttagatattttaataaagtattttgaggttagaatgattttttagtttcgtttattttatagatgaggaaattgaggtttattgaatttaagtatataaagttgttgattgttatatgttttcgggaaggagggaattggagagattattaaaaaagggtaatttgatttttagggaaatagaagaattggatattgaattaatttttttatattttatatttatttgaatagaagaaatttttgtggttgtagtagttttgttggttaggaaggggaggatttgacgagtgagttgtttgttttttgaatattttttatatagttcgtatatattgttggggaaattggggtttagagaagtttggtgatttaatttagattatgtagtaaagaaatgattatagttggaatataggatttttgttttttgttcggggttttttgtttgttattttttatttttgtggttttaaaatgataaaaatgttaaataatttttatttgtagatggtttatggagatgatataaataaaggataattttggaagtgtttattggtttttttgatagatatagaaatgagtgatgtgtttattcgtttttatttattttatatttttgattttttttggattttatttttgttttttttttgtgtttgaaatatttgtagttttgtttttaaaaaattgtagaggatggattgtttatttgaatagaaattttattaaaaaatagaatttaggtttggagtagttataattattgatattttaggttgtttagagtttggaaatttttgtttagatatgtttagttttttttttttaacgtagttgatttcggggaggataggttttttttttttttgttgtggggatgggagtttaggtaggggtgggaggatatagtagtagatttttttggtttgtttcgttttggagttaggttaggattgtggttaaattttagaaaggttacggtatagttttaggattttattttaagttttattgttgtttgtattttcgtttttatatatttaaattatttaaagggttggttgttaaatgtttagtagaggataggtatttttttttattgttttgaagtttttttgtttttaggtattttaaatagattagatattgtttgtttgtttattttggggagaaaattttttttaataaaggtttgtaatgaattatttaaatttttgtggtattgagttttataatgaaataattttttttgttgttgtttttgggaaagaattttttttataatttttagtttattattattacgatatttaatattttttaagtatttattaagtgtttagtattatttagtgttttaaaaaaaaaagtttgtaattatgtatttgaatgtgtatttagatatattttaagggaggatttttgttttgaaaaaggtaagggagtaggttgttaaaagttatatatagaatttgatttttagtatatatttatataagtatatatgtattagattttagttttgtcgtaaggatttgttggtagattatatattttgtttagagtaataggttaaggtttatttggggtttttagaggttttttgttttttattatttttttttttatttgaaaataggtagtttaaggataaaatagttattagttttttttatgttagagtttaatatgttgggatatgtttttgacggttagaaagttaattagagttatagtttgttgtttaagtatgtttttgggaagtaggtagtatagggatggagggaggtttagtttgggggataagagtgtttagtttagttttttttttagagtgcggtggagtagtatggggtaggggaatggtgaaaggtggaaagtttaagtttgaagaaggaggatgtgaggaaggtttagtggtggttgtagaagttgtttaggaagggagaggaagtgttgggaataatgttattattttttagaaagagattggggagttttaaataggggtagttagtttttagaggaatttatttttatataggtttttaagaagtgagattttagagaagaggcggaataaagatagaatattattgagtagaggtagttttggttttttgtttttattttgtttttttgttttgttttgttttttgagataaagttagtagtggtataattttagtttattgtagttttcgttttttaggtttaagtaattttgttttagtttttcgagtagttgggattataggtatgtattattatgtttagttaatatttgtatttttttttttgtataaaaagttggatttattgtttttgataagtggttagtaatttttagtttgtttatgtttttagtattataaatttgaagtataattttgttttttaattaaaaatatatattggtcgggcgtggtggtttacgtttgtaattttagtattttgggaggtcgaggcgggtagattatagggttaggagttttgagattagtttggttaatatggtgaaatttcgtttttattaaaaatataaaaattagtcgggtatggtggtgggtatttgtagttttaggtatttaggtggttgaggtgggagaatcgtttgaatttaggaggcggaggttgtagtgagttgagattatgttatttgtattttagtttgggtgatagagtgagatttcgttttaaaaaaaaaatatataaatttttgtgtaaaatgaaaaaaaaattaaggtataaaaattttattgtgttttatatttttaaatataaattgttttttttaaaatatttttatttatttatttaaaaattttttaattttaattgtttaatttaagatagagtgaagatatttttgagtatttgaattaagtattgttttgattgaaacgaagtaagaattttatgagagtttttgtgggtttttcggttatgtttttttatagatagggaattttatttttgttggttattatatttgttatgtttaaatgtgtttatttaggatgagttacgaatttttttaggaatgtcgtagatgtatatgttttcgtagatttatattttttaatgttgttaatattagttagttggtaatttataatttgttttgtataatgtttgaagagaggtattttttagatacggttttttgttttaatgttggtttcgaagagtttgttttagagttaggatgaattggtaaagattttagtggtatttgattttaaagttatatttatgatatttgttaaggtggtggtattgaggatgattttcgggttaaatgtgtgtacgtaatagagcgtattagttagtatgagtttttttttagtattagtgttattaatttggatggtttttttgtttttggttttaataatattttttagtttgttggttttgtcgttgggtatgtttttatagaggggttagatttataatattaatgggtaaattgagatttgtagtagatataatggttgagtatatagttgtagttttttttatgtcggtttttatgaggtttatatttgtagaagttttgatggagatattattattgttaaaggtaattttttttttaataaataaggggtggtttgtttgtattggggttgtttatgtagtgaatttttaagaagattgagggttcgttagattttttggttatattgaggaatgattttattgtttgttttttaatttaagatttgggtttgatatgaaattcggtttattattagcgtttttgagattttttttaataatttcggtaaatttggttggtattatttcgttggttggcgtttttattatgttaagttttgtttagaagtaaataggatttttttttgttaggttttttgatttttagttttatagagttttatcgatatagttattttttttttttgttttaggttatcgtatttatagagattaagtatcgcgttttttttagtagtttgagtatttttatagggatttatttttacggaagagagttttaggttttgaatttgtttgtattttgttgtaatagtagttttgatgttttttttgtttttttgttagtttttttgttcgtcgattttggttgtttttttgtcgaggttaattagtattacgttggggaagttttgatgtagattataaaagtttcgagttttgtttgtttttagaggtggtttagatatgtttaaagttttttttagttttttagttattaatttattaagatttttttttgtatttgtgaattgtggtatattattttttttttttttggaatagatttttaaaataaggtttttcgttatgtttgtagcggagagatttcggttttcgaaatattttacggttagacgttagacgatgattcgttttatttaatgtttgtattttagt

SEQ ID NO: 367 - DNA, 6510 bp, Artificial Sequence
  chemically treated genomic DNA (Homo sapiens)
ttttttaatagagatagggtttcgttatgttgtttaggttgatttttaatttttgggtttaagtagtttttttattttaattttttaaagtgttgggattataggtattatttattgtgtttagttagggatttgttttatgaaattgtagaaaggaaaaaaaagtaaaagtggaggtgggaaatagattgataagattggaaaaatgttaatgatggttgaaattggttggtgatgtattattttattgtttttgagtatgtttgtaaatttttataagaatgttttgtaaggaagtagtagtgatattgttatatattgttgagaaaatgtaaaattaaatataaagttaataaaaagagataaattatgtatatatagataatatatgtatatatatatatatgtgttgtgtgtatatatatatattatgtgtacgtgtgtatgtttataatatatagatatatatatgttatgtatacgtatataaaagaaggtagaaaggttgtgggtagatattttgattaagagtttttgtgatattattatagtggttttgtagtttttatttaggggtttttgttgatatgaatttatagtagtgtgttttttaattaggtttgtatttttttaatttgttagataggaagttatttttggtatttggttaggttaaatataagaagtgtttgatgatttttttttaattttgttaattattgaaaatttatgttagaggaaaaaaattgtttttattttgaatttatttatttattgagatagagttttgttttgttgtttaggttggaatgtagtggtgtgattacgatttattgtagatttgattttttaggtttaagtaatttttttattttagtttttaagtagttgggattataggtatacgttattacgtttagataatttttatattttttgtagtgatagggttttattgtattgtttaggttggttttaaatttttgagtttaagtgatttttatattttggttttttaaagtgttgggattataggttgttttgaatttaggtaataattgtttgtgggttttgaagtaaatttttttaaatatgttggttattaattaattattagggttgggttttgtaagaagggtgttggggtaaagatggttgtaaattttttgttatttaagtagaaaggatttttttgttatgaatttgggatggtgttagtagtttgtttgattaattaaatgaggtagatatgatgttgtatagttttcgaggttaggtttttagagttgtttttaggttttttggaatatttgtttttgaaatttagttgttatgttatgaggaagtttaagtaggtttgcgaagggagttataggtagtagtttttagggttttgttaggtatgggagtgggttatattggaagttgattttttaattttaattaaattattttagttgatattttataatatatagttaagttattttgttaattgttttttaatttttgatagaattataggtataaataaaattattgggtttttttgtttgtttttttgtttttttgaggtggagttttgttttgtcgtttaggttggagtgtagtggtgtaatttcggtttattgtaagtttcggttttttgggtttaggttatttttagttttagtttttcgagtagttgggattataggcgtttattattacgtttagttgattttttgtatttttttggtagagacggggttttattacgttagttaggatggttttaattttttgatttcgtaatttttttatttcggttttttaaagtgttaggattataggcgtgagttatcgtattcggttaaaattattgttttaaattataaagtgttgggatagttgtttatttggtaggagattatgagaataggtgtaattatgttaatagaagaggaggtatcggttgtttgtttatattcgattttatgttttagtgttgaatagtagagtagtggttgtgatttggggtagaagggaatggtgagtatatatagttgtttgatattggagtaggtaagttttgttaagaaagttttgtttttgagggtttttaagtaatagttaagattagagcgttttttttttggcgttattaggttattagaggttatttttattttttattttaaggggtttgtttatggagtagagtttggtgatataattaatattttagttgtttttgaaataattattttaaggtttaaataatataatttttaatttttagaataagtaattgcgattttttttttttttttgagacggagttttgtttcgtcgtttaggttggagtgtagtggtgttattttggtttattgtaatttttgtttttcgggtttaagcgatttttttgttttagttttttaagtagttgggattataggtacgtattattatgtttggttaattttttgtatttttattagagacggggttttatcgtgttagttaggatggttttgattttttgatttcgtgatttgattgttttagttttttaaagtgttgggagtataggaatgagttatttcgtttagttattttttttttttttttttttttttgagatagggtttcgtttatattgtcgtttaggttggagtatagtggtataattgattatggtttattgtaattttcgtttttcgagtttaagtgatttttttattttagttttttagggagttgggattataggtgtatatatattattaaagttggttaatttttaaaatttttttatagatggagttttgttatattgttttaagttggttttaaatttttgggtttaagtgatttttttattttagttttttaaagtgttttgattataggtatgagcgttcgtatttagttaggatttttttaggatgttagagtgtgggtagttagttttatttttgagattttgatttttttttaaattataattattttatttttttattaaagaaaaaaaagatgatttattagatagttgttaaggtatttatataaaattatacgatagtaggatagatggtaattaagagggaatttaggattcgttattattagttggaaatatttgatttttagtttgtaaatgtgataagttagattaatattagtaggatattgaatatagtttgtagggatgagtttttgcgttatttttggatatgtgtttaagtaattagaataatttaaaatgttattaggtttttgttgttatttttataaatttcgaatagtgagttgggtttttaaggaatttgtttttgttagtttattttatgttgtataataaataggtttaaagtttttggtagcgtatattaagtatggaggattttttatttattacgatagttttttcgttggagggttggggttgtattttatttttttttttggaaggggcggtttttgtttgaggttttatttgttttatagtagagggatgaaacggtaggattttggttttgacgggttttatttggtaatggtatatgttaagtgggttacgttttattgtttagagtaagttatatggttacgtttgatattgacgtgcgggaaatgtagaatttttttgtatttggggaggtagatatttggataatatgtaatttattatagggttagttggatgaagaacggttaagggtttaggttttttatttcgagttaggtcgaattagtcggggtcgtgagattaagttacggttattagtgttcgtttggaattatgttttgtttttgtcgtgtttatattgtagtagggtttttgttttttaatttatttgaaattggtggtgggtgtggtatatagatgagaaataggaattttttacgttgggttttaataggagttgcggtgggaatataaatggtgtagttattttggaagatagtttggtggttttttataaaattaaatgtattttttatatatgattcgttatatattatttagtaattgtattttttggtatttgtttagatgagttaaaaatttgtatttatataaaaatttgtacgtggatgttgatagtagttttatttataattgtttaaatttggaagtttttaggaggtgagtgggtaaataaattgtggtgttttcggttagcggaatattatttagtgttaaaaagaaatgagtttaagttatggaaagatatgaaagaattttaagtattattaagttaaagaagttaatttgaaaaggttgatgttgtatgagtttatatttatgatattatagaaaaggtaaaattataaagatagtaaaaggattagtggttgtaggagttagggaggagggagggatgaataggtggggtatagaggatttttagggtagtgaaattattttgtatgatattgtaatggtggatataggatagtaagtatttgttttttatttcgtagaatgtacggtattgagaacggatttttttgtaatatatggatttttagttataatattgaatttttttcggggtttcgtatcgttcgtagcgttttttaattttcgttttcgtttcgtttatcgttttttttttttgttatagcgcgttcgtttcgcggtcgttaattagtcgcgcgtttcggtcgcgcgtttcgtttcgttttcggtgggtgtgcgcgcggttaatgggcggtgcgcgggggtcgggtcgcggcggggcggggtagcggggcggtcgttaatcgtcgtggtgttgttgaaattgaaaatattatattatgttaatcgcggtcgggttcgcgcgtacgggggtggggttcgcgcgtataaagggggcgtaggcgggttgggcgttttataggttaagtgcgttgtgttcgaggggtgtcggttaggtttgagcgagcgagttagttagtaggtatcgagggggcgcggttgtcgttcggacgagataggcgaattcgacgtagaagagtttattatcggatagttaggtagtcgtcgcgtttttcgtatacgtagagtcgggcggcgcggggttttttttgcgttcggttttcgttttttttttttttttttttttttttttttcgttgtttttttttttttcgttgttcgcgtttgcgtagtttcgggttatgttcgacgcgttttttcgtagtatatttacgatggagcgttttgtcgttcgtgggatttttttagtattagtgcgtattagcgtttgtcgtagttttttcgggtcggtggattacgaggagttgagtcgcgagttgtaggttcgtttggtcgagttgaacgtcgaggattagaatcgttgggattacgatttttagtaggatatgtcgttgcggggttttggacgtttgtagtggatcgaagtggatagcgattcggtgttcgcgttttatcgcgagacggtgtaggtggggcgttgtcgtttgttgttggcgtcgcggttcgtcgcggtcgcggtggttgttagttcgtttttcgagtcggtcgttgagtttttcgacggtttcgaggaggcgtcggagtagttgtttagtgtttcggtttcggtttcggcgtttatttcgtttttagtttcggttttggttttagtttcggtttcggtttcggtttcggtcgcggtttcggtcgcggtttcggtcgcggtcgcggttttggtttcggtttcggtttcggtttcggtttcggtttcggtttcggttttagtcgcggtttcggttttagtttcggtttcggtttcggtttcggttttcgtttcggtttcggtttcggacgcggcgttttaagagagcgtcgagtagggcgcgaattaggggtagcgcggttaggagtttttcgttgattagttgtattcggggatttcgggacgtttcgcggtcggtatcgcggtcgttagcgttaacggcgcggcgattaagaagttgttcgggtttttgattttcggtgagtttcgtacggtttcgtttcggttcggttcggtttcgttttgttcggtcggtcggtttttttagttttcgggggtttcgttgggttttcgttttttttcgtggtattaaagggttcgtagcgtttagggcgcggttgcgtttttattttttttttcgtttcgttgttgtgttttttagcggtttcgcgcgggcggggtgggaggttgaatttcggtcgcgatttttcgggagcgtagttttcgttttcggtcgcgggagttttttttcgggcgcggtcgggcgtcgtgagtacggcgtggagggggttaagcgcggcggcggtttcggggggtttggtcgcgggataaggggaaatgtttatatagtatattgcgcggcgacgtaaataaagttgattcgtcgcggatttcggcgcgggcggggacggcgtttttatttcggtcggttcgcgtttcgcgttttttttcggttttttttcgggttttcgggtcggtttcgttttgatcggtcgcgcgcgttgtcgttcgtaga

SEQ ID NO: 368 - DNA, 6510 bp, Artificial Sequence
  chemically treated genomic DNA (Homo sapiens)
tttgcgggcgatagcgcgcgcggtcggttagggcggggtcggttcggagattcgagagggggtcgggagagggcgcggggcgcgggtcggtcggggtgggggcgtcgttttcgttcgcgtcgaggttcgcggcgggttagttttgtttacgtcgtcgcgtaatgtgttgtgtaagtatttttttttgtttcgcggttaagtttttcggggtcgtcgtcgcgtttaattttttttacgtcgtgtttacggcgttcggtcgcgttcggggaggggttttcgcggtcgggggcgaaaattgcgttttcggggggtcgcggtcgggatttagttttttatttcgttcgcgcgaagtcgttggagggtataataacggggcggggaggggggtaagggcgtagtcgcgttttgagcgttgcgggttttttaatgttacgggaggaggcgggaatttagcgaggttttcgagggttggggggatcggtcggtcggataaagcggggtcgggtcgggtcggggcggggtcgtgcggggtttatcggagattagaggttcggatagttttttgatcgtcgcgtcgttggcgttggcggtcgcggtgtcggtcgcgggacgtttcgaaattttcgagtgtagttggttagcgagaggtttttggtcgcgttgtttttggttcgcgttttgttcggcgtttttttgaggcgtcgcgttcggggtcggggtcggggcgggggtcggggtcggggtcggggtcggggttggggtcggggtcgcgattggagtcggggtcggagtcggagtcggagtcggggtcggggtcggggttaggatcgcgatcgcgatcggagtcgcgatcggagtcgcgatcggagtcggagtcggggtcggggttggagttaggatcgggattgggggcggggtggacgtcggggtcgggatcgggatattaggtagttgtttcggcgttttttcgaggtcgtcgagggatttagcggtcggttcgaggggcgggttgatagttatcgcgatcgcgacgggtcgcggcgttagtagtaggcggtagcgttttatttgtatcgtttcgcggtagaacgcgggtatcgagtcgttgtttatttcggtttattgtaggcgtttagggtttcgtagcggtatgttttgttggaagtcgtaattttagcggttttggttttcggcgtttagttcggttaggcgggtttgtagttcgcggtttagtttttcgtggtttatcggttcgaagaggttgcggtaggcgttggtgcgtattagtattgggaaggttttacgggcgataagacgttttatcgtggatgtgttgcggagggacgcgtcggatatggttcggggttgcgtaaacgcgggtagcgagagaggagaggatagcgagaagaaggggaaaggagaggaggagagggcggaggtcgggcgtaagggagatttcgcgtcgttcgattttgcgtgtgcgagggacgcggcggttatttggttgttcggtggtggatttttttgcgtcgggttcgtttgtttcgttcggacggtagtcgcgttttttcgatgtttgttggttagttcgttcgtttaggtttggtcggtatttttcgagtatagcgtatttggtttgtggaacgtttagttcgtttgcgttttttttatacgcgcgggttttattttcgtgcgcgcgggttcggtcgcgattagtataatgtagtatttttagttttaataatattacggcgattggcggtcgtttcgttgtttcgtttcgtcgcggttcggttttcgcgtatcgtttattggtcgcgcgtatatttatcgggggcggggcggggcgcgcggtcggggcgcgcggttgattggcggtcgcggggcgagcgcgttgtagtaggggaagggggcggtgagcggggcgggggcgggagttaaagggcgttgcgggcggtacggaatttcgaaagggatttaatattataattgaaagtttatatgttataggagggttcgtttttagtgtcgtatattttacgggataaaggataaatgtttattgttttgtgtttattattatagtattatataaggtagttttattgttttaaaaattttttgtgttttatttatttattttttttttttttttagtttttgtaattattgatttttttattgtttttgtagttttgttttttttataatgttatagatgtgaatttatatagtattagtttttttagattggtttttttgatttaataatatttaaggtttttttatgtttttttatgatttgagtttatttttttttagtattgaataatatttcgttgatcggaggtattatagtttgtttatttatttattttttgaaggtttttaggtttgggtaattatgaataaagttgttattaatatttacgtgtaagtttttgtgtggatgtaagtttttgatttatttgggtaaatattaaggggtataattgttggatggtgtgtggcggattatatgtgaagggtatatttagttttgtaaggagttattaaattattttttaaagtggttgtattatttgtgtttttatcgtagtttttgttaaagtttagcgtggagagtttttgttttttatttgtgtattatatttattattaattttagatgaattaaaaaatagaaattttattataatgtggatacggtaaggataaggtataattttaaacgaatattgatgatcgtggtttgattttacggtttcggttggttcggtttggttcggggtgaagagtttgggtttttggtcgttttttatttagttggttttgtaatgaattgtatgttgtttaaatatttgtttttttaaatgtaggaagattttgtatttttcgtacgttaatattagacgtggttatgtaatttgttttgggtagtgaaacgtgatttatttggtatgtattattgttaaatggagttcgttaaagttagggttttgtcgttttatttttttgttgtgagataaatgagattttagataggggtcgttttttttaaaagagaaaatggagtataattttagttttttagcgaagggattgtcgtggtgagtgagagattttttatgtttgatgtacgttgttaagagttttgggtttgtttgttatgtagtataaggtaagttgatagagataggttttttgaagatttaatttattgttcgaggtttatgggaatgatagtaagggtttggtggtattttgagttgttttggttatttggatatatgtttagaaatgacgtagagatttatttttgtaagttgtgtttagtgttttgttggtgttggtttagtttgttatatttgtaggttggaggttaggtgtttttagttggtagtgacgggttttgagtttttttttggttattatttattttgttatcgtgtagttttatgtgagtgttttaataattgtttagtaagttattttttttttttttgatgaaggaataaaatgattgtgatttggggaagggttaaagttttagagatggagttggttgtttatattttagtattttgaagaaattttggttgggtgcggacgtttatgtttgtaattaaagtattttgggaggttgaggtgggaggattatttgagtttaggagtttgagattagtttggggtaatatagtaagattttatttgtaaaaaaattttaaaaattagttagttttggtggtgtgtgtgtatttgtggttttagttttttgggggattgagatggaaggattatttgagttcgggaagcggagattgtagtgagttatgattagttgtgttattgtattttagtttgggcgatagtgtgagcgagattttgttttaaaaaaaaaaaaaaaaaaaaaaagtggttgggcgaggtggtttatttttgtatttttagtattttgggaggttgaggtagttagattacgaggttaggagattaagattattttggttaatacggtgaaatttcgtttttaataaaaatataaaaaattagttagatatggtggtacgtgtttgtaattttagttatttgggaggttaaggtaggagaatcgtttgaattcgagaggtagaggttgtagtgagttaagatggtattattgtattttagtttgggcgacggagtaagatttcgttttaaaaaaaaaaaaaaaatcgtaattgtttattttgaaaattaaaaattgtgttatttaagttttgaagtggttgttttaggggtagttgagatattgattatattattaagttttgttttatgggtaagttttttgggataaaaaatgaaaatggtttttgatgatttagtggcgttaggaagaaaacgttttgattttagttgttatttgaaagtttttaggggtaggatttttttggtagggtttgtttgttttagtgttagatagttgtgtgtatttattatttttttttgttttaaattatagttattattttgttgtttaatattgaggtataaagtcgggtgtggataggtagtcggtatttttttttttgttagtatgattatatttgtttttatgattttttgttaagtaaataattattttaatattttgtggtttaaaatagtggttttagtcgggtgcggtggtttacgtttgtaattttagtattttgggaggtcgaggtgggaggattacgaagttaggaaattgaaattattttgattaacgtggtgaaatttcgtttttattaaaaaaatataaaaaattagttgggcgtggtggtgggcgtttgtagttttagttattcgggaggttgaggttgagaatggtttgaatttaggaggtcggagtttgtagtgagtcgagattgtattattgtattttagtttgggcgatagagtaagattttattttaaaaaaataaaaaaataaataaaaaaatttagtggttttatttatatttatgattttattagaaattggggaatagttggtagaatagtttggttatgtgttatgggatgttagttagagtagtttgattggggttgaggaattaatttttaatatggtttatttttatgtttggtaaagttttgggagttgttgtttgtggtttttttcgtaggtttgtttgggtttttttatggtatggtagttgggttttaagagtaggtgttttaggaggtttaggagtagttttagagatttggtttcggaagttatgtagtattatgtttgttttatttgattgattaagtaagttattgatattattttagatttatggtagggggattttttttgtttgagtggtaaagggtttgtagttatttttgttttaatattttttttatagaatttaattttggtgattgattgatagttagtatgtttgggggggtttattttaggatttataagtaattgttatttgaatttaaaatagtttataattttagtattttgggaggttaaggtgtgaggattatttgagtttagaagtttgagattagtttaggtaatatagtgagattttgttattataaaaaatataaaaattatttgggcgtggtggcgtgtatttgtggttttagttatttgggggttgagatgggaggattgtttgagtttgggaagttaagtttgtagtgagtcgtgattatattattgtattttagtttgggtagtagagtaagattttgttttaataaataagtaaatttaaaataaaaataattttttttttttagtatggatttttagtaattaatagaattaaaaaaaaattattaaatattttttgtgtttgatttgattaagtgttaggagtggttttttgtttagtaaattagaaagatgtaggtttagttgagaggtatattgttgtgagtttatgttagtaaggatttttgagtaagggttgtaaggttattgtgatgatgttataaaaatttttgattagggtatttgtttatagtttttttgtttttttttatgtgcgtgtatataatatgtatgtgtttatatgttatagatatatatacgtatatataatgtgtatgtatatatataatatatgtatgtatgtgtgtatatattgtttatatgtatataatttatttttttttgttaattttgtatttggttttatatttttttagtaatatgtaatagtattattgttatttttttataaagtatttttatggaaatttgtaaatatatttaaaagtaatagaatagtatattattagttagttttaattattattaatatttttttaattttgttaatttgttttttatttttatttttattttttttttttttttgtagttttataaagtagatttttggttgagtatagtgggtgatgtttgtaattttagtattttgggagattgaggtagaaggattgtttgagtttaggagttggagattagtttgggtaatatagcgagattttgtttttattgaaaaa

SEQ ID NO: 369 - DNA, 8666 bp, Artificial Sequence
  chemically treated genomic DNA (Homo sapiens)
ttgtagggttttttttagtttaaagaaagtaattaggtgtttttattgtgttatgatttttatttttagttgggttttttagtttggttttaaagaataaaataaaaggtttttttgtttgagttttatttaatttattttttttatttataagaggtattttaaatttttacgatttttaaattttttaatcgattattttatttttattttgtaaataagttaatttttttatttatagaaggaagtgttttaatttttttttcgttttgatttttttttttttttaaatttatgtattttttgtgataaaatttataattatcgttgtattttgagttttatttttttattatttttgagggattttaagtttttaaaaatattttattttgtttgtgtatttaattttttttttatttttttttaatttttttttttttttatttggtatttgtttttttaggtatatgtgtgtttaggttttttttattttttatttgttttattttatggtatagggttttgaattattataattaagttatgaaagagtagttaacgtagtgtttttatttttttgttattttattattttagttttttttttggttttttgaggagttttttataggttggtttttaggaataagtttaaatgaattatttttagtttttttaaatttttatgtttttgtatatttttttatttttgtttagaatattttttttttttttttttatttttaaatttttatattattttttaagattgggattagtttttagtattcggaagtttttgtttattagagataaatgagaatgagtttggttatttttttatttttttgtattattttgtgttttattttgtttttttaagagtattatatgttttatttaatttttaaataattgtttgaggtaagtatagttattattttaattatgtaaatgagaaaatagaggtttagatatgttgagtaattttgataaaagttaaagaattaataagtggaatagttgaggtttgaattttggtagtttgattgtagagatattatgtttgatttatttttttttgtttttattttatgtttgtttttagtttttgagtttgttgaatgaatgaataggtggtagtttttttttgttataagattgattagaattaagataggtttaaattttacgtgtagaatttttaaaattgtaaaggtagtgtaaatttaaaaaaagaatggtatttttaggaaagaggaaaagtaagtgtgagaataataataataataattaataaattttagtaaatttagtaaatgtagtaaatttttatattaaaagtttttggatatatattattatattttatggttatatgaaatatattataattttattttgtatataggaaatttgagattggtataaggagtatagagatttaggattttatatttttatttttttaggattttgtattttaggtcgatatgtatgagtaaattgggagtataatgggttttttaatagaaaaattaggaaagtttttttattattattaattatttatataatatttttttaattttattattatttatattttaagttttagagtatatgtgtataatgtgtaggtttgttatatatgtatatatgtgttatgttggtgtgttgtatttattaatttattatttagtattaggtatattttttaatgttatttttttttttttttttttatataagatttataatggataatggattttaatttttagagtaaaatggttttatttaaggatgttataatttttttagagttttattgtaagatatgagatatatatatttaaaatttgtttttggtatttttaaagtagttaatttttatatttgtttataatgtatttaaatgttgtttttatatggttgtattttttattttttttattaatagttatatatattttttataagagttgaaagagtttttgatgtaggaatttatggtagagttttagagaaatttttgaatttattgaaagttttatttagaaatatatgtgtaagtgaatatattttttttaaaaaaaattattatttatttttttttttgagaagaaggtatttattttaatagatttttgaaggagtttattttttttatttttttatttttattaagaattattgtaggtcgggtacgatggtttatgtttgtaattttagtattttgggaggttaaggtgggtggattatttgaggttaggagttcgagataagtttagttaatatagtgaaatttcgtttttattaataatataaaaattagttgggtatggtagtatgtgtttgtaattttagttattcgggaggttgaggtaggagaattgttcgaattcgggaggcggaggttgtagtgaatcgagagagatcgtgcggtgttattttattttagtttgggtaatagagcgaaattttattttaaaaaaatatataaaataaataaataaaaagaaagaattattgtattagtgatggaaatgtgtttttttttttttattttggtaattatttttttttttttttattataaaatattttaaattaaattaaaataattttatttatcgatagtttgaattttttttattattgttatatagttaattgagaggtatttcgaggaaaatataaatggtatagtaatgtattgtagattttaataatatatttgatattttaaattgtttttattggttttattttaaaaattatatgttttaaaattaagtagatattaaaagtataagatatattgggtttataaggtttaagttaattagggattgaaatataatttttaaatagagttggattatttagtaggtagattaagtatgtgtttaaggtattagtaaagtttgagtaatttattttttaaaacgtagtatatgtttttgataagtttaaaaagtagtagttataggaaaaattagaatttttatttttttgcgtttgttatattttttagtgttgtttaatttttttttgtaagtgagggtggtggagggtgtttataatttttttagggagtaagttttttttggttttttttttttttttttttttttttttttttgagattaagtttcgtttttgttttttaggttggagtgtaatggcgcgatttcggtttattgtaattttcgtttttttttgggtttaagcgatttttttatattagttttcgagtagttgggattataggtatgcgttattaagtttcgttaattttgtattttttagtagagatagggtttcgttatgttggttaggtttgtttcgaatttttggttttaggtgattcgtttgtttcggttttttagaatgttgggattatagacgtgagttatcgtattcggattttttttttatgtaatagtgataattttatttaaagtatttttttttttttttgagtcggagttttattttgttatttaggttggagggtggtggcgcgatttcggtttattgtaatttttgtttttcgggtttaagcgatttttttgttttagttttttgagtagttggaattatatacgtgcgttattatggttagttaatttttgtatttttagtagagacggggtgttattattttggttaagttggtttcgaatttttgattttaggtgatttgttcgtttcggttttttaaagtgttgggattataggtgtgagttatcgcgttttgttttaaagtattttttttttatgttttaaaataagattgtaagttagtttttaaagcggataatttaagagttaataggtattagtttaggatgtgtggtattgtttttaaggtttatatgtattaatatattatttaaatttataataatttttataaagtagggggtatttatatttttttttttttttataattacgaaaaatgtaaggtatttttagtaggaaagagaaatgtgagaagtgtgaaggagataggatagtatttgaagttggtttttggattattgtgtaattttgtttttagaatattgagtattttttttggtttaggaattatgattttgagaatggagttcgtttttttaatgattttttttttatttttttatttgtttataggtagaattttttttcgttcgtattaaataaattttatttttttagagtttgtttttatattaggtaatgtatacgtttgagaaatttttgttttagatagtcgttttatacgtaggaggggaaggggaggggaaggagagagtagttcgattttttaaaaggaattttttgaattagggtttttgatttagtgaatttcgcgtttttgaaaattaagggttgagggggtagggggatattttttagtcgtataggtgatttcgattttcggtggggtttttataattaggaaagaatagttttgtttttttttatgattaaaagaagaagttatattttttttatgatattaaatatttcgatttaatttggtagttaggaaggttgtatcgcggaggaaggaaacggggcgggggcggatttttttttaatagagtgaacgtatttaaatacgtttttgttggtaggcgggggagcgcggttgggagtagggaggtcggagggcggtgtggggggtaggtggggaggagtttagttttttttttttgttaacgttggttttggcgagggttgttttcggttggtgttttcgggggagatttaatttggggcgattttaggggtgttatattcgttaagtgttcggagttaatagtatttttttcgagtattcgtttacggcgtttttttgtttggaaagatatcgcggtttttttagaggatttgagggatagggtcggagggggttttttcgttagtatcggaggaagaaagaggaggggttggttggttattagagggtggggcggatcgcgtgcgttcggcggttgcggagagggggagagtaggtagcgggcggcggggagtagtatggagtcggcggcggggagtagtatggagttttcggttgattggttggttacggtcgcggttcggggtcgggtagaggaggtgcgggcgttgttggaggcgggggcgttgtttaacgtatcgaatagttacggtcggaggtcgatttaggtgggtagagggtttgtagcgggagtaggggatggcgggcgattttggaggacgaagtttgtaggggaattggaattaggtagcgtttcgatttttcggaaaaaggggaggttttttggggagtttttagaaggggtttgtaattatagatttttttttggcgacgttttgggggtttgggaagttaaggaagaggaatgaggagttacgcgcgtatagatttttcgaatgttgagaagatttgaaggggggaatatatttgtattagatggaagtatgttttttattagatataaaatttacgaacgtttgggataaaaagggagttttaaagaaatgtaagatgtgttgggattatttagtttttaatttatagatatttggatggagtttattttttttattaggagggattattagtggaaatttgtggtgtatgttggaataaatatcgaatataaattttgatcgaaattatttagaagcggtcgggcgcggtgttttacgttttgtaatttttttattttgggagattaaggcggggggaattatttgaggtcgggagttcgagattagtttggttaataggtgaaatttcgtttttattaaaaatataaaaagtagtcgggggtggtggtaggcgtttgtaattttagttattcgggaggttgaggtaggagaatcgtttgaattcgggaggttgaggttgtagtgaatagcgagatggagttattttattttagtttgggtgatagagtgagattttgtcgaaagaaagaaagagagaaagagagagagaaaaattatttagaagtaattatatattgtgtttatttttaattgagtagggtaaataaatatatgtttgttgtaggaatttaggaaataatgagttatatttatgtgattattttagaggtaatatgtagttattattttgggaatatttgttaatatttttgtttttttattatttttagtttatttgatatagtttatttgtgataagagtttttaattttttatttttgaatagaggtgttttttttttttttatttttgttttgtgagggagttaggggaggatttaaaagtaattaatatatgggtaatttagtatttttaaaattttgttaatagtttgaattcgggagtttggttttgtagttttataatattttagaagagattttatttgtttaaaaataaaaaggaaaaagaaaagtggatagttttgataatttttaatggagaagggagaagaatatgtagaaaaggggaaatgatgttggtttagaattttaattatattggtgtttaatataggaatatttatttatataatattttaaagtattaaatttatattagtatattattaaatggatatattattaaatgggtttaagtattttatatattttaatttaattgatttattttttttttgttttggatttttattatgatttaaatatttatatatgggttattttttagattttttatattatgaaatataagaaaaatttttaaggttagttttatgattaagacgaaggattttattgaatatataaaataataaatatattgtaatattttgtttttttttttgtagttgtaatttggtttgtttatattttttttttgtttttttgaaaattgagttagttttatttttttaggataggatttaataattataatataatttagtataattttttgatttaggtaaattatgtaatttgtgtttagtatgaaatgtatttaaaaataagtaatttttttttaatattattatttttaaattaatataataaataatagttattttaaaataaattgtttatttttattatgtagtatttaaattttaaggttgttatgattgtagatagtattttaaaatttttttttggaaatggttttgtttttaagatgatttaggaattaaagaggtgattattttttgtttaatgaatttttaaattataaatttgggaagtgttttagttttttattgttgttgttataaattattataaatgtgttagttaaaataaatataaaattattattttatagttttagagattagaagttaaaaatgggtttataaggttttattttttttggaaattttaaggggtaatttgtttttttgttttttttagtttttagtgattattaaattttttggtttatggtttttgtattttttttgtggtttgtgtttttatttttgtattttttttttgattgtgattttttaataaaaatatttggggttatgttgggtttattttgaaaattttggataattttttttaagattattaattaaattatatttgtaaagttttttttgttatataagttaatgtattaaaagtttttgaggattaggatatagatattgggggtgggggggtattatttagtttattataggaaggaattttagggttaattaaattagtttttttattttatatttgaagaaattgaagttttggaattggagagtattatgttaaatgaaataagttaaatatagaaagataaatattatatgtttttatttatttgtgaaatataaaataattatatttttagtagtaaagagtagaatggtggttattagagttggggggtgggaggaatggggagatggtaattaagatataaagttttagttaagatgggaggaataagtttgattgttttttttgagatgtgttttatagtatgatgaatatagttaaatagtaaattttaaatgtttttatttgataaaaatgttaaatatttgagatgatggataggttatttagtttgatttaataattttttattgtgtttaaagattataattttatattgtattatataaatatatataattgtattattttaatatataattttaaaattaatataatgaaaaagaaattgaagtttaatatttttagaagttaagtgtaatttaaaagttttgtgagaatttgttttaataaataaataagttttttttttttaataattattatattttgcgtttggatatatagtagtgaataaaaaaaaaaaaaaaaaaaaaaatttttaggtttaatataattttaggaagaaattttagtagttgtattttaggggaaatataggaagttagtttggagtaaaagttagtttgtttttgtttttttgttattttgttcgtgttttatagtgttttttgtttgtgacgatagtttcgtagaagttcggaggatataatggaatttattgtgtattgaagaatggatagagaatttaagaaggaaattggaaattggaagtaaatgtaggggtaattagatatttggggtttgtgtgggggtttgtttggcggtgagggggttttatataagtttttttttcgttatgtcggtttttattttggttttgattattttgttttttttggtagg

SEQ ID NO: 370 - DNA, 8666 bp, Artificial Sequence
  chemically treated genomic DNA (Homo sapiens)
tttgttagagagaatagaatggttagagttagggtgggggtcggtatgacggaaaggaagtttgtgtagagtttttttatcgttaagtagatttttatataagttttaggtgtttaattatttttatatttgtttttagtttttaattttttttttgagttttttatttattttttagtatataatgaattttattatatttttcgaatttttgcggagttgtcgttataggtagagagtattgtgaggtacgggtaaaatagtaaaggggtagggatagattgatttttattttaggttaattttttgtattttttttgagatataattattgaaatttttttttgaaattatgttaggtttggagatttttttttttttttttttttttgtttattgttgtatatttaagcgtagaatgtggtaattgttaaaaagagaaaatttgtttgtttgttaaaataaatttttataaaatttttaagttatatttagtttttgggaatgttgaattttaattttttttttattatattagttttaaaattatatattgggatagtatagttgtatatatttatgtggtataatatgaagttatgatttttgaatataatggggaattattaagttaagttaagtaatttatttattattttaaatatttgatatttttgttaaatgagagtatttgggatttattatttagttatatttattatgttatgaaatatattttaaaaaaaataattaaatttattttttttattttaattgaggttttatattttgattattatttttttattttttttattttttagttttagtaattattattttattttttattgttaagaatgtaattgttttatattttatagataagtgagaatatgtgatatttgtttttttgtgtttggtttattttatttagtataatgttttttaattttaaaattttaatttttttaagtataaaataagaaggttagtttaattaattttaaaatttttttttgtggtaggttgaataatgtttttttatttttaatgtttatgttttaatttttaaaaatttttaatatattaatttatgtggtaaaagaggttttgtagatgtgatttaattaatggttttgagggagattatttagaatttttagggtgggtttaatataattttaagtgtttttattagagggttatagttagagagaagatataagaatggaagtataggttatagagaaaatatagagattatgagttaaggaatttgatggttattagaagttggaaaagataaggaaatagattgttttttagagtttttaaaaggaatgaaattttgtggatttatttttgatttttgatttttagaattgtaaaataataattttgtgtttgttttagttaatatatttgtgataatttgtaatagtagtagtaggaaattaaaatattttttaggtttatgatttgagagtttattaaataagagatggttatttttttggtttttaaattattttggaaataaagttatttttagagaggaattttaaaatattgtttgtagttatagtaattttaaaatttgagtgttgtatggtggaagtagataatttattttaggataattgttatttgttatattagtttgaggatggtggtgttaaagaggagttatttatttttaggtatattttatattaaatataaattgtataatttgtttaaattaaggaattatattaaattatattatggttattaaattttgttttgagaaagtgaaattgatttagtttttaaagagataaagagaaagtataagtaaattaaattgtagttataaaaagaaagataaaatgttgtagtatatttattgttttgtgtatttaatgaagtttttcgttttggttataaaattagttttaaaggttttttttatattttatagtatgaaaaatttaaaaagtaatttatatgtaaatatttaaattatgatagaaatttaaagtaaaaagaaaatgaattaattgaattaaaatgtgtaggatgtttaaatttatttgataatatatttatttgataatatattaatatgaatttagtattttaaaatgttatataaataaatgtttttatattaaatattaatgtagttaggattttaagttaatattatttttttttttttatatgttttttttttttttttattaaaaattgttaaaattatttattttttttttttttttttgtttttaaataaataaggttttttttaagatattgtaggattataaagttaaattttcgggtttaagttgttggtaaaattttagagatgttaagttatttatgtattaattatttttaaatttttttttaatttttttataaaataggagtagggagaggagaaatatttttgtttaaaaatgaggaattgaaaatttttattataaataaattatattaagtaagttaaagatagtaaaagagtaaaaatgttagtagatatttttaaaatggtaattatatattatttttggaatgattatatgaatgtggtttattattttttaagtttttatagtaaatatatatttatttgttttatttagttaaaaataaatataatatgtagttgtttttgaataatttttttttttttttttttttttttttttttttcgataaagttttattttgttatttaggttggagtgaagtggttttatttcgttgtttattataattttagtttttcgggtttaagcgatttttttgttttaatttttcgagtagttgggattataggcgtttgttattattttcggttattttttgtatttttagtagaggcgaggttttatttgttggttaggttggtttcgaattttcgattttaggtgatttttttcgttttgattttttaaagtgaagggattataaggcgtgaggtatcgcgttcggtcgtttttgaataatttcgattaaaatttatattcgatatttattttaatatatattatagatttttattgataattttttttagtaagaaagataagttttatttaggtatttgtgaattggaggttaagtagttttagtatattttatatttttttaagattttttttttattttaaacgttcgtaaattttgtatttgataaagagtatatttttatttaatataaatatgtttttttttttagatttttttagtattcgagagatttgtacgcgcgtggttttttattttttttttttggttttttaagtttttagggcgtcgttaggaggaggtttgtgattataaattttttttgaaaattttttaggaagtttttttttttttcggagaatcgaagcgttatttgattttaatttttttgtaaatttcgttttttagagtcgttcgttattttttgttttcgttgtagattttttatttatttggatcggttttcgatcgtaattattcggtgcgttgggtagcgttttcgtttttagtagcgttcgtattttttttattcgatttcgggtcgcggtcgtggttagttagttagtcgaaggttttatgttgtttttcgtcgtcggttttatgttgtttttcgtcgttcgttgtttgtttttttttttttcgtagtcgtcgagcgtacgcggttcgttttattttttggtgattagttagtttttttttttttttttttcggtgttggcggaagagtttttttcgattttgttttttaaattttttggagggatcgcggtatttttttaggtaaggggacgtcgtgagcgagtgttcggaggaggtgttattaatttcgagtatttagcgaatgtggtatttttgaagtcgttttaggttgggtttttttcgggggtattagtcggaagtagttttcgttagagttagcgttggtaaggaaggaggattgggtttttttttatttgttttttatatcgtttttcggtttttttgtttttagtcgcgttttttcgtttgttagtaaaggcgtgtttgagtgcgtttattttgttaaaaagaaattcgttttcgtttcgtttttttttttcgcgatataatttttttaattgttaaattgaatcggggtgtttggtgttatagggaaagtatggtttttttttttaattataagaaaaagtaaaattatttttttttagttgtgagagttttatcgagaatcgaaattatttgtacgattagaaagtgtttttttatttttttaatttttgatttttaggagcgcggggtttattaagttagaaattttagtttaaaggattttttttggagagtcggattgtttttttttttttttttttttttttttttgcgtgtaaaacggttgtttggggtaagggttttttagacgtgtatattgtttggtataagagtagattttgaaaagatgaggtttatttaatacggacgggggagaattttgtttgtaggtagataggaaaatggggagggagttattggaaggacggattttatttttaaagttataatttttagattagaaaaagtgtttagtgttttagaagtagagttgtatagtgatttaaagattagttttaaatattgttttgttttttttatattttttatattttttttttttattgaaaatattttgtatttttcgtaattataaagggggaagggaatatgagtgttttttgttttataggggttgttgtgagtttaaatgatgtattaatatatataagttttaagaatagtgttatatattttaagttaatatttgttagtttttgaattattcgttttgaggattggtttgtaattttgttttgaggtatagaaagaaaatgttttggagtaggacgcggtggtttatatttgtaattttagtattttgggaagtcgaggcgggtagattatttgaggttaggagttcgaggttagtttggttaaaatggtgatatttcgtttttattaaaaatataaaaattagttggttatggtggcgtacgtgtgtaattttagttatttaggaggttgaggtaggagaatcgtttgaattcgggaggtagaggttgtagtaagtcgagatcgcgttattattttttagtttgggtgatagaatgagatttcgatttaaaaaaaaaaaaaaatgttttggatagaattattattattatataaaaggaaagttcggatgcggtggtttacgtttataattttagtattttgggaggtcgagataggcggattatttgaggttaggagttcgagataagtttgattaatatggcgaaattttgtttttattaaaaaatataaaattagcggggtttggtggcgtatgtttgtaattttagttattcggaggttgatgtaggagaatcgtttgaatttaggagaaggcggaggttgtagtgagtcgagatcgcgttattgtattttagtttgggagataagagcgaaatttggttttaagaaaaaaagaaagaaagaaagaaagaaagattaagaagaatttattttttgaaaagattatgggtattttttattatttttatttataaagaaaagttaaatagtattaaagagtataataagcgtaaggaggtaaaagttttaattttttttgtgattattattttttaagtttattaaaaatatgtattacgttttaaaaaatggattgtttagattttgttgatgttttaagtatatgtttaatttgtttattggataatttagttttgtttaaaagttatattttaatttttggttgatttaaattttgtagatttagtatattttgtatttttagtgtttgtttgattttaaaatatgtagtttttaaaatgaagttaatgaaaataatttgggatgttaagtatgttattaaaatttataatgtattattgtattatttatatttttttcggggtattttttaattagttgtgtagtaatgatagggaaaatttaaattatcgataaataaaattattttagtttagtttaagatattttatgatggaggaggaagaaagtggttgttaggatgggagggagggaatatatttttattattaatataatggttttttttttttgtttgtttgttttgtgtgtttttttgagatggagtttcgttttgttgtttaggttggagtgaaatggtatcgtacgatttttttcggtttattgtaattttcgtttttcgggttcgagtaatttttttgttttagtttttcgagtagttgggattataggtatatgttgttatatttagttaatttttgtattattagtagagacggggttttattatgttggttaggtttgtttcgaatttttgattttaggtgatttatttattttagttttttaaagtgttgggattataggtatgagttatcgtgttcggtttatagtggtttttaatgggggtgggagagtgggaagagtaggtttttttaagagtttgttgaaataaatattttttttttaaaaaagaaagtaggtaatgattttttttaaaaaagatgtgtttatttgtatatgtatttttagataaaatttttagtgaatttagggatttttttgaaattttattatggatttttatattaagaatttttttagtttttgtgaaaaatatatatagttattggtgaagaagatgggagatgtaattatataaaaataatatttggatgtattataaataggtgtaaaagttgattgttttggaaatattaagaataagttttagatatgtatattttatattttgtagtagagttttggaaggattatggtatttttgggtggggttattttgttttagaaattgaagtttattatttattataaattttatgtaggggggaggggggagggatagtattaggagatatatttaatgttaaatgatgagttgatgggtgtagtatattaatatggtatatgtatatatatgtaataaatttgtatattgtgtatatgtattttaaaatttaaagtataaataataataaaattaaaaaaatattatgtaaataattaataatagtgggaaaatttttttagtttttttgttaaagagtttattatatttttagtttatttatatatatcgatttgaggtgtaaaattttagaagaatgaaaatataaagttttggatttttgtgttttttatgttagttttagattttttatgtgtaaaatgggattataatatattttatgtggttataaaatatgataatgtatgtttaaaagtttttaatgtaaaaatttattatatttattaaatttattaaagtttgttggttattgttattattatttttatatttatttttttttttttttgagaatgttattttttttttagatttgtattgtttttgtagttttgaaaattttatacgtgaaatttaaatttgttttaattttgattagttttataataaaaaaagattattatttgtttatttatttaataagtttagaaattaagggtagatatggggtgggggtagaggggagtaggttaaatatagtatttttatagttagattgttagggtttaaattttaattgttttatttattggttttttaatttttattaaagttatttaatatgtttgggtttttgtttttttatttgtatgattaggataataattgtatttgttttaaatagttgtttagggattaaatgaagtatgtaatgtttttagaagagtaaaataaagtatagaatgatataagaaaatgaaaaggtgattaaatttatttttatttgtttttagtaggtaaaggttttcggatgttgagagttgattttagttttgaagaatgatgtgagagtttaaagatggaaaagaaggagaaagatattttaggtagaggtaagaggatgtgtaaaggtatagaagtttaggaaaattgaaagtaatttatttagatttatttttgaaaattagtttgtgaaggattttttagagagttaaaagaaaaattaggataatgggatggtaaggaagtggggatattgcgttgattatttttttatagtttggttgtgatagtttaaggttttatgttatgaagtgaggtagatggaaggtggaggagatttgagtatatatatatttggaagggtaagtgttaagtgaagagaagggaaagttagaaaagaataaaagaaaagttaagtatataggtaagataggatatttttgaggatttgaggttttttaaaaataatgaagaaatagaatttaaagtatagcggtggttatagattttgttataagagatatatagatttgggagggagaaaaggttagaacggggaggaagttgaggtatttttttttatgaatgaggaggttagtttgtttgtagagtgaaaataagatggtcggttaggaagtttgagaatcgtaaaggtttggaatattttttatgagtagagaggatgggttgagtaagatttagatagagaagttttttgttttgttttttaaaattagattggagaatttagttgagggtggagattatgatatagtagggatatttgattattttttttaaattaaagaaagttttgtag

SEQ ID NO: 371 - DNA, 6662 bp, Artificial Sequence
  chemically treated genomic DNA (Homo sapiens)
gaagggaagaaaaataaatattgaattaggagaaaaaaaattattttttatttttttagaattttatttttaagagaaataattttagttaagtgttataaattaaaagaaggaaatgtaaagaaatttggtttatgtacgagtaaagaaaagtaattttaatttatttatttttatagttggtttatagtagtttatggagtttagtttaagttaaatatagatttttttttagaatttttatgtttttttaaaagaaatttttatattatttttatttttaatataaataataaatattatttatattttattaaatttttatttgaaattattttagaatatttttaaagatagtatagaatgtttttatatgtttttagtttatttttttttaatgttattattttatttaatatggtatatttattaaaattaggaaattaatattgttaaatattattagttaaattttggaggttttatttggatttttatattaatgttttttttttgttttatggtttaataatattatattatatttagttgttatgttttagtagttttttttaatttgtgatagttttttagtggatatttttgaagagttaggaattttataaaattttttttaatttgggattatttaatgtatttttagaattatattgagatgtgtattatcgtagaggtgatatgtttttgttatattatattaaggttatgtgttattaatttgagttattattggtagtgataattttgattttttggttaagataattaattttttaaataatattttttgtttataatgtaatttatgagaaaattaatgttattgtatatatgtattttatttagtgatttagtgttgtttaggatattagtggcggattttggattaatggaaaaagtataaggtttggagttttaagaattgaatttaaattttatgtttagtatttattgattttaaattataatttttgttagttttaatttttttatttgaaatacggggattattattatagttattttatagaattgttgtaaagattaatatatgtattggttgtgtgtggtggtttatatttgtaattttagtattttgggaggttaaggtgggcggattatgaggttaggagttcgagattagtttgattaatatggtgaaattttgtttttattaaagatataaaaattagtcgggcgtggtggtgcgtatttgtaattttaggtattcgggggttgaggtagaagaattgtttgaatttaggaggtagagattggagtgagttgagatcgcgttattgtattttgtttgggcgataaagcgagatttagttttaaaaatatagatagatagatagatagatagatagatagatagatagatatgtattatattttataattatgaaatattatataaatattaattgttgttattattttttagtttttgggttgtttattgggtttttttttttttttattttaacgaagaatttttaggtcgggtgcggtggtttatatttgtaattttagtattgtgggaggttgagtcgggtagattatgaggttaggagatggagattattttggttaacgtggtgaaattttatttttattaaaaatataaaaattagttgggtgtggtagtgggcgtttgtaattttagttatttaggaggttgaggtaggagaatggtttgaatttggaggtggaggttgtagtgagtcgggatcgcgttattgtattttagtttgatgatagagagagattttgttttaaaaaaaaaagaatttttagtttggttaatatagtaagattttatttttataaaattagaaaaattatttaggtatggtggagtatgtttgtggttttagcgattttagaggttgaggtaggagggttatttggatttgggaagttaaggttttagtgagttatgattatgattaagttattgtattttagtttgggtaatagagtgagaatttgttttaaaaataaaataaaataaaaataataaaaaatttttataaataagtatttatatgaaaaaaattattgaattttagaaataaaatgttgaagttataattataaagttatataaaaggttgtttgggggtgtttagtttgttttttatttttgttgatttataaatataataaaaaggaaaattttgagattagttaaataaatggtaaatattatatatatatttttaaaagttaattatttagaaattgtatttatttgagttaatgagggaaaagtatagaataatttgattgaattatatttttattttatgttaatgagggaaaagtatagaataatttgattgaattatatttttattttatgtttttttttttttttttttttgagattgttgggtcgttattgttttttaggtttaagtaatttttttgttttagttttttgagtagttgggattataggcgttagttattacgtttagttaatttttttttgtatttttagtggagttggggtttaattatgttggttaggttggtttcgaatttttgattttaggtgatttgtttattttagttttttaaaatgttgggattataggcgtgagttattgcgttcggttatttttatgtttttttaaatgattatgaattgttggagtaaaaggtttttatgattgttaatatttaatatttaattataaaggttatattttagtatttgatgtatttattattttgatgttaaaaaggaaagtattatttttaatatagtagaaatttaattatgaattttttttgtaagttatgttagaatataagtttattgagggtagagatatttttgaatttgttgtagtgaattagtttttaataaatattagatttttattggagttattgtgtaatatttatgtatgttttttgaattaagattttaagttttgtattgttaattttggtttatttaataggtagatgaagtatatgttttagggtattagtaaaattagaatgttaaaaaaaaaaaaaaaatttttgttaaataatttaatattttagtaaaattattgaagtagttattatgggaaaaaaattagaattttgttggatttttttattgttattttggggttttgttatttttttttttatttttatataaggaagaggtggtagaatattaaaatttttttagtgtttagggtttttaaaaattttaatataattttgtgtatattttaaattattataagttttttttagttgtttagtaataagtattttattttatgaaaattatagtacgtttattcgtattttatgtaattatataatttaagattttttttttttataatttatttttaagtaagaaattataataaatgttagaaggtaatttttataaattggattaatattagtttttttttattagttaatagtgttaatatgtttttatattttttggttgtatgaaaagattatatagtttttagaataattaaaagtaaattattatttattttttattggtataaatggaattttaaatgtttttatttgaaacgtttatatatatgtaagaaaaagagagttaattttttgttttgtagtttttatttgatttataatttaagtttagttatttaagaaaagaattttagttttttttttaataattatattaaagaaaatattgttagattttttttagttttaattttttttttatttattaattttttgttggatgattatttagatatttttggtgtgttttgttgttaatatttttagtgtattttaagaagggtatagatattgtttgaggattcgtttgttaaaggtcggttttaattagatttgttattttttgtttggttttattttgattattgggtgtattatgtaatcgtgttggatatttttaagagtataaaaatatagaaagtaatagttaattaattttatatagttaaaagaggaagttaaaagtattggaaattggtgtcggatgattaaataaaggattaggagagagattattttagatattttttttaattttatatttttaaaatttaagttatttttaagtagtgagagaatttcggtaattaagaaatggttttgttagaaaatattttatacgatttattttaaattttgttttaaatttaattgttttttttttttttttttaataataggattatttcgtagtttttagtttttgattaattaaggttttagagttcgtttttatatatgttatgttttaagtttttataaaatttagtttatataagatttgttttttgtgagtattgtgtttagtggtagttcggatttttttttttattttcgcggttatttttgtttatcgcgtcgtcgggtatggatttggtaggtgcgaggtcgaggttagggtttagcgaaggacgtcgagtttatagagcgcgcgcgtttagaggaggtagtagtagtcgtagtttggtcgttcgaattttgcgagtttggcgggggagtatagaggcgggtcgatttgtttcgttagcgttgaggaacgattttttttatgttagttcgttgttcgttttttcgtagcgtacgttgcggagttttaaagattttgcggttttttataatcgttttaaataataaatttttgttttcgttttcgtaggaattggggtagttgggggttcgcgttatagatttaagttcgttagtagaagggtaggtcggatttcgcggggtcgaatttcgttttagttggggataggtcgtttagtcggtaggagggagtcggcgcgagagatttgacgggaggaggtggagagcgggaggcgggaatgagggcgcgggatcgggcgggcggagcgtgcgagattgcgagcgcgagcgttagtagggcggagggcggggcgtgggcggcgttcggttttttcgttttcgcggcgttgtaattttgtcgagtttttttaaaattttgtcgttaaaatgggggcgggttttttaatttaaaaagcgtttaatttttttttttttaaaaaaagttgatgaggtcggaaaaaagggagaagaaatcggtattttttttgagaggtaatagaagtagtaattgttttagcgaaaaaagtagtaagggagggagtgaaggaaaaaagtaaaaaagggggcgatacgtaagtgtttgtaggggtgaaaggagtagggatcggcgatttagggggggattagttataaaagaaattgttattgggagcggtgcggttaaggaggaagtagtgttgttaggttttgttttagggtatagttggttggcggttgttttgttcgtagtaaaggggtataggtcggggatcgcgagaggtggtaaagtggtatcgggcgtcgaggttgttgagcgttcgtcgagacggcgatcggattggttgtttcggaattgcggcgattttttttatttagaatttggtttacgttttttaggattttttttatttttagaggtttttataaaatcgggaaaggaaggaaaggatagcggcggtagtagtttaatgagtgtttatagtagaaagtttgaacgagttcggtcgtaggcgggaagttttcgggggggttgtttagtgtagtcgtaatgttgtcgcgagttgttttagtagttcgggtttcgtagacgtttttcgtattatttttttttttcgggttgtcgggagtttcggatttggcggggtcggtatgacgggtttttcgggggttcgtcgtacgttcggtagttttcggagacgcgcgtcgagttcggtttttacggtttttgaggttcggcggggttgcggttgtttggcgggcgggtttcggagtttttttgagcggtattagttacggtttggttcggacgcgattaaaggtttttttggagaagtttagagtattgggtaatcgttacgatttgtaatttgagggttatcgaattgttattttcgttcgtttttggcgattattttttaatttttcggagtacgttagtatttagttatcgcggcgtttttttagtagcggaggatttaggattattttttcggcgagacggatggaaatcgagttttttggaggatttgtttttgtagttttgttttatacggtttaagttattatcgtgaataagggtgggtgaatgtttttttttttttttgaatgttttttttttcgcggtattttttgtttcgatttatagttttttgagtttttatatatattttttatagagatttgtagcgtaggtacgtgatagttttgtttatatttgacgttcggagttattaattaggaatgtatgtgtgtttgtgtgtttttttgtggagtcgttagaattttttataggggttaagttaaaaaagcgaggcgaggagtttttttttaatggtttagttttgttgaataattacgtgtgaatcgaggggcgggtttttggtaggtagattttattagtatttattattaagttttattttagattaattattttagtttttttgttagttttcgatgttattatgtagtttggttaggagtaaaggaaaggggaaaaagaaaaacgattaatttatttttttttgatcgttagg

SEQ ID NO: 372 - DNA, 6662 bp, Artificial Sequence
  chemically treated genomic DNA (Homo sapiens)
tttgacgattaggaaaagatgaattagtcgtttttttttttttttttttttttgtttttaattaggttgtatgatggtatcggagattgatagaaggattgggatggttaatttggagtagagtttggtagtaaatattagtaagatttgtttgttaaaagttcgtttttcgatttatacgtgattatttagtaaaattgagttattggagaggggtttttcgtttcgtttttttagtttaatttttatgaagaattttgacgattttatagagagatatatagatatatatatatttttggttaatgatttcggacgttagatgtaggtagagttgttacgtatttacgttatagatttttgtgaggagtgtgtgtggagatttaagggattatagatcggggtagaaaatatcgcggaaggaaagatatttagggggaagaaaaggtatttatttatttttgtttacggtggtgatttgagtcgtgtgaggtagaattgtaggggtaggttttttagggggttcggtttttattcgtttcgtcgaagggatagttttgggtttttcgttgttgggagagcgtcgcggtggttggatgttgacgtgtttcggagggttaaaagatgatcgttaaaggcgaacgggagtagtagttcggtggtttttaagttataggtcgtaacgattgtttagtgttttgggtttttttagaagagtttttggtcgcgttcgggttaagtcgtggttaatgtcgtttaggaaagtttcggagttcgttcgttaggtagtcgtagtttcgtcgagttttagaggtcgtgggagtcgggttcggcgcgcgttttcggaggttgtcgggcgtgcggcgggttttcgagaagttcgttatgtcggtttcgttaggttcgggattttcggtagttcgaggaaggagagtgatgcggaaagcgtttacggagttcggattgttggggtagttcgcggtagtattgcggttgtattgggtagttttttcgggaatttttcgtttacgatcgagttcgtttaggttttttgttgtaggtatttattgagttgttgtcgtcgttgtttttttttttttttttcggttttgtgggggtttttggagatggggagagttttgggaaacgtaggttaagttttgagtagggagagtcgtcgtagtttcggggtagttagttcggtcgtcgtttcggcgagcgtttagtagtttcggcgttcggtgttattttgttatttttcgcggttttcggtttgtgtttttttgttgcggatagggtagtcgttagttagttgtgttttggagtagagtttggtagtattgttttttttttggtcgtatcgtttttagtgatagttttttttgtagttgatttttttttagatcgtcggtttttgttttttttatttttataggtatttgcgtgtcgtttttttttttgttttttttttttatttttttttttgttgtttttttcgttgaaataattgttgtttttgttgttttttagagagggtgtcggttttttttttttttttttcgattttattagttttttttgaaaagaaaaaaattgagcgttttttgagttgaaaaattcgtttttattttaacggtagagttttaaggaggttcggtagagttgtagcgtcgcgggagcgggaaggtcgggcgtcgtttacgtttcgtttttcgttttgttggcgttcgcgttcgtagtttcgtacgtttcgttcgttcggtttcgcgtttttattttcgtttttcgttttttattttttttcgttaagtttttcgcgtcggtttttttttgtcggttaggcggtttgtttttagttggagcggggttcggtttcgcgaagttcggtttgtttttttgttggcgggtttgagtttgtgacgcgaatttttagttgttttaatttttacgggggcgaggataggggtttgttatttaagacggttgtggagggtcgtagggtttttgaggtttcgtagcgtacgttgcgggaaggcggatagcgagttggtataaagggagtcgttttttagcgttagcggggtaggtcggttcgtttttgtgttttttcgttaggttcgtaaagttcgggcggttaggttgcggttgttgttgttttttttaggcgcgcgcgttttgtaaattcggcgtttttcgttgagttttggtttcggtttcgtatttgttagatttatgttcgacggcgcggtgggtaggggtggtcgcgggggtggagggaaaaattcggattgttattaagtatagtgtttataaaaagtaagttttgtgtagattgaattttatgaaaatttaagatatggtatatgtaagaacgaattttgaagttttaattaattaaggattggaaattgcgaaatagttttattattagagaaaaaggagaaaagtaattaaatttaaagtaaaatttaaaataagtcgtgtgaagtgttttttaataaagttattttttggttgtcgaagtttttttattatttagaagtggtttggattttggggatgtggggttggggagggtgtttagaatggttttttttttaattttttatttaattattcgatattaatttttagtatttttaatttttttttttagttatgtgagattaattaattattgttttttgtatttttatatttttaaaaatatttaatacggttgtatgatgtatttagtggttaaaatgaaattaagtaaaaaatgataagtttaattagaatcggtttttggtaagcggatttttaagtagtatttgtattttttttgaagtatattgggagtattagtaataaaatatattagaaatatttgggtaattatttagtaagagattggtaggtagagggaaagttgaaattgggaagaatttggtagtgttttttttaatgtaattgttgagaaaaaaattagagttttttttttaggtaattaaatttgaattgtgaattaaatgagaattataaaataagaaattaatttttttttttttatatatatgtagacgttttaaatagaaatatttaagattttatttatattagtaagaaataaataataatttatttttgattattttgggaattgtgtaatttttttatatagttagagggtgtgaggatatattagtattgttggttgataaaagagaattggtattagtttaatttatgaggattgttttttagtatttattatggttttttgtttagagataaattgtaaagaggaagaattttaaattgtatgattatataaagtacgggtaaacgtattataatttttatgaaataaaatgtttattgttgaataattaaggaaaatttatgataatttaagatgtatatagagttgtattaagatttttggaggttttaagtattgaaaagattttgatgttttattattttttttttatatagaaataaaaagaaaaataatagaattttaaaataatagtaaaaaagtttaataaagttttgattttttttttatgatggttattttagtggttttgttgagatattaaattatttggtaaaggttttttttttttttttaatattttggttttgttggtgttttgaagtatatgttttatttgtttgttgggtaaattagaattggtagtgtagagtttagggttttagtttagaaggtatatataagtattatatagtaattttaatgaaaatttagtatttattgagggttagtttattatagtagatttaagggtatttttatttttaataagtttatattttaatatggtttataagaaaaatttatagttaagtttttattatattgagagtggtgtttttttttttaatattaaaatgataagtatattaaatattgaaatatagtttttatagttagatattaaatattaatagttatggaaattttttgttttagtagtttataattatttaaggagatatagaagtggtcgggcgtagtggtttacgtttataattttagtattttgggaggttgaggtgggtagattatttgaggttaggagttcgagattagtttggttaatatggttaaattttaattttattaaaaatataaaaaaaaattagttgggcgtggtggttggcgtttgtaattttagttgtttaggaggttgaggtaggaggattgtttgaatttgggaggtagtggcggtttagtagttttaaaaaaaaaaaaaaaaagagatatagaatagaaatgtgatttagttaaattattttgtgttttttttttattgatatagaatagaaatgtgatttagttaaattattttgtgttttttttttattgatttaagtaggtatagtttttgaatgattaatttttggaaatgtgtatgtggtatttattatttatttaattggttttaaagtttttttttttgttgtatttatagattaatagaggtggaaaatagattgggtatttttaggtagttttttatgtgattttataattgtagttttagtattttatttttgagatttagtggttttttttatataggtatttatttatgaaaattttttattatttttattttattttatttttgagataggtttttattttgttgtttaggttagagtgtagtggtttggttatgattatggtttattgaagttttgattttttaggtttaagtgatttttttattttagtttttggagtcgttgggattataggtatgttttattatgtttggataatttttttaattttgtggagatggggttttattatattggttaggttgaaagtttttttttttttgagatagagtttttttttgttattaggttggagtgtagtggcgcgatttcggtttattgtaatttttatttttaaatttaagttatttttttgttttagttttttgagtagttgggattataggcgtttattattatatttagttaatttttgtatttttagtagagatggggttttattacgttggttaggatggtttttattttttgattttatgatttgttcgatttagttttttatagtgttaggattataggtgtgagttatcgtattcggtttgaaagtttttcgttaaagtaagaaggaaaaaaagtttagtaagtaatttaaaagttgaaaaataatagtaataattaatatttgtatagtgttttatggttataaaatatgatgtatatttatttatttatttatttatttatttatttatttatttatatttttgagattgaatttcgttttgtcgtttaggtagagtgtagtggcgcgattttagtttattttaatttttgttttttaggtttaagtaatttttttgttttagttttcgagtatttgggattataggtgcgtattattacgttcggttaatttttgtatttttagtagagatagggttttattatgttggttaggttggtttcgaatttttgattttatgattcgtttattttggttttttaaagtgttgggattataggtgtgagttattatatatagttaatgtatatattaatttttataataattttgtgaagtgattgtgataataattttcgtattttaggtgagggaattgaggttggtagaaattgtgatttaaagttagtgaatattagatataggatttgaatttagtttttggggttttaaattttatattttttttattagtttagggttcgttattagtattttaaataatattaaattattagatgaaatatatatgtgtagtagtattagtttttttatgaattatattatgagtaagaagtattatttaagaaattggttattttaattaaagaattaaggttattattattagtaataatttaagttgataatatatggttttgatatgatgtaataaggatatattatttttgcggtgatatatattttagtgtaattttgagaatatattaggtaattttagattgagggagattttataaagtttttgattttttagaagtgtttattgagaaattgttatagattggaagaggttattgagatatgataattaaatgtaatgtggtattattggattatggaataagaaaaggatattagtgtaaaaatttaaatagagtttttagaatttaattagtagtatttagtagtgttaattttttagttttgatagatgtattatgttaaataagatggtaatattagagaaaaatgggttaaaagtatataggaatattttgtattgtttttggaagtattttaaaataattttaaataaaaatttagtaaaatataaataatatttattatttatattggaaataaagatgatataaaagttttttttaaaagaatatggagattttagaaaaagatttgtatttaatttaggttgagttttatgaattattgtgggttaattatgagaatagataaattaaaattatttttttttgttcgtgtatggattaaatttttttatattttttttttttggtttatgatatttaattgaaattgttttttttaaggatggaattttggagaaatgaaaaatgatttttttttttttaatttagtatttatttttttttttttt

SEQ ID NO: 373 - DNA, 7167 bp, Artificial Sequence
  chemically treated genomic DNA (Homo sapiens)
ttgtaaagatgttttatatagtattatttataatagttataaattgttaataatttaaagatttaatgtggaaagaattgaataaataatatagtatattttattttgaaattttttgtagttgttttataaaatgattttttatagagtaggaaaaaagtaagttgtagaatatatgtataggatgttaatttaatgttaataatattattattttattattataatatttaatgttaataataatatattaatatttttttttttatttcgttacgtatttttattttttaaaatatatgagaatatatttaagtaaataaaaaaagtatgaggaaggtaataaaataaagagttatggttatttttgggagatagataggattaggagaaggatatttttattttttattttatatattattgtttttttttattttttattataaatatatattatttttataataaaaaataagtttattttataaaatatatatatatatatatatatatatatatatatatatatatgtgtatatatgtgtatatatatggaatatgtatatatggaatatatatatatatatatatgtgtatatatggaatatagatatatatatgtgtatatatggaatatatatatatatatatatatgtgtatatatggaaatagaaaaaaagtgatttgaaatttgattatatagaagtaattattgttaatatattaatatttttttttttattttttgttatgtatttttaatatattttggattatgcgttatgtaattttgagtttgttttttaataaatataatattgtatttttttatattaataaaaatatattaatataaagtttaaatatattttaattttgaaaataatatatgtttaaaatagaatatttcgagagtaaagaattaaaagagaataaaaattttatgtagttttattatttatagataaattattttaaaaaataatgaaagataaatgtatagaaagggattaataatttttagattgtgtatagtgttttattgatttatgtaaggtttttttttatttttatttattaatttgtttttttatttaatgttaataataattataaaattattaaataataatgggattttaattatataatgatattaattattatttaatatacgagtattagaatgttaattataatatgaatttatgtatattgtttttttatattttgattttatttttttaattttagtgattattatttttaattttttttttgttttttaataaattatttgtatgttatgtgtatgtagttttaaataatatagtgtttagttttatttgtttttgaataatataaaaaggatattttattatatgtagttttttgagatttgatattttaatattttagaagtaaaatttatttatattgttatgtgtagttgtagaatatttatataatgattatataatattttacgtgaaatatattatgatttatttattttttttttgggatttttattattaataatattttagtgtgtattttttagttattttttcgaaggtatttagttttttttttatgaaatatgaatattatacgtattttttgtgatttattttttttattgatgatattttatgaatatatttttattttggtaaatatttttttatgatataaatttaaatgattatatagtattttattagatagttataatataattttttaattattttaattgttagatatatgattgtttgtaatttttttgttgtgatgaatattatgatgtatatggttttgtttggtttagtaattttttttttagaaatttattttaagtaatatttaaatatatttgtatataaatatgtataggaatattacgtagaatgatatagtttgtgttttttatattttatataaagtatgtgttgattatagaagtttttataatataagaaaattggaaggaatttaatgtttattaataggagatggagtaagtaaattatatattaaaattattatatagttgtatagttattgatatagaaagttgtttataatttattaagtgtaagaaagaaataggttaaattgtagtatgattatattttgtataagaaaatatgttagtaaaagtgtttataagagtatatacgaaaatttttatagtgattatttttagatattgaaattatttgagaatttgtttttttttattttgttaatatatattttgaagtgtttttaatagtaaagtttgattttatgtataagaaaaaagatgaatagttttgtgtataattgtttaaatattttttttgaatagaaaatatttgtatattgtaagaatttaaaagaatatatagaagaaaataaaattatatataatgtaatttatttagtaataattagtttatagtttttaatatatttatttttagttatttgttattgattatatattttaaaatagttgttattatattttatgtaattttgtatgttgatgattttttatttaatttataaaatgaatatgttatagtattttaatggaagaatattttattataggtatatggtatatttatttaattattttttgaatgttagattaaggtttttttgttttttattatattaaataattatgtgaggagtatttttgtgtgtgaattatttatattttagataatttttttggatagattttttgaagtggaatatattaaattaaaaagtatatttttatattttttgatataaatttttaaatagtattttatatatattttaaggtaaaatgagtagtagggaaaataaagaggttaaaatagttgggttttatggttattgttagtatttagattagtaaaattgatatataaaaaatttgttttatttaagttataaggttatattgtgagaattaaatgataatatagattttttagagttataataaatattatttttttaggaatgttttttttgattttttagatttttagttattttttttttatggttttaataattgataaataattttttaattatttgtatgttgttttttatagacgattttaagttttattaaaatatgtttggtatatagttagcgtttaataaatatttgttgaatgaatgaggtgatagtattttgtaaagtataaattattagatatttagaaggtatttttattttaattggtattattattgtttttttttgttattatatagaggattttaaatttttagagagtttttgtttaattgtaaaaatttaattatgtggtttttatgttttttatgttagttagaagtatgggtagtaatattgttgaaggtatttggtgggagttgagatttagagaattaattatttggttttttagattagtatgttgggatttaaggagttgtagttattattagtcggatataaggtagtggttaggaatttaggaggttgcgatatttgaagtaggtagatgttggaggttagaaataaattaatggtaagtgttttatatagtaaggtgtaaattggataaaagttagtaaaaggggatttaaatagatagaagagttaaattttaagtattagtattcgaagtatggagttatgaatatgattttgaagtaaagggtaattgaatttagtgtttttttatattttttttgttaaaattgaaaatggtattagaaagtgtttgtatttatttttatatataggtttaagggaatggtagtagttggttggggaataaaagttgtgtatataaatagattttggtagtgataggattaagcgagattatttgtatacgggattgtataatattttatataaaatgtggaagtaattaatttttggattatattattttattatgattttaaatagtagatattatagtatagtggttataattatggatttttataataggttagtcgggtttaaatttggttttattatttagtagttgtgttttgtggataaaatttattttatttttgtgtgttagtttttttatttgtaaaatagggataatgatggtatttagttttaatgggttgttgtgaagattaaatagattaaatgagttaatgtatgtaaggatttgagaatagtgtttggatgtagtaaatgttatgttaagtgttgttgttgttattattattattattattattatattattattattttttggttatgtaagattaatgataaaaattaatattatttaaaatggataaataatattttatatgttaattttatttaaaatattagttttaaataggaattttttttattaaataaaaattttatttagatttaaatatagtaaattgtataaaaatcgtaagtattagtgaagtagtaaaatttattgtagtagttttatttgtttattttgtagaagttttattatggatattatttttaaaagttgtagggattaaatatatattttttaatagtaaaaaatataaattgtagtattgttggtttataagatttggtttataaggaggaatgttttattaaatgtttttgaagttaatttaattagaagtagaaatagttgagttggaagatttttttgtagagtgattttaatatgggaaggtttagataggggaagtttagatttgaaaaggtttggatttggggaaaggttggaagatttggattatagaatatgttagaatatttggatattgtagatattggaagatttgaatgttagaagattagtatattggagacgttggaagatatggatattgagttagttgatggaagattgggtagttgttggaagatatgaagatgttggaagatatagagatgttggaagacgtggagatgttggaagacgagtagatgttggaagttttggagatgttggaagatttggagatataggaagatatggatttgttggaagacgtagtttagttggaagatatatattttttggaagacgtggattttttggaagatatggtttggttggaagacgtggattttttggaagacgtatttttgttggaagatatatttttgttggaagacgtatttttgttggaagacgtatttttgttggaagatataagtaggttggaagatattaatttgatggaagatatggttttgttggaagacgtggatttgttggaagatacggattttttggaagatttggatttttcggaagttatggatttgagggaagataaggattttttggaagatatggatagtttggaagatatggttttgttggaagacgtggatttgttggaagatacggattttttggaagattcggattttttggaagttatagatttaagggaagataaggattttttggaagatatggatagtttggaagatttggaggttattggaagatgtggattttttggaagatatggtttttttggaagacgtagatttttaggaagatttaaattattcggaagatttggattgttgggaagacgtggattttttggaagattgggaggttattggaagatatggattttttggaagatatggattttttggaagacgtggatttttaggaagatatatattggttggaagatttggatttttttcggaagatgtggattgattggaagatttggatttggtggaagacgtagatttttttggaagatattgattgattggaagatttggatttttttttggaagatattgattgattggaagatttggatttttttttggaagatattgattgattggaagatttagatttttttggaagaattagatttattggaagatttggatttggtggaagatatagatttttttggaagatatggattagttggaagatttgtatttgatggaagattttgaaattattggaagatatggattttttggaagacgtggatttttttggaagatttggatttggtggaagattagtaattgttggaagattggatttgttggaagatttgatttattggaagatttggagttttttggaagatatggattgttcggaagatatggattgtttggaagatgtggattttttggaagtttaggattatttggaagattttgagattattggaagatttgaagtcgttggaagattcggagttgttggaagattttgatataggtgttatcggaaattttggatattggaaatattgtaagtataggatattggagatattgtaagttttggattttgaagatattggttattttggatattgatatttttggaggttttgaatattgggatattgaatattggaagttatagatattgaaatttttggaaattagagatattgtaagttttgtattttggaatttttaaatattggtagatataaataatagtagatgtagatatttataaattttaaaatgagaagttttggatattgggagatattggtaagtatggatattgatatatttatgttaaaaagatagtttggaagaattaaattttaaagatgttggatgttaagaatattggtagtttggataatatgagattaggatattaagaggtttatttatttagatattgaggatattgatgtatttgaaagtttttgtaggtatttaaagatttgggtattggaggaattggcgataaaaatatattgtaaaattagaaagtaggagatatttaaaaatgtaaaaattgaatgatgtaagtgttggaagatattgaagaatttagatttaaatattatgaaatatatagtttttagaagatttgtatataggagatattggaggattaggattatggaagatttgtaatttagaattttggattttgaaagataagatttggattttgaagatgggttgttggagatattagaagatttaaatttttaatgatttgaatattgggaagtttagaaaataagggtattggagatgttgtaggatagggattggaatgtacggatgttataatattgggaagatttggtaattaaagatgttggaagttgtggagtttagaagatttgagttagagaaattgaagaatagaaaggtttaattttaatggtattgg

SEQ ID NO: 374 - DNA, 7167 bp, Artificial Sequence
  chemically treated genomic DNA (Homo sapiens)
ttaatattattaagattaagtttttttgttttttagtttttttaatttaagttttttaagttttatagtttttaatatttttaattattagatttttttaatattataatattcgtgtattttagtttttgttttgtagtatttttaatgtttttgttttttaaattttttagtatttaagttattaaaaatttaggttttttaatatttttaataatttatttttaaagtttaggttttgttttttagaatttagagttttaaattataagttttttatggttttaattttttaatgttttttatatataggttttttagaggttatgtattttatagtgtttaagtttagattttttaatgttttttagtatttatattatttagtttttatatttttaaatgttttttattttttagttttatagtgtatttttatcgttaatttttttaatgtttaagtttttaaatatttgtaagaatttttaggtatattaatatttttaatgtttgaatgaatagattttttaatattttggttttatattgtttaggttgttagtatttttgatatttagtatttttaaaatttaatttttttaaattgtttttttgatataaatatgttaatatttatgtttattaatgttttttaatatttagggttttttattttaggatttataaatgtttatatttgttgttgtttatatttgttagtatttaggagttttaaggtataggatttataatatttttaatttttagagattttagtgtttatgatttttaatatttaatattttaatgtttagggtttttagaaatattaatgtttagagtaattaatgtttttaaaatttaaggtttgtaatgtttttaatattttgtgtttataatgtttttaatgtttagggttttcgatggtatttgtgttaaggttttttaataatttcgggttttttagcgattttaagttttttaataattttaaggttttttagataattttgagtttttagaaaatttatattttttagataatttatgtttttcggataatttatgttttttaagaagttttaagttttttagtaaattaagttttttagtaaatttagttttttagtaattattggttttttattaaatttagattttttaggaaaatttacgttttttaggaaatttatgttttttaataattttaaggttttttattaaatatagattttttagttaatttatgttttttagaaaaatttgtgttttttattaaatttaagttttttagtaaatttagtttttttagaaaaatttagattttttagttaattagtgttttttagaaagaaatttaggttttttagttaattagtgttttttagaaagaaatttaggttttttagttagttagtgttttttagaaaaatttacgttttttattaaatttaggttttttagttaatttatatttttcggaaaaaatttaggttttttagttaatatatgtttttttgaagatttacgttttttagaaaatttatgttttttagaaaatttatgttttttagtaattttttagttttttagaaaatttacgtttttttaataatttaagtttttcggataatttgggtttttttgaaaatttacgttttttaaaaaagttatgttttttagaaaatttatattttttaatggtttttaggttttttagattatttatgttttttagaaaatttttgtttttttttaaatttatagtttttaaaaaattcgggttttttaggaaattcgtgttttttagtaagtttacgttttttaataaagttatgttttttagattatttatgttttttagaaaatttttgtttttttttaaatttatagttttcgaaaaatttaggttttttaggaaattcgtgttttttagtaaatttacgttttttaataaagttatgttttttattaaattaatgttttttagtttatttgtgttttttaataaaggtacgttttttaataaaggtacgttttttaataaaggtatgttttttaataaaggtacgttttttagaaaatttacgttttttaattaagttatgttttttagaaaatttacgttttttagaaaatatatgttttttaattaagttacgttttttaataaatttatgtttttttatatttttaggttttttagtatttttagggtttttagtatttgttcgttttttaatatttttacgttttttagtatttttgtgttttttagtatttttatgttttttaataattatttagttttttattaattggtttaatatttatgttttttaacgtttttagtgtgttgattttttgatatttaggttttttagtgtttgtaatatttaggtattttaatatgttttatagtttagattttttagtttttttttaggtttaggtttttttaaatttaggttttttttgtttgagtttttttatgttaaaattattttatagaaaaattttttaatttaattatttttgtttttagttgaattagttttaaaaatatttaatgggatatttttttttatagattagattttatgaattaatagtattgtagtttgtgttttttattattaggaaatgtgtgtttaatttttataatttttaaaagtaatgtttataataaaatttttgtagaataaatagataggattgttgtaataaattttattattttattagtgtttacggtttttatatagtttattatgtttaggtttaagtgaaatttttatttaatgagaaaaatttttgtttaagattggtattttaggtaaagttaatatgtagagtattatttgtttattttaaatgatattaatttttattattggttttatatgattaaagaataataataatataataataataataataataataataataataatatttaatatagtatttgttatatttaggtattgtttttagatttttatatgtattaatttatttaatttatttaatttttataataatttattgaagttaggtattattattatttttattttatagatgaggaaattggtatatagaggtgaagtaaattttgtttataggatataattattaaataatggagttagatttaaattcggttagtttgttgtgagagtttatgattgtaattattatgttataatatttgttgtttaaaattatgatagaatgatgtgatttaaaggttgattgtttttatattttgtgtagaatattatataatttcgtatataaatggtttcgtttgattttgttattgttagagtttgtttgtatgtatagtttttattttttaattagttattattatttttttggatttgtatatggaagtaggtgtaaatattttttgatattatttttagttttggtaggaagaatataaggaagtattgagtttaattattttttgttttagaattatatttatagttttatgtttcgagtattggtgtttggaatttaatttttttatttatttgaatttttttttattgatttttgtttagtttgtattttattatgtggagtatttattattagtttgtttttaatttttagtatttatttgttttaaatatcgtaattttttgggtttttggttattgttttgtattcgattaatggtagttgtaattttttaaattttagtatgttgatttggagaattaagtagttggttttttaagttttagtttttattaggtgtttttagtaatgttgttatttatgtttttggttggtatgaaaagtatgaaaattatataattaaatttttatagttaggtagggattttttaaagatttaaaattttttatgtgataataaaaaggaataatgataatgttaattaaaatagaaatattttttgaatgtttaatgatttatattttataaagtgttgttattttatttatttaataaatatttattgagcgttaattgtatgttaggtatgttttgataaagtttaaaatcgtttgtgggaaataatatatagataattggaaaattatttattaattgttaaggttatgaagaaaaagtaattgagagtttggaaaattaaggaaagtatttttaaagaagtaatatttattgtgattttgaagaatttatattgttatttggtttttataatatagttttgtgatttaaataaaatagattttttgtatattagttttattaatttgagtgttaataatagttatgggatttagttgttttgatttttttattttttttgttatttattttgttttaaaatatatatgaagtattatttgaaaatttatattaagggatataaaaatgtattttttggtttagtatattttattttaaggaatttgtttaaggaaattatttaaaatgtggataatttatatataaagatattttttatatagttatttggtatagtgaaaaatagaaaaattttagtttaatatttagggaatgattaagtaaatgtgttatgtatttatgatggaatatttttttattaaaatgttatggtatatttattttataagttaagtgaaaaattattagtatataaggttatataaagtgtgatggtaattattttaaaatatataattagtgataaatgattagaagtaaatgtattggggattgtaaattaattattattggatgggttgtattatgtatgattttatttttttttatatatttttttaagtttttataatgtataggtattttttatttaggaaaaatatttaaataattgtgtataaaattatttatttttttttttgtatatggaattaagttttattgttggaaatattttaaaatatatgttagtaaagtgaaaaaaaataaatttttaaataattttagtatttagagataattattgtaaggattttcgtgtatgtttttgtaggtatttttattagtatatttttttgtataaaatgtaattatattgtaatttaatttattttttttttatatttaataaattgtgaataattttttatgttagtaattgtgtagttatgtaataattttaatatataatttatttattttattttttattggtgagtattaagttttttttaatttttttgtattataaaaatttttgtgattagtatatattttatgtaaggtgtgaagaatataaattgtgttattttacgtggtgtttttgtatatatttgtgtgtagatgtgtttgggtattatttaggataaatttttaaaaggagagttgttgagttaaataagattatgtgtattataatgtttattatagtaaaaaaattataagtaattatgtgtttaatagttggggtggttagaaaattatattgtaattatttaatggaatattgtgtggttatttaaatttatattatggaagaatatttattaaaatgggaatatgtttataaggtattattagtgagagaaataggttataaaaaatacgtataatatttatgttttatagaaggaaaattaaatattttcgggaaaataattagaagatatatattaaaatgttgttagtagtaaaagttttaaaaagaaaatggataaattatggtatattttacgtaaaatattatatagttattatatgaatgttttatagttatatataataatatgggtagattttatttttagaatattaagatattaagttttaaaagattatatatagtaggatattttttttatattatttaaaaataggtaaaattaagtattatattatttagggttatatatatatagtatataaataatttattaaaaagtaaaaaaaaaattgaagatgatggttattggggttgaggaaatagggttagaatatgggaggataatgtatatgaatttatattatggttaatattttagtattcgtgtgttgggtagtggttggtgttattatgtaattgaaattttattattatttaataattttatgattattattaatattaaataaaaaggtaagttaatgagtaaaaataaaagagggttttgtatgaattaatgagatattgtgtataatttaaggattattaatttttttttgtatatttgttttttattattttttaaagtaatttatttgtgggtagtaagattatatgggatttttatttttttttggttttttgttttcgaaatgttttattttgaatatgtgttatttttaaaattaaaatatatttaaattttatgttaatgtgtttttattgatataggaaaatataatattatatttattgaaaaataagtttaaaattatatagcgtatgatttaaaatatgttgaaaatatataatagggagtgaaaagaaaagtgttgatatgttaataatagttgtttttgtgtagttagattttaaattattttttttttgtttttatatatatatatatatgtgtatatatgtatattttatatatatatatatatgtatttatattttatatatatatatatatgtatatatgtatattttatatatgtatattttatatatatatatatatatatatatatatgtgtatatatatatatgtgtgtgtgtgtgtgtgtgttttatagggtgggtttattttttgttataaaagtaatatatgtttatagtaaaaagtaaaaaaaagtagtagtgtataaagtaaaaagtgaaaatattttttttttaattttatttattttttagagatagttatgattttttgttttgttattttttttatattttttttatttatttgaatgtatttttatgtgttttagaaaatgaaaatacgtaacggagtgagaagaaaagtgttgatatgttattattaatattaaatgttataataatagaataataatattattaatattaaattaatattttatatatatattttataatttgttttttttttgttttgtagaaagttattttataaaatagttataggaaattttagagtagggtgtattgtattatttatttaattttttttatattagatttttaggttgttaatagtttgtagttattatagataatgttatataaagtatttttataa

SEQ ID NO: 375 - DNA, 7904 bp, Artificial Sequence
  chemically treated genomic DNA (Homo sapiens)
aaaataatttagaggatattttttattgggagtgggttaggagcgttggtttttacgttaaggagaggagggtgttgttgtggttgtagaggtgagtttatagggaagcgtgggtgttatggagaaagagagaggagaggaaatggtttttcgttggagttaagtagagaggaataaaggaggggaggagtttataggttttggagttttagagtagttttgggtggtttttttttttttttttttagtataaaataagttgtttttttaggttttttttttttttcgtgtttattttatttttttttttttaagtttaagttttggtttattaaggatttttatgtgaaatatttgtgttagaatttttgttttgatttttaggtttttagaggaggaaagttgtggaggagggattttatgagttagtaatttttatttaggaattttttattttttttttttgagacggagttttattttgttatttaggttggagtgtagtggtatgaaatcggtttattgtagttttcgtttcgttggtttaaatgatttttttgttttagttttttgagtagttgggattataggtgtttgttttcgtattcggttaatttttgtatttttagtagagatggttttgttatgttggttaggttggttttaaatttttgagtttaagtgatttatttgttttggttttttagagtgttgggattataggcgtgagttattatatttggttagttttgatagtagaaattttttttttagaaatatttatatatataaggaattttgtatatatttttatagggtttagggagttttttaagtttgtttatgaatttttgttatttatttatagtatggtgttagttgtagagtaataggatttatgtgggtttggaagtttaataggtttgggtttgaattttttttaaatatttttgtttgttagtagttggtttggataaataattttaatttagtttttttatttgtgaaatagggggaaaaagtatttattttgtagggttgttgtgaagattgaataagataatttatgttaaatatttaggtatcgtgttcgtttgtagtaggtagttagtatatggtggatttcgtgttttaagttttttttttatggagttttttaagttgttttagttggtttcggattttttttatttttattttttgggtagttgggattatagtacgttatgttttagttttttttgtgattatttaaagtcgtttggttttttgtatttttttatatttattgtaatttttatagaatttaaatttttttaatttggtgttgtaggttatttataatttcgatttaagtagtttgtttttttttttatattattgttttttatatgtatgttttatattaatttacgttattcgttggttttaaatatatttgaagtattataaggttttacgtttggttgtttgttttgtgttttttttattattttttaaggttcggggaaagttttgttatttttttgaagttaagtgtttattcgtttttttattttaggttgtttttttacgttgtgtgtttttagttggatggtagttttttagggtaaggaataatttttttttttttttagtgtaatttttaaaatatagtagaggagcgtgtattgggggtaaaggttggtatagtaaatatagtagtatagggttgttggaggggtggaggggatcggaggggatagtgatttgtttgttttataatatatggttgggagttttattttttgtttatggaagttatgtgttttgagtttgattttttcgggtgtagagtgtttacgttatttatatttttttattcggtttaatgtacgggtacgggtaggggtagggttagaatttgttgttgtagaatatagtagagttgtttgtagtattgtggacgttattaaattggtagttttattgaaggtgattttggtttgtgtgggtatttagttgatgtttttttttttttttttaagttttattagttttaggtttttattatttgtattgagagaaagattaatggtgagtattagagtaaaatttagtatagaaggtagggttttagtaaaaaattaaaagtatggtagattagagtttaagggtttataggtgggtaggatagtagaggaattgggtagtttagggtggtaggatggggtggataggagtggataggagagagtagttaggaggagggacgtggttgtattattagtttacgtgggcggttggagatttggtaggaggttaggagagattgtgttttttttagtttggttgttttggttaagttttgatggtagttaggaggattgtgagaaagaaaataagataaattttgttatttttggttggttaggggaagtttgtgttggaaaagaagaagttatagattttattgtttcgttgttttttttttttatattttgggacggtttagtattttttagtttatttttttttgttttttgttattttttttattattttagtgttttttttttttttgtttaggttttttagggagttaagtttgagagtttagggaggtttataagaggaaatgatgttcggaaagagtagtattattttattttttgagatggagttttttttttgttatttaggttggagtgtaatggtgtaattttggtttattgtaatttttgtttttagggtttaagtgatttttttgttttagtttttcgagtagtagggattataggcgtttattattacgtttggttaatttttttgtatttttggtagagacggggtttcgttatgttggttaggttgatttcgaatttttggttttaagtgattcgttcgtattagttttttatagtgttgggattataagcgtgagttatcgtgtttagtcgagtagtattattttaaatggtatttttgttttatatttgtgtttgtatttttatataaggtaggaagggagtagaagatattttgttagtattggttgggttggagatttaggaaagggagtttggggttgtgggggtgaagttggtttatttgttttttttagtggaaggatgaagataggagtatttgtagggttttatttgttgggttttttattgggggattgtattttttgttttatttaatttttttgataattttttatttgatgtttataaaaattttgcgaaataagtgttatttaaaatatttttattttatagatgaggagatggaagtttagaaaggtttgaagagtcgtttaaagttaagaggttagttgggatttgaatttacgttatttttattttgaagttagtgttttttgtttgtttgttttttttaaggtattagttttttttaggggattttgttttatttttttttttttttatagtttttttagtttttttttttttttatttttattttgagtgttattagtaagttaagagtaagattagatggtagttattagttgtacgtggttaattatattattataattaattaaaattaaagttttaaatttttggtggttaaatttgttttatgtggttagtggttatcgtatcggatagtatagataggaaatatttttatttttttgttggtttgaatttaaagggcggttaggaggtagagggaatgggagagattagtttaaggggtttagggatagagttgtttttgtgaggagatgaggtttgggaagtgagtttgggtgaggggagtaggggtgtttgaggtttgggggaggagagggtagtttgttggatttgtaggtattttttttcgatattgatattttcgtaatattagtgagtaattaattggttggggcggggtaggggttagagtaggagggaggttaacgtaatggaggagaagttattatttttttagtagatggtagggtttcggtttttttggtttttttttattttttgaggattcgggagtttgtttggtttttttcgatttgtttagagttggttgttgttttttgttcgtttatttagtttagggttagtagatgggttacggggttattatttttttaattagtttttttagttttttgtttatttttgaggtttgggttattagttatggggaggggttgtgagtggtttgtgagtaattaaggtttagttttgatagaggttattagtttaggttttttttttggttgagttttggtttttagtatttttttttattttcgttattatgtcgtttttagaggtttttagaagcgataggttagggagttggttttgggaatgtggtgttttatttttgagaaggagaaggttttttaggtgatggaatacgtaataggtatgtggttggtttggtatttggggagtggtgggagggggagtttgggggatgggggtagaatttatatttgaaggaggaaagtggaggtggagtgatggggttttaaggaaggagtagattaggggttgtgaatgggattttattggggttgggtgggtggggttggagcgggtatttaagtgtggaagaaaaagttgaaatatttacgattgcgagtggagggtagatggagagataggttaagttacggtaggtaggagagttaaggagttaggtagttgggtttcgtggtaagagtggtcgttttagagtgggtggtcgtggggtagagcgtttggtttcgggttaggtaatgaggagtcggggttaggtttgttaggtggtaggatcgttagagtttcgtggttatgggtattttatattgtagttattgttgttgttgagtaggtagatgtatcgggttgattattacgtttttttcggttatattaatttttttcggggtatttattttttttatttttttttttttttttatagtgatttttgtttagggaatgtttagttttggtataaaggatttaggtgttttcgagttgttattagttaggaggtcgtgtagttcgagatgggttcgtttcgggtattttggatggggcgtgtgggtgggtacgggatgatggtattgttgttggttggtttttttttgttaggtaggaggttgggggttttgggaataggagggaggcgggagggagatttcgggagaggatttagcgaaggggacgggtaggggttttggaatttgttttttgagtttgggggttgttttttattgtatggtcgttttaggtaagttttttaaattttttgagttttagtttttgaaattttgaagtggggttaatgatatttatttttagtttgtgtgttttaaattaaataatgtatgtgatatgtattttggaaattttagaggtttatataaatggtggtggtgatttttattatgggagtattataagataatgattggatatttaatagtaataatattatttttagagtttttttatatgttagattttgttttaagtatatttggattatatattagaatttttatttttattttttttgtgagatggagttttattttgtttttaaggttggagtgtagtggcgtaatttcggtttattgtaatttttattttttaggtttaagcgatttttatgttttagtttttagagtagttgggataataggtgtttattattatatttggttaatttttttttttttgtatttttagtagaaatagggttttattattttggttaagttggttttgaatttttgatttaagtgattcgttcgtttcggttttttaaggtgttgggattataggtatgagttattatattcggtttatattagtatttttgattattataagaacggtatgaaaagagatttgttatttttattttatagatgaggatattgaggttcggagaggttaggaaattagtttaaaattatgtattagaaggtagtaaagttaagattttaattttaggttaggtaatttttggatttgtgttgttgattatcgggtatttatagtttttgaggaatttttgcgatttttttatggtttagtgggtggttggtgtttgagggaatagcgaaagagagaggtaatgtatggtggattcgtgtagaggattgaagggaattggtatagttggggttcggcgtggaggtgtatgtagagaatttttttttgaggagagaatagggatattatagaggatggtagtttggttgttggtggagggattaggatgagtggtagtaataatttataatatataatgttttatattttttaaaatatttggtcgtatatgatagtttgtgtttgtaattttaatattttaggaggttaaggtaggtgaatcgtttgaggttaggagtttaagattagtttggttaagatggtgaaattttttttttattaaaaatataaaaaattagttgggtgtggtggcgggtatttgtggttttagttatttgggaggttgaggtaggagaatcgtttgtattaaggaggtagaggttatagtgagttgagatcgtgttattgtattttagtttgggtaataagaaattttattttataaaaaaaaaaaaaaaaaaaaaaaagaagaaaaaatttttaggtggatgattttatttagttttttttatagtaatgttgtgggaaggtagggaaaatttggtttttttgaatgtataaattaaagtttagagaggtttagtaatttgttagtatgtggttttgtttgtaatacgtgggatttggaggggttagggaaggtagaaggaacgtaggtgaaagagttatggaggaattatggggtaagttgggtttggggttttgagtaaaggaaaggaaagataaggaaagatgtggttttatatttttgagggaagttaaggtagtagaagttagatgaggggttggatagaggtaggtgtgtttagagagggaagttgattgtggttaggagtttcggaggttcgtggggtttcgttttggttttttgggttgggttagcgagagtagggttggtttagggtgcggtgttttgatatattggtattagtaggttttgaagtaataggtagtgattttatattttggtttttatttagttttattggtatggttagtgttgagataggaaatagggtttttatttttgattttagtttgggtttttacgaagaagttggtgattaaattttagttttcgagtgtttttttttttattttagtttttttgtttttagttttgtttttttttagtgtttttttttatatgtgtttttattttttagttttttattgttttgttttttgtttttttttttttggttttattgtttggtttaggattttttttttaagaatttacgtttggattttttagagttttagtttttttaattttttgtttttttagggtttttttttttagatttatttgtttttgttttttttttatttttttttttttttaaaaaaaattttaattaaaaaataaaatatagatggggtttatgttgtttaggttggttttgaattttggggcgtatgtaatttttttattttagttttttaaagtgttgggattatcggcgtgagttattgtgtttagtttttttttatatttaatgtatttttttgaggttatttattttggtacgtaattttttatttttttggttggtgtttgtttattttttttaaataaagaaatgtttttattcggttattttaatattttttagagataatagttagtttttttttttttttttatttttaaattttttttgcgttttgtttgggagaaattcgagaggtcgattattgagataaggtagaaaggtgagggaggaagttaagtttttttggtttttattaattattgtttttttttatagg

SEQ ID NO: 376 - DNA, 7904 bp, Artificial Sequence
  chemically treated genomic DNA (Homo sapiens)
tttgtggaggaaagtagtggttagtaagggttaaggaggtttggtttttttttttatttttttgttttattttagtaatcggtttttcgggttttttttaagtagagcgtagggagagtttagggatggagaaaggaggaagaattggttattgtttttaaaggatattgaggtggtcgaataaaggtatttttttgtttgggaagggtgggtaaatattaattagaaaaatagaaaattacgtgttaaagtgagtgattttaaaggaatatattgaatataagagggggttgggtatagtggtttacgtcggtaattttagtattttgggaggttgaggtgggaggattgtatgcgttttagagtttaagattagtttgggtaatatagattttatttgtattttgttttttaattaaaattttttttaaaaagaagagggaatggagaaggggtaggaataaataggtttaaaagaaaggattttgaagagatagagaattggggaaattgaggttttgaggagtttaggcgtaaatttttaggggaaaaattttgggttagatagtgggattagagggaagaagataaaaggtaaaataatggagggttgagaagtggagatatatatagaaggagatattggaaaaagataaagttgggggtagaggggttgaaataaaggaaagggtattcgaggattaagatttggttattagttttttcgtgagagtttaggttggggttaggaatggaaattttattttttattttagtattggttatgttagtaaagttgggtgggggttaggatgtggggttattatttgttgttttagaatttgttggtattagtgtgttaggatatcgtattttgagttagttttgttttcgttggtttagtttagggaattaggacgaaattttacgaattttcgaggtttttggttataattagtttttttttttgagtatatttgtttttgtttagttttttatttgatttttgttgttttgattttttttagggatgtggagttatatttttttttatttttttttttttttgtttaaaattttaggtttaatttattttatggtttttttatgatttttttatttgcgttttttttgttttttttagtttttttaggttttacgtgttataaatagagttatatattagtaagttattgaatttttttgagttttagtttatatatttagaggggttaaattttttttgtttttttatagtattattatgaagaaaattaaatgagattatttatttggaagttttttttttttttttttttttttttttttttttgtgagatggagttttttgttgtttaggttaaagtgtaataatacggttttagtttattgtaatttttgtttttttggtgtaagcgatttttttgttttagttttttaagtagttgggattataggtgttcgttattatatttagttaattttttgtatttttagtagagagggggttttattattttggttaggttggttttgaatttttgattttaggcgatttatttgttttggttttttgaagtgttgggattataggtataagttattatgtgcggttagatgttttagaaagtgtaaagtattatatattatgaattattattgttatttattttgatttttttattaataattagattgttattttttgtgatgtttttgttttttttttagaaagaaattttttgtatgtatttttacgtcgaattttagttgtgttaattttttttagttttttgtacgaatttattatgtattgtttttttttttcgttatttttttagatattaattatttattagattatgggaaggtcgtagaaattttttaagggttataagtattcggtggttaataatataggtttaggggttgtttggtttggggttgaaattttggttttgttgttttttaatgtatgattttgagttagttttttaattttttcgagttttagtgtttttatttgtagagtggaaatagtaaatttttttttatatcgtttttgtaatgattaaaagtgttaatataggtcgggtgtggtggtttatgtttgtaattttagtattttgggaggtcgaggcgagcggattatttgagttaggagtttaagattagtttgattaaaatggtaaaattttgtttttattaaaaatataaaaaaaagaaaattagttaggtgtggtgatgggtatttgttgttttagttattttagaggttgaggtatgagagtcgtttgaatttgagaggtggaagttgtagtgagtcgagattacgttattgtattttagttttggagatagagtgggattttattttataaaaaaaataaaaataaaagttttaatatataatttaaatgtgtttaaaatagagtttagtatataaaaaggttttaaaaatgatattattattattaaatgtttaattattattttgtagtgtttttataataaaaattattattattatttatataaatttttagaatttttaaagtatatattatatatattatttaatttgagatatatagattagaggtaggtgttattaattttattttagaattttagaaattggggtttaggaagtttaagaaatttatttgaggcgattatatagtgaggagtaatttttagatttaaaaggtagattttagagtttttgttcgtttttttcgttgggttttttttcggagtttttttttcgttttttttttgtttttagggtttttagttttttatttggtaggaggagattagttagtagtagtgttattatttcgtgtttatttatacgttttatttagggtgttcgagacgagtttatttcgggttgtacggttttttgattgatggtagttcgaggatatttgggttttttatgttagagttggatattttttgggtaggagttattgtggggagaggaggagaggtggagggggtgggtgtttcgggggaagttggtgtggtcgggaggagcgtggtaattagttcggtgtatttgtttatttagtagtagtagtggttgtagtgtggggtatttatggttacggggttttaacgattttgttatttgataggtttggtttcggttttttattgtttaattcggaattaggcgttttgttttacggttatttattttggggcggttatttttgttacgggatttagttgtttggttttttaatttttttgtttatcgtggtttggtttgtttttttatttgttttttattcgtagtcgtgggtgttttagtttttttttttatatttgggtgttcgttttagttttatttatttaattttaatgaggttttatttatagtttttgatttgttttttttttaggattttattattttatttttattttttttttttaaatatgagttttgtttttattttttaggtttttttttttattattttttaagtattaggttagttatatatttattacgtgttttattatttggggaatttttttttttttagaaatggggtattatatttttaaaattaattttttgatttgtcgtttttgggggtttttggggacggtatggtggcgggggtgggggggggtgttgggagttagggtttagttaggggaggggtttgggttgatgatttttgttaaagttgggttttggttatttataggttatttatagtttttttttatggttggtaatttagattttaagggtgagtaagaggttaagaaggttaattgggaaggtggtggtttcgtagtttatttgttggttttgggttggatgagcgagtaggaagtagtagttagttttgggtaggtcgaggagggttaggtaggttttcgggtttttaaaggatgaaaggaggttaggagaatcggagttttgttatttgttgagagggtggtggttttttttttattgcgttggttttttttttgttttggtttttgtttcgttttagttaattaattgtttattagtattgcgggagtattagtatcggagggaggtgtttgtaagtttagtaagttgttttttttttttttaggttttagatatttttgttttttttatttaaatttattttttaaattttatttttttataaaggtagttttgtttttgggttttttgggttggttttttttattttttttattttttgatcgttttttaagtttagattagtaggaggatggaaatgttttttgtttgtgttgttcgatacggtagttattggttatatggagtaagtttaattattaaagatttggagttttaattttaattaattgtaatgatgtggttggttacgtgtagttagtggttgttatttagttttgtttttgatttgttagtgatatttagaatgggagtgggaggaaagaggggttgagggagttgtggagagaggaagggataggatagggttttttgaagggggttaatgttttgggaaaaataaataaataaaaaatattggttttagaatgaagatgacgtgggtttaagttttagttaattttttggttttgggcggttttttaaatttttttgaatttttatttttttatttgtgaaatgggggtattttaaataatatttatttcgtaaggtttttgtgaatattaaatgggaaattattaaaaaggttaaatgggataaggggtgtagttttttagtaggaagtttagtaaatggagttttgtaggtgtttttgtttttatttttttattgggggagataaataggttagttttatttttatagttttaggtttttttttttgagtttttagtttagttaatgttagtagagtgttttttgttttttttttgttttgtatagaggtgtaggtataaatgtgagatagagatattatttaaagtgatgttgttcggttgggtacggtggtttacgtttgtaattttagtattatgggaggttgatgcgggcggattatttgaggttaggagttcgagattagtttggttaatatggcgaaatttcgtttttattaaaaatataaaaaaattagttaggcgtggtggtgggcgtttgtaatttttgttattcgggaggttgaggtaggagaattatttgaattttggaggtagaggttgtagtgagttaagattgtattattgtattttagtttgggtgataaaagggaaattttattttaaaaaataaagtgatgttgtttttttcgaatattatttttttttgtgggtttttttagatttttaggtttggttttttggaggatttgggtaaggagggagggggtattggggtagtgaggggagtggtagagggtagggaggagtggattagaaggtgttgggtcgttttagggtgtgaggggagaaggtagcggaatagtggaatttgtggtttttttttttttaatataaattttttttgattagttagaggtagtaaagtttgttttgtttttttttttatagtttttttggttgttattagaatttggttaagatagttaggttggaggaggtatagttttttttggttttttgttaggtttttagtcgtttacgtggattggtggtgtagttacgtttttttttttggttatttttttttgtttatttttgtttattttattttgttattttgggttgtttagtttttttattgttttgtttatttgtgggtttttgagttttaatttgttatgtttttggttttttattgaaattttgttttttgtgttagattttattttggtgtttattattaattttttttttagtgtaggtggtgaagatttaaagttaatggggtttaggagggaagagaagggtattagttgagtgtttatataggttagggttatttttagtgaagttgttagtttggtgacgtttatagtattgtaggtagttttgttgtgttttatagtaatagattttggttttgtttttgttcgtgttcgtgtattggatcgggtgagaaagtgtgggtggcgtagatattttatattcgagaaaattaagtttaaagtatatggtttttataggtaaaaggtggggtttttagttatgtattatgaagtaggtaggttattgtttttttcggttttttttatttttttagtagttttgtgttgttgtgtttgttgtgttagtttttgtttttagtgtacgtttttttgttgtgttttggaagttgtattgagaaagaagagaaattgttttttgttttgaggagttgttatttagttggggatatatagcgtaagagagtagtttagagtggagaagcgggtaggtatttggttttagggaggtggtaggatttttttcgggttttgaggaatgatgagagaagtatagagtaggtagttagacgtggggttttgtggtgttttaggtgtatttagaattagcggatggcgtgggttggtgtgggatatgtatgtggaggatagtggtgtgggagaagggataggttgtttggatcgggattgtagatgatttataatattaggttaaaagaatttggattttataggaattgtagtaaatgtgagagggtgtagggaattaaacggttttgaatgattataaagggggttgaagtatggcgtgttgtagttttagttatttaggaggtggaggtgggaggaattcgaggttagttggggtaatttgagggattttataaagaggaggtttggggtacgagatttattatgtattgattgtttgttgtaggcggatacggtgtttgggtatttaatatgagttgttttgtttaatttttataatagttttatagggtaagtgttttttttttttgttttatagatgagaaaattaagttgaaattatttgtttaaattagttgttaataagtaaaaatgtttgaaaaagatttaaatttaggtttgttggatttttaggtttatatagattttattattttgtagttgatattatgttataaatgaatggtagaggtttatggataggtttaagaggttttttaaattttgtaaggatgtgtgtaaaattttttatgtatatgaatatttttagagagaagatttttgttgttaaagttggttaggtatggtggtttacgtttgtaattttagtattttgggaggttaaggtaggtggattatttgagtttaggagtttgagattagtttggttaatatggtaaaattatttttattaaaaatataaaaattagtcgggtgcgggggtaggtatttgtaattttagttatttaggaggttgaggtaggagaattatttgaattagcgaggcggaggttgtagtgagtcgattttatgttattgtattttagtttgggtgatagagtgagatttcgttttaaaaaaaaaaagtgaagagtttttaagtgaaggttattggtttatgaggttttttttttatagttttttttttttgggggtttgagagttaggatagaagttttagtataagtgttttatataggggtttttggtagattagggtttaggtttggaagaaggaaaatggagtgagtacgaggaagagaaaaagtttggaaaagtagtttattttgtgttgaggagagaaggaaaggggttatttagagttgttttggggttttagggtttgtgggtttttttttttttttgtttttttttgtttggttttagcgagaggttatttttttttttttttttttttttatgatatttacgtttttttgtggatttatttttgtagttatagtaatatttttttttttttggcgtggaagttagcgtttttggtttatttttagtaggggatgttttttgagttgtttt

SEQ ID NO: 377 - DNA, 6270 bp, Artificial Sequence
  chemically treated genomic DNA (Homo sapiens)
attagtatagtttgagtcgagtttgtggagagagttagggtttgaggagtttgatgggagggtttgggaggtaaggttaggtttatttagttggatagagttatttgagaagaagagttagttttaggaggaagagtaggaggattattggattaggataggggaaaaaggaaaaagtcgttaaggtatgtataagtattttttggtattttgggttaattgttagaggaagttgatgggattagttttagtttttgttttgtgtttttgtttttatgggtcgtttttttggttgcgtgttttgggatagtattattttagagttagtattgttggtagatgtagggtaagggcgggagtaagggggtggtggaggggtagtggtgttaagatattattttttattatttggaatattgtgaggatataggtaggtaagatgtcgttatttttagttttggtttgacgttaatatttttgttttgtggttgttatttttttagataggttggaagttcgttatttaatagggacgttgagttgggaggcgggttatttaatagttgtgtgtttttgggtaagttattttatttgtttagtattttgagaaagaaagagagttggatttaattttaaatagttttttaattttttaattttaggttgttttaaaaggtagaggttgttagttttgtttaagttttatatgtgttttttgggttttttttttttagtatatatatttttttttttttttttttggattgttttaggtttttttttgttgttttatttgagtatgttttgttttttattttttttattttatgaaggtatttgttttttaggagtattttttttttttgtgatatttgttgatttttttaatttggttaaatgggtaaatgtgggtttttttttgggtaataaatatttatttttaatttggttatttttcgttttaattttgttagttattttaattttaggagttttatatgttttgattttagggaatttgggaatattttgaaagttattgaaattgtagttgtttatgtatttatttattaatgtggttatacgataaatttttttgtgattattttgttaaagattttgttatatgttgtggaaatagtaaatttttttttgatttttttaagttagtatagattttaaatatttttttttattgtttttataaagatatttatttgtgttaatttgtttgtttttttttttttttttgagacggagtttagttttgttgttaggttggagtgtagtgacgcgattttggtttattgtaatttttgttttttaggtttaagagatttttttgttttagtttttcgagtagttgggattgcgggtacgtgtcgttatatttagttaatttttgtattttttttttttttagtagagatggggttttattttgttagttaggatggttttgatttttcgatttcgtgatttgttcgttttagttttttaaagtgttgggattataggtgtgagttattgtattcggttttgttttttattttaatttaggaaatatggttattatagttgaagaggtttaaaagatgtaattgattttatttttaaagagtaaatagtttgttaggggaacgaagttaaggatacgtacggtatatatatgtgtgcgttttttggttttatagattatttatgttttgttggaattattgtttgtgggtttttttgttgggtagtgagttttattggcgagggttaaatttaatatatttttagattttatgtagtgttttatgagtatttatatgtttaaaaatgtttgttaaattgacgtattatattaggtagtaggtagtgtttgtttaggagatatagataaaattgtaatgagaggttagaggaagagaagaaggagattttatatttattaagattagatgtatgatatatattatgttatttatagtttaaattaaataattttatgaaggaggtattattattgttattttgtaaggaagattaagtaatttgttagggttatggagttggttagtgacggaggttagatttgagtttagtttttttttaatattttatagttatgtttagttatttttttattgggaaagttttgatttattaaggaggtggtattggaaggaggtttgttataaagttattaagataataaatatgtattattttagttaatttaaagaggtagtaattgtagtggttaaggaaaaatgattttgttgattcggtagagtttttttttttttttgagtaagaattttttagtcgttgattggtattgttttttttattttttatttttgtttagagtttttttttttgtttagagttttttttattttattttgatatttagagttttgtttgttttagttaaatttttgttattgggaaatattgaggttagtatgttagtaacgttagtattagtcggggaggttagggtagagatttattttattatggttaaagttgttgatttttttattttttgcggttttgtttgtatattttttatatttttttgtgtttagtttattgaagttattgatgtagatttttttttttttacggtggttaaatgagggttaggaaggtttttcgagttatatagtaatttttttttatttttttagttagagacgaattaggtattttttttggatgattttgggtagtttagttttttagttttgttttttttgtttataaagtaggaataaaaatattgtttgttttgtttattttttcgtataatttatagggaaagagtatgaaaaagtgtaggttttaaggattgaaaaagtattaatttattagaaagtataaggtttatttattattattattttaaagtaggggagggaatagaatttttttttatggagataaggttttggatttagtattggtaggttgtttattttttttggaattgtattgtaagattttattttagttaggttttttttttttttttttagatgtttcgtaggagtttgtcgagagttagcgttgtgagaggttgttttttgttgtttatttgagttcggattatagtagtttttcgagttcgaaatattggggttaatattgttatttggtggttaatataagtattgttattaaattgagagtttagttttgaaatggagaaatttttttaatttttgatatttgtttttgggttatacgtagatttttttatattaggttattgtgtttttagataaagtatatttggttatgttttaagttatgtatagagagtatttggggtaggtgttggggtagggaggatgtaaggaatatgttaatcggaatatgttaattagaatatgtatttttaaaattttaatgtttaatgcgatatatattttttttgtatttgttttattgtggtttatttatagtgaattattttttgtttggtttaatttataaaaatttttggtttttttggggtatttatagtatttgttggttataaaagagttagtaatatttttatgtgtttttttttttttttttttaattggatttataattttttttggagatgaaatttaataggtaaaagtagtattagagtaggtgtttttgaaaggaggtagtggggagtttttaaaggaaagagaaaagggaagaggagagttagtatagaataaagaattgtagagagggagttatgggttttttttggagattttaaaatagagttttaggaagaggtgatgatataagaggttttttaaattttataagaggaagtagatttaagagatacgtattggagattagagagcggttatgtaaaaggaaagatagtaaacgagttgtagtaagtttttaagttttgtagtttaggtataggaaattagaggtagagttttaggtttagggtgaggggcgaagtattagtttgagttttttgtagtatagagtagttggaagagagaagtgttggagttatcggaggattatggttgtttatttcgagggtagtaatttgtttaggtttgcggtgtaaggtttaagttttgattaggtgttttggttaagtttagggagttaggaagtgtattaggttgttagaggtagttagggttggaaacgtattaatatgtgggttattgtatagtttttgtgtaaaaatttagtaaatgagtatgttttggagtattacgtaggttcgcgtgtagagtttgtttttaggatttattattattttttagattttttaaaaaataaattttggtttatatttagagaatgttttgggaggtggggttataaaagaaatttttttttgggggtaggtggagtttagtagtaggggagagttagaggaaggcgtgttaagggaggaggtgagatttaattgagggtaggtattggaagagggttttttttttttattttaatttggaattttattttgtatagaatttttttaaagtcggagggaggaggttgtttagagtggggtgttgttttttgcgaggatttggagttttttggttttttagtagggagtggagaggtatttttagaagtattagtttcgggtatttttagaattttggtttggtttttgattaaggagtgtttttaattgttgaataggttaggagtcgtttttttttaaggtttatatttttttttttggggtgtgttttgtttttttttgagttattttaaggggagagaggggaaaaaagggaagagaagagaggtattgattatagaggaaggaaaaggaagtagagtagaggggggagagaggttatataggagtgggtgatagaggagattgtagagggtaggtttagggtagaagatcgagagagggtaggtttaggttaggaggaggtagagagagggtagtcggagtattttaaggggtgttttaagagtaggtgggggcggggagtcgagggggcgggtcggttatgttttacgggatttattacgagtgtgagtttcggggtggttagtagttattcgagtttttagggggtcgagttgggttcggggagttaggggatatgtgtgagtatgaggtttttattgattttttcgtttatatcgagtttggggaagagtagttttttttcgatttttttgtcgtgaagttagcgtttgaggttagaggttttaagggtttcggaatttttgtttttttttattatttgtcgtttgattttcggttttttgtttattttttatatattttcggtttagataggaaggcgttggggtttggtatttatagtagtttagggagttacgattttagggttgtggcggtgaaggaggagtttcgggggttagagggtagtcgagttgttagtcgaggtagttataattttttgtagtattaagtggtatattgtgggtagatagttatgtatttgtttttaattttggtagtattcggttagtttttgcgcgtttttaaggtaagagtaggttagttttttttttttttgttcggggttggagaggttggtgtggataggattttgtgtttcggtttatgttgttgagtttgtgtttggtgtcgttttgtgaaatggatttaatttatagttttttgtgtttatattttattatgatttttttttttttttttgtgaatttatttttattttgaatttttatttaaagtttttgtggtaagttgatttatttgattttaggtttttatcgttagtttttttgttgtttattatgttttttttttttgtttttttgtcgtttgtttttgtgagaaatgtttattggttatagaacgggagatttaaggtagattgagggaaagtgtatttagaaagtgtgagagtattggttgggtgtcgtggtttatgtttgtaattttagcgttttgggaggttaaagtaggaggttcgtttaaggttaggggttggagattagtttggataatatagtaaggttttatttttataaaaaaagaaagaaagaaagtgtgagaatatgaaagggagttttggttttaagtagaggattttgtgtatttgggttattattttttagaagtagagcgatgatagttttgatttgagagataggagttggttttgagttttgtatttttttgacgtattaagtgtgttttggttgtcgagattttcgtttcgttttcgttttgttttttggttagtttttattttttcgttttttcgtgtttttttttttagg

SEQ ID NO: 378 - DNA, 6270 bp, Artificial Sequence
  chemically treated genomic DNA (Homo sapiens)
tttggaggggaaggtacggagagacggagaggtgagggttggttaggaggtagagcggaggcggggcgggaatttcggtagttagggtatatttgatgcgttaaaggaatataggatttagagttagtttttgttttttaggttaaaattattatcgttttgtttttgggagatggtgatttagatgtatagggttttttgtttgagattaaaatttttttttatgtttttatattttttttttttttttttttgtaaagatggagttttgttatgttgtttaggttggtttttaatttttggttttaagcgaattttttgttttggttttttaaagcgttgggattataggtatgagttacgatatttagttaatgtttttatattttttgagtatatttttttttaatttgttttgagtttttcgttttatgattagtagatattttttatagaagtaggcggtagagaaataagaggagggggtatggtgagtagtagagaggttggcggtgggggtttgagattaagtaggttagtttgttataggggttttgggtggggatttagggtgggaatgaatttatagagaaggaaagggaggttatggtggggtgtgaatatagaggattgtgggttgggtttattttatagagcgatattaagtataggtttagtagtatgagtcggggtatagggttttgtttatattagtttttttagtttcgggtaggagggaggagggttggtttgtttttattttgagaacgcgtagaggttggtcgggtgttgttagagttgggggtaggtgtatggttgtttgtttatagtgtgttatttggtattgtaggggattgtagttgtttcggttggtagttcggttgttttttggttttcggggttttttttttatcgttatagttttggggtcgtagttttttgggttgttgtagatgttaggttttagcgtttttttgtttgggtcgaaggtatgtggagggtaggtaaagggtcgagggttaggcggtaagtagtgggggaaggtaggggtttcggggtttttgaggtttttggttttaggcgttggttttacggtaaagagatcggagagaagttgtttttttttagattcgatgtaggcggagaggttaatggaggttttatgtttatatatgttttttagtttttcgggtttagttcggttttttgagaattcgagtggttgttggttatttcggggtttatattcgtagtaggtttcgtgggatatggtcggttcgttttttcggtttttcgtttttatttgtttttgaggtattttttggggtgtttcggttgttttttttttatttttttttgatttgggtttgttttttttcgattttttgttttagatttgttttttgtagttttttttgttatttatttttgtgtggttttttttttttttttgttttgttttttttttttttttttgtagttaatgtttttttttttttttttttttttttttttttttttttggggtgatttagggaggggtaggatatattttagagggagagatgtaagttttagagaaaggcgatttttggtttatttagtagttggggatattttttggttagggattaagttagggttttggagatgttcgaagttgatgtttttgggaatgtttttttattttttgttgggaggttaggggattttaaattttcgtagagggtaatattttattttgagtaatttttttttttcgattttgaaaaagttttatgtagaatgaggttttaagttagagtgaagagagaaagtttttttttagtgtttatttttagttgggttttatttttttttttgatacgtttttttttggtttttttttgttgttgggttttatttatttttaagagaaagttttttttgtagttttattttttagagtattttttgagtgtaggttagggtttgttttttgaggggtttagggagtagtgataggttttaggaataagttttatacgcgagtttgcgtggtgttttagagtatgtttatttgttaggtttttgtataggagttgtgtaatagtttatatgttagtgcgtttttagttttagttatttttagtagtttggtatattttttaattttttgggtttggttaaagtatttggttaggatttgggttttgtatcgtaggtttaggtaggttgttgttttcggagtagatagttataatttttcggtggttttagtattttttttttttagttgttttgtgttgtaagaggtttaggttggtgtttcgttttttattttgggtttgaggttttgtttttggttttttgtgtttgggttgtagggtttaggagtttgttgtagttcgtttgttgtttttttttttgtatggtcgttttttgatttttaatgcgtgttttttgggtttatttttttttgtgaggtttgagaagttttttatgttattatttttttttggggttttgttttagggtttttaggagaagtttatggttttttttttgtaattttttgttttgtgttggttttttttttttttttttttttttttttgggaattttttattatttttttttagagatatttgttttggtattgtttttatttgttgaattttatttttaaaagggattgtaggtttagttggggggggggggggaaggatatatagaaatgttattgatttttttatgattagtaagtgttatgggtgttttagagggattagaagtttttgtaagttgggttaaataaggggtggtttattgtgagtgggttatagtaggataagtgtagagaggatgtgtgtcgtattgaatattaaaattttaaaaatgtatattttgattagtatatttcggttagtatattttttatattttttttattttaatatttattttagatgttttttgtgtatgatttgagatatggttagatatgttttatttgaaagtatagtgatttggtgtggggagatttgcgtgtaatttagagatagatgttaggaattagggagatttttttattttaaagttgagtttttagtttggtggtagtgtttgtgttgattattaggtggtaatattggttttaatatttcggattcggagggttgttgtggttcggatttaggtggatagtagagggtagttttttatagcgttggttttcggtaggtttttgcggggtatttggaaggaggaagaggaaatttggttgggatggggttttgtagtgtagttttagggagaatgagtagtttgttagtattgggtttagggttttgtttttatgaggagaaattttgtttttttttttattttgaaataatgataatgaataggttttgtgttttttgataaattaatgtttttttaatttttgaaatttatatttttttatgttttttttttgtgggttatgcgggaaggtaggtaaggtagatagtatttttatttttattttataaatagggaaaataaggttgagaggttgagttatttaaggttatttaaggaggatgtttggttcgtttttggttgaaaggatgggaaggggttgttatgtgattcggagaatttttttggtttttatttggttatcgtggggagggggaagtttgtattagtagttttagtgaattgggtataggaggatgtgggaggtatgtaaatagagtcgtaggaaatgagaaagttagtagttttagttatggtgagataaatttttgttttggttttttcggttagtgttgacgttgttggtatgttgattttagtgttttttagtaataggggtttggttggggtaggtagggttttggatgttagggtagggtagggggagttttggataggaaggggagttttggataggaatgggaggtggggagggtagtgttagttagcggttgggggatttttgtttaggagaggaaagaagttttgtcgggttagtaggattatttttttttggttattgtagttattatttttttggattaattgaaatgatgtatgtttgttattttagtgattttgtaataggtttttttttagtgttatttttttggtgaattaagatttttttagtaggaaggtaattgagtatggttgtgaagtgttaagggagaattgggtttaaatttggttttcgttattgattagttttatgattttggtaagttatttaattttttttgtaaggtggtagtagtaatattttttttatagggttgtttaatttaaattgtgaataatataatgtatgttatgtatttggttttagtaaatgtgaagttttttttttttttttttttgattttttattgtagttttatttgtgttttttaaatagatattatttgttgtttggtgtggtgcgttagtttgataaatatttttgagtatataggtatttatggggtattgtatggggtttggggatgtgttgggtttagttttcgttagtagggtttattgtttagtaggaaggtttataggtagtggttttaataaggtatgggtggtttgtagagttaggaagcgtatatatatgtgtgtcgtgcgtatttttggtttcgtttttttggtaaattatttgttttttgagggtagggttagttatattttttggatttttttaattatggtgattatattttttgaattaaaatgaaggatagggtcgggtgtagtggtttatatttgtaattttagtattttgggaggttgaggcgggtagattacgaggtcgggagattaagattattttggttaatagggtgaaattttatttttgttaaaaaaaaaaaaaatataaaaattagttgggtatggcggtacgtgttcgtaattttagttattcgggaggttgaggtaggagaattttttgaatttgggaggtagaggttgtagtgagttaagatcgcgttattgtattttagtttggtaataaagttagatttcgttttaaaaaaaaaaagaaggataggtaggttgatataggtgaatatttttatggagataatggaagaaaatatttgaagtttgtgttgatttagaaaaattaggaaaaaatttgttatttttatagtatatagtaaagtttttgatagaatggttatagaaagatttgtcgtgtgattatattaataaatgaatgtataagtagttataattttagtgatttttaaaatgtttttaaattttttgaagttagagtatgtgaaatttttaggattaaagtgattggtagggttaagacgggaaatggttaggttaaaagtaaatgtttgttgtttaggaggagatttatatttgtttatttgattaggttgaaaagattagtaggtgttatagaaagagaaggtgtttttgaaggataagtgtttttatggagtagaagggatgagggataggatatgtttaaatggggtaatagggaggagtttggggtagtttagggaagggaaaggaaaggtgtgtgtgttgggaaagaggggtttaaagggtatatgtgaggtttggataagattggtagtttttgttttttgggataatttaaagttggaagattgaggaattgtttgagattaggtttagtttttttttttttttaaaatgttaagtaggtgaggtgatttgtttaaggatatatagttgttgagtggttcgttttttagtttagcgtttttgttgaatggcgagtttttagtttgtttggaagaatgatagttataaagtaggagtgttggcgttaggttaggattgggagtggcggtattttgtttgtttgtgtttttatagtgttttagatggtgaagggtgatgttttaatattattgtttttttattatttttttattttcgtttttgttttatatttgttagtagtgttggttttggaatggtattgttttaggatacgtagttaggagggcggtttataaagatagggatataaagtaaggattggggttaattttattaattttttttagtagttagtttaaaatgttaggaagtatttatatatattttaacgattttttttttttttttttgttttagtttagtggtttttttatttttttttttagagttaatttttttttttagatggttttgtttagttgagtgaatttagttttattttttaggtttttttattaagttttttagattttgattttttttatagattcggtttaggttgtgttgat

SEQ ID NO: 379 - DNA, 6915 bp, Artificial Sequence
  chemically treated genomic DNA (Homo sapiens)
tgtttttttataaatataatatgaggagatgtttaggttgttagtaatgtttttagttatttgagtaaataggtttttggttaaagggggaggttcggtaatttttgatttatgtgtttatagaatgatttaaagattcggaattgttgttgggatgattttttggtttgagttttttttatgatatataaatttattttagttttttgattgttgttttgtaatgttatggagtaatttgtagtttatataggtagattcggttttaagatagtaagatttataggattgtaagtgtttgttttatagttcggttttgttggcgttttgatgagtaagattggttttagttttagtgatgatcggttagtgaattgtgttgtgcggttttagtaagttattgttagggttttggaggggtaaatagggtatgtatatataattttgtattggtagtttgtatagtattttgtaggattagagattgtgagataggttgggtttacggatgttaattgataaatattaaagtatatggttatagttttttttggggggtagaggtttggttttgatttataagattttttttttttgatttagtatgaattttaaattaagttttaggtaaagatttagaaggttatagtatatataaggttggttattttttgggttataaattgaataggtgattcgattgtaagtataagtttttaggtgagtttttgtatatttttaataagtatagaataatagagttttagttatattgttttttgattttgtagtgtgtgtataatggggatattttttaagggtatttattttaatatggttaaggggggtgataatagtaaaataatgtatagcgtatttatatttagtaaggatagaagagggttttgtttgggggaggagattgagtatagtaacggaataatagtaaaatagttagtattataaggaagattattagttttaagatttttaattatatttatttgtttgacgagtttttaagtttcggtcgtgcgtagattagttagtttcgggtgtgtgattagagcggggtttgtttttttaagttttagtcgtgcgttgattggttagttttacgagtgattagagtagggtgatcgtttttagtagtagtttgttgtttttttaggattagttgggttggatgatttgtgttttgttggttggtttattcgttttgagttgtcggttttagtcgattgtggtggatttaagatataatatttgtaattttaatagtaacgggagtggataagatgatagtatagggtttattttatatgggttttagagaagttggattttattttttaatttaaatagagtttttagatttaaaggggcgtattggtttattaggtttataggtatttttttttgtatttagttatggattttttgtatggttatttttaaagtttgtatttgtttttttaaggttaatttttttagtttttggagattatttttaatttgatttatgatttggggttggttaattgaataaaattttatagggtaaatatttagtttgtttggtgggggtgtatttgtttcggaggaggattataggtaaaatttgaatttattttagatgagttttttggtaatatttttttagtagttgtttgagtgtttattttatgcgttttatttttttttaattatgtagttaataggttgtgtgtaatttttattttatttttaatagttttgttaaatttcgtattattttagttataaatgtcggtttattgtttgattgtaaagatagaggtagtttaaatttggggataatattttttaatagtattttagttatttgttatgttttttttgttttggtggggaaagttttaatttattttgaaaaagttgtaaataaatattagaatatatcgatagtttttggtacggggtatttcgtttaagtttataaggaagtttttataaggtatggtttttttttttgttttgttttttagaggaggggtttttttttttttttttttgtaattttatataatagtttagttattagcgagaaatttggaatttagatacggtagaattttgttgtttttaatttttaatgtgattatagatttttggaggtttagtgagaaggagttcggtttgttttagtttttatattttttagtttttgttagtttaattagattagtatttggtttttttaaggtacggtagtttttggttaatggttttttgttttattacggttttggttattttttttattgttttttggatatttatttttttagtgttttttttttttttttttttttttttgtattttttatattgatttttttttagttttggttagtttttaaatttttgtttaatttgattttttttacgtttatatttgcgtttatatttttttatatggttaatttttttttttataagggttgttgttaatagattcgttttttttttaagttttttatttgttttttttttttttttttagtttttttgtttttgtagtcggttggtagggttgggtaaggataaatttgaatataaaatttagtgtgtttgttgtttattagttttttatgtttggagaagagagagatgtttttttttttttttttttttatttatttaaaattttcggttttttaaagtttttcgtgtttgttttttgttttaaatttttttggtgtatgataataaatttcgggtatgtagattagataatgtagtcgttttaagggatttgagtgaggaaggaatgaattaatggagtttaggggggttttagagtatttaaattatttaggatgatattatggggattaagggagagttttttttttttttttttgaaggattattgaaaaattattgatagattgttttataggagaaaagtatatatatttgtttaatgcgtatatacgggagtttttgaaatggagatttaattttttaatagagtatagagtttagatattattttgaggttttataaagaatgtgggtttagagtatggttaaaattaggttaggggttgggcgtagtggtttataattgttattttagtattttgggaggttgaggcgggtagattatttgagtttaggagttcgagattagtttggttaatatggcgaaattttttttttattaaaaatataaaaattagtcgggtgtgatggcgggcgtttgtaattttagttatttgagaggttaaagtaggaggattttttgagtttaggagtttaagattgtagtgagttgttattgtgttattgttttttagtttgggtgatagtgagatttgttttaaaataaataaaaaaattttaaatttgtggattttgggtgattatgatatgttaatgtaggtttataaagtataatagttgtatttttttggtggggtatgttgattaatgggggagattgggttggggcgaggatatacggaaattttttgtaatttttttttaatttgttgtgaatttaatttgttttaaaaatgtatatatataaaaagtggggttttttttttttttttttttgttttagtttttttttttattttttttttttttttgttgttttttttttgttttttttttttttttttagttattgtaaatgatattgtagtgaatattttggagtataaagggtatgttttttagtttagaattattttttttatttagggtaggtttttagaattagagtagtcgggtaaaggtttgaggtaaatgtttttgttttggggcgttttagttatttgtaggttttttattttttgtggtcgagtttttttttttattttttcggtttttttttagtttttttcgtttattaggttttttgaattgttgggtatcggttgtggtcgatagaagagggatagacgtggttttgtaggtttattcggttttttggtatcggtcgtaggggtggtagaacgggagtgtggttggtgtgggaagtataggttttagtgttttttgggggattgttgggtgggaaggttttggttgtttttattttgtttttattattgtagagggttgtgcggtggttggagttgttatcgagcggtttcggtgagggtgattttatattggttgagtttataggttttattttaagattttgttcgtggtgtttttttattttttagagttttttttggttttaggattaatatttgtttatagaaaatacgagtggttttttttttttttataattttatacgatttttttttttttttttcgttggttttttttttttttttgttattttgtttgggtatgttttagggttttggttgtgttttttttttttttagggaagattataagtttgggttagatgttttcgtatttttttatttatatttttgagtttttagtttttttttttaggatgtattaggttggatggtgatatttttttatttttgaatgagacggttttatgttgttttggggattcgtatttagtttggattgtttgttttatggttttaggaaaagtttcgtatagataaggtacgttatttggtgggggtttatagtatgttattttttttggttttagaagttattgtttggttttttgtgaagtttttggggatttaggggataggtagggtatggagataaagtagtgtttttttttttgatagtgatattaagtttcgtgaataaattagaaggtagggtattgtgtattttgttcggttttattattttttttattattcgttattttgttatttgtttttgtttttaggtaagtggtaatttgtataggtgtattgtgggttttgggaaaattggatttttttgtatttgagggggtagaggggagggagttttgagagtttatgaataagtatgtgattttggatttagttttataaatattcgaggtttagggggagggttatttagaggttgatgtttattatggggcgtttgtaattggttgtgttgggttttatttgttgttgggtagtggcgagtgtcgcgaaggtaagagtttagtagaggggtaggttttgttgttttttcgtttaattagatttggaaatttcgggttaggttgagaaagagtttagtatagtttcgtagtagatttcgggtatttacgtttatttttatggggataggtgttaggtagaacgtaggatgtttaattttatttgaattttagataaattgttaagaattgttgtgtaagtatgttttatgtaatatttgaaataaatttttatgggtcgggcgtagtggtttatatttgtagttttattagtttgggaggtcgaggtgggtggattatttgaggttaggagttggagattagtttggttaatacggtgaaatttcgtttttattaaaaatataaatattaatcgggcgtggtggtgggtgtttgtaattttagttattcgggaggttgaggtaggagaatcgtttgaagttgggaggtggagattgcggtgagttgagattacgttattgtattttagtttgggtgatagggcgagattttgttttaaaaaatagaaaaagaaaaaaatgaaatatattaaaaaataatttattgtttatttgaaatttaaatgtaattgggttttttgaatttatatttgttaattttggtgattttatttattaatttttttgttgtttttattttatagaaggggaaacgggtttaggggtagggagtgtggagagtaggtagacgggtggagagaagtaggtagtagtttgtttagtatggtatagttgttgttttttatttttgtgtaggaagttgaaagtcgagttattttatatcgggttcgggtttttttagaaagagagtcggtaggtaggagttttttcgaggtatttataaattttattttttttgtttgtgaaggagaagttatagaaattttaagttttataggaagtcggtgtcggtgttcggtttagtttttgtttttagtaggagttatataggggttttagattttaagagtgttttgcgttgcgtgttttaggttttggggatttttgtttttatttttgttgtttgttttttatattttttggttttgggatcggaggtttgggtatggttttgggtttttgatttaaaggataggttattttttttttgggcgagttttttttggggtgttgagaggttttcggtaggttattacgatttttttttatttttttattttgaggtttttaggatggataagtttaaataaagtaatttttacggtttcgttagaagtaaagtttgttgtgttgggtttagtgatagttaggttagcggtttttttttaagtagttattgggttttttaggggttcgtttagggttttggagtataatgtagatttcgtattatttttggttgatggattggaatttagttttgagagagggagttttttttttattagtttttttagtggtttttaagtttttttttttttgttttaggttttagtaaagagagagaggagagggaggggttgtcgttgaagaggatagatttggtttttagatagtggtttttagtttggggatcgtgtggtagggttggagatatttgtgattgttatagttggggagggggtgtttttggtatttcgtggtcgaggtcggggatggttttaaatattttatagggtataggatggtttttgatggtgtagaattaattttgttcggaatggtttatagattagagaagggaggatatagttaattttagttttgagaggtaaggggcggtttagggaaaattgggaggtataagaatttgttaatttgttggtttttttatttaga

SEQ ID NO: 380 - DNA, 6915 bp, Artificial Sequence
  chemically treated genomic DNA (Homo sapiens)
tttgggtgggagagttagtaggttagtaggtttttgtattttttagttttttttgagtcgttttttgttttttagggttggaattggttatgtttttttttttttgatttatggattatttcgggtagggttgattttgtattattaggggttattttgtgttttgtaggatgtttagagttattttcggtttcgattacgaggtgttaggagtattttttttttagttgtgataattatagatgtttttagttttgttatacggtttttaggttgagagttattgtttaggggttagatttgttttttttagcggtagttttttttttttttttttttttttgttggggtttgaagtaggaaggaggaaatttagaagttattgagggaattgatggagaaggagtttttttttttagggttgggttttagtttattagttaaaaatggtgcgaggtttgtattgtattttagagttttggacgggtttttagaggatttagtggttgtttgaagggaagtcgttggtttggttgttattgggtttagtatagtaggttttgtttttagcggggtcgtgggggttgttttgtttgggtttgtttattttgagggttttagggtggggaaatggggaggggtcgtgatgatttgtcgaaggttttttagtattttaagaagagttcgtttaagaagaaggtgatttgttttttgagttaggagtttaggattatgtttaaattttcggttttagggttagggagtgtggagagtaggtagtagaggtggagataggagtttttagggtttgagatacgtagcgtagaatatttttgggatttgggatttttgtgtgatttttgttgggggtagggattgggtcgggtatcgatatcggttttttgtggggtttggggtttttgtggttttttttttataggtagagagggtggaatttatggatgtttcgagagagtttttgtttgtcggttttttttttggagggattcggattcggtgtggagtagttcggtttttagttttttgtataggaataggaggtagtagttgtgttatgttgggtaaattgttgtttgtttttttttattcgtttgtttgttttttatattttttgtttttgggttcgtttttttttttgtaaaatgggaataatagagaggttggtaggtggaattattaggattagtaaatgtaaatttaagaggtttagttatatttgaattttaggtaaatagtgaattgttttttagtatgttttatttttttttttttttattttttgagatagagtttcgttttgttatttaggttggagtgtagtagcgtgattttagtttatcgtaatttttattttttagttttaagcggtttttttgttttagtttttcgagtagttgggattataggtatttattattacgttcgattaatatttgtatttttagtagagacggggttttatcgtgttggttaggttggtttttaatttttgattttaagtgatttatttatttcggttttttaaattggtgggattgtaggtgtgagttattgcgttcggtttatagaaatttgttttaaatattgtatgggatatatttatatagtagtttttggtagtttatttgaaatttaaatggaattgggtattttgcgttttatttggtatttgtttttatagaaatgagcgtgagtgttcgggatttgttgcggggttgtgttgggtttttttttagtttggttcgaagtttttagatttgattgagcgagagagtagtaggatttgtttttttgttgggtttttattttcgcggtattcgttattgtttagtagtaggtgaggtttaatataattagttgtaggcgttttatggtgagtattagtttttgggtggttttttttttgggtttcgggtatttatggagttggatttaaggttatatgtttgtttatgagtttttaggatttttttttttttatttttttaggtgtagggagatttagtttttttaaaatttatagtgtatttgtgtaggttattatttatttgggagtagaggtaggtggtaaggtggcgggtggtaagggggatggtggggtcgggtagggtgtatagtgttttgttttttggtttgtttacggggtttggtgttattgttagagaaaagggtattattttgtttttatgttttgtttgttttttaggtttttagaggttttataggggattaagtagtgatttttgggattagagagggtgatatgttgtgggtttttattaagtggcgtattttatttgtacgaagttttttttggggttatggagtaagtagtttaagttgggtgcgggtttttagagtagtataaagtcgttttatttaagggtggggagatgttattatttagtttgatgtattttgggagggaggattagaggtttaggggtgtgggtgggggggtgcggaggtatttagtttaaatttgtggttttttttgaggaaagaaaggatatagttaaggttttggggtatgtttaggtagagtgataggagagaaaaggaggttagcgggagggaagggagaaggtcgtgtgaggttgtggaggaagaggaggttattcgtattttttgtgaataggtattaattttggagttaggaaaggttttgagaagtgaaagaatattacgaataaagttttaagatggggtttgtaagtttagttagtgtgaggttatttttatcgagatcgttcggtggtagttttagttatcgtatagttttttgtagtgatgggaatagggtgagggtagttagagtttttttatttaatagttttttaggagatattggggtttgtgttttttatattaattatattttcgttttgttatttttgcggtcggtgttagggagtcgagtggatttgtagagttacgtttgttttttttttgtcgattatagtcggtgtttagtaatttaggaggtttagtgggcgagggaggttggggaaaggtcgggagggtgggaggaggagttcggttataggaaataaggggtttgtaggtggttggggcgttttagggtaaaggtatttgttttagatttttgttcggttattttagttttgagaatttgttttaaataaaggaggtaattttgaattgggagatatgttttttgtgttttaggatatttattgtagtgttatttatagtggttaaggaggaaaggggaaggtagaggggaggtagtagggagaggaaggaggtgggggagagggttggggtaggggagagggaaaggaaggttttattttttatatatatatatttttagagtagattaggtttatagtaaattagaagaaggttatagagagttttcgtatgttttcgttttaatttagttttttttattagttaatatgttttattaggggggtatagttgttatattttatgaatttatattgatatgttataattatttagagtttatagatttagggtttttttgtttgttttgagataggttttattattatttaggttagagggtagtggtataataatagtttattgtagttttgaatttttgggtttaagggatttttttgttttagttttttaagtagttgggattataggcgttcgttattatattcggttaatttttgtatttttagtagagagggagtttcgttatgttggttaggttggtttcgaatttttgagtttaagtgatttgttcgttttagttttttaaagtgttgggatgatagttgtgagttattgcgtttagtttttaatttagttttggttatgttttgagtttatattttttgtggaattttaagatggtatttaagttttgtattttgttgagaagttgggtttttattttaaaggttttcgtgtatacgtattaaataaatatgtatgttttttttttatgagataatttgttagtgattttttagtggttttttagagggagaaggggaaagtttttttttggtttttatagtattattttgaatagtttgaatgttttaaaatttttttgggttttattgatttattttttttttatttaaattttttgaagcggttatattgtttggtttatatattcggggtttgttgttatgtattaggaaaatttaggatagggaataaatacgaggaattttaggaagtcggaggttttaaatagatagaagagaagaaaaagagaaatattttttttttttttaagtataaaggattggtgggtagtagatatattgaattttatatttaggtttgtttttgtttagttttgttagtcgattgtaggagtaggagaattaaggaagggaaaaggaagtagatgaaaggtttaagaaaaaggcggatttgttggtagtagtttttatagaaagagaaattagttatgtgagaggatgtggacgtagatgtggacgtggaagaggttaagttagataaggatttaagagttgattaaggttagagagggattaatgtgagagatgtaaaaaaaaaaaaaaaaaaaaagggggtattggaaggatgaatgtttagaaggtaatgagggaaatggttaaggtcgtggtgagataaagagttattggttaagggttgtcgtattttagaggaattagatattaatttgattgggttggtaggagttgaaggatgtgaggattaggatagatcgggtttttttttattgggtttttaggagtttgtggttatattagaagttgaaggtagtaggattttgtcgtatttggattttagatttttcgttgatggttgagttattatatgaagttataaaaagaggagaaaaggaattttttttttgggaaatagaataggagaaggagttatgttttgtgaaaatttttttatagatttaaacgaaatgtttcgtgttagaagttatcggtatattttagtgtttatttgtaatttttttaggataggttgaagttttttttattaggatagaaaaagtatgataaatgattaaagtattgttaaaagatattatttttaggtttggattgtttttatttttatagttagataatgggtcggtatttgtagttgaaatagtacgagatttaataagattgttaaaaataaaatggaagttatatatagtttattggttgtatagttgaggaaaagtggaacgtatgaagtggatatttaagtagttattgaagaaatattgttaggaagtttatttgagataagtttaggttttgtttatggttttttttcgagataggtgtatttttattaaataaattgagtatttattttatgaggttttgtttagttggttaattttaaattataggttaaattaaaggtgatttttaggaattagaggaattaattttaagaaagtaaatgtaggttttaggaatagttatgtaagaggtttatggttgggtataagaaaggatgtttgtaagtttgatagattagtgcgtttttttaaatttggagattttgtttgggttaaaaagtggaatttaatttttttaggatttatatggggtgggttttgtattgttattttgtttattttcgttgttgttaaagttgtaggtgttatgttttggatttattatagtcggttgaaatcggtagtttaggacgagtggattagttagtaggatatagattatttaatttagttgattttgagaagataataagttgttgttgaggacgattattttgttttggttattcgtgaggttgattagttaacgtacggttgaagtttaaggagataagtttcgttttagttatatattcgaagttgattagtttacgtacggtcgaagtttgaggattcgttaagtaagtaaatgtggttagaaattttaggattagtagttttttttataatattaattgttttattattgtttcgttgttgtgtttaatttttttttttaggtaaggtttttttttgtttttgttggatatgaatacgttgtatattgttttgttgttattattttttttgattatgttaaaataagtatttttagaaagtgtttttattgtatatatattatagggttaggaaatagtataattaggattttattattttatatttattaggagtgtatagggatttatttaggaatttgtatttataatcggattatttatttaatttgtgatttaggaaatggttagttttatatatgttatgattttttaagtttttatttaggatttggtttgaggtttatattgagttaaagaaaggaagttttataaattaaagttaagtttttattttttagggggggttatagttatatattttgatatttgttagttaatattcgtgaatttaatttattttataatttttggttttatagggtattgtataaattgttagtataaaattgtatgtgtatattttgtttgtttttttaaggttttagtaatagtttgttggaatcgtataatatagtttattgatcgattattattgaggttaaagttaattttgtttattaaagcgttagtaaaatcggattgtaagataagtatttgtaattttgtaaattttattattttagagtcggatttatttatatggattataggttattttatggtattataaagtagtagttaaaaagttaaagtaaatttatatattataaagaggatttaaattaagaagttattttagtagtaatttcgagtttttaagttattttatgagtatataaattaaaagttgtcgagtttttttttttagttaaaaatttatttgtttagatggttgaaaatattgttggtagtttaggtatttttttatgttatgtttgtggagggata

SEQ ID NO: 381 - DNA, 6317 bp, Artificial Sequence
  chemically treated genomic DNA (Homo sapiens)
ttgatagtaagagatatgttaatattttgataatttttttttttttttttttttgaggttgagtttcgttttgttttttaggttgtagtatagtggcgtgatttcggtttattgtagttttttttttaggtttaagtaatttttttgttttagtttttcgagtagttgggattataggcgtatattattatttttggttaatttttgtatttttatttttattgtttttgagacggagtttcgttttgttgtttaggttggagtgtagttgtacgatttcggtttattgtaagtttcgtttttcggggtttatgttatttttttgttttagtttttcgagtagttgggattataggtattcgttattatgttcggttaattgttttgtattttttagtagagatagggttttattatgttagttaggacggtttcgattttttgatttcgtgattcgtttgtttcggttttttaaagtgttgggattataggcgtgagttattgcgtttagttaatttttgtatttttagtagagacggggttttgttacgttggttaggttgattttgaatttttgattttaggtgattcgttagttttagttttttaaagtgttaggattataggcgttagttatcgtttttagttgataatttttttttaaaggttatgaaataattagaattttttttaagtaaagatcggtttgtatggttttagtttatagggtttttttaagggttttgtattattttgtaaagtaatgattgtttgaaatttaaaaatagtattttatattatttgttaatttttatttagggtaatttaagtttttttaagagtaaaattataatgtagaattattttattaagtttttgaaaattttaatgtgtttttaatgataaaattttttttgtgtgagtagaaaataagttgattagaagtaaattattttattttataggatgtagaatggagatttatagaatagtgttatttgttgtgattttaagagaaataatgtgtatataatagaatataattataattaataagtaatggttgatataaaggtaatttaggaaatgtaaagattagttaatttatatagtattttataattaatgatatattgtagattttaataatttatagcgtggtaaaattattttgtaaatattgttgttatttatttgtatattgtaagtatattttattaatttttttattatggtttatatagtatagatagtatttttattggaggataattttttattagaaaaggatatttaaatgaatttttttaatagagggattaatatttggtagtaaggagtaaaagaaaaaaaattatattataaaaaaaaattaaaattataaaattaagtttattttattttagtaaatattgttataattgtgattatgttatattttttagaagaaatttattttttatgtgtaatttttttgataaaattatatgatagttatttgttaatatttttatttttgatttttgtagaataaataataaatgtttttgtaaaagtttttagaatttaagtaattttattaagtttaagtttttttattatttttttatgaaatattttaaatatatagagaaattgaaagagtattgttaataaatatattaatgaattagatttaataattgttaatattttgtcgtatgtatttaattattttaatttttttatgattaataattttaaagtatttataaatattataagatattttatttttaaatattttgatatgtatattttaagagtaaggataaattatatagatataattatattataatatttaagaaaattttataattttttaatattatttgaaaattaatttttttatttttatttattgtttaatgttttttatagttattttgttttgaattagattttaattaaagtttatatattgtatttggtttttatatagtgtttttgagttttttttatttttttttttttttttttattatcgtttttatagatttattgaggtataatttattgtaaaagttattattttggttaggtgtggtggtttatgtttgtaatttagtaattcgggaggtagaagttagaggattatttgagtttaagagtttaggattagtttgggtaatataggaagattttatttttataaaaaattaaaaaaaaaaaaattagtagggtgtggtggtgtatgtttgtggttttagatatttacgaggttgaggtaggagaattattttagtttagtaggtagaggttgtagtgggttttgattgtgttattgtattttagtttgggtaattaagtaagattttttttaaaaaaaaaaaggtcgttttttttaggggtatagttttaattaggaattttgataaatagatatagttatgtaattattatcgtaattaagatatagaatatttttagtatcgtaaaaagtttttttttatttttttatagtttttttttttttattttttttaatttttggtaattagcgatttgatttttttttatatagttattgatgtttagttttttttatttagtatagtgtttttaagatttatttatattgtatattagtagtttgtttttattgttgaagagtattgtattgtattgaggtatatttgtttatttatttattaggatagatgtatatgttaagttgtggggtgggaatgaatatagattaatttttaagtgttagtttagttgtgaatatttttgtgttaatatttaatggaagatattttggtagtaaatatttatattatagttatttgatggaaattaaagatttaaaataaaatattttttgaaatagttttaagatttataaattttaaattatgtatttaaaattataagtaacgaaaagttttttttattttttttttaagttaaatttttggatattttatgtttttatatatatatttaattatgtatatgttaatatttttatatattgatatgtaaatatatatatgtatatatattttttaattaggtaagtagttgtgaaagaaaattttaagattgttttagtagtttataagaagtaatttttgatgtattttggggggagatttataacgataaatttgggtttttaaataaatattattttttttattaattagtaattttattttaggatattaaaattatggtgggttattaagtattataataagtatatatggaagtaaaacgtttttttggaaattgtggagtttttataattgtttttataagagtattgttttattttttttagaatagttaatttttaacgttttttgtggtttgttttttgtagtagtataagttattgtattttaaattttttaaaataagtgtgggatttagtttttagtggaagtaggaggatataattttatatgtgggattttatatttataatcgtgtttgttaaaattttttatttagaggtaaagagtgtagtgattaagagtttagttgtggagtgagaatttttgggataataatttattttattatttagtggtgatgtgattttgggtaagatatttagttttttgtgttttagtgtttttgtttataaaataggaatattaattgttttttttaatgtatgtaaagtattttagaattgggtatagagtatgtagttaataaatgttagtgtttattattatttattttaaatgtgatagtattaaattataagttggattgattggtaaaattgttaaatatagtaaaaaattttttataatgattttaatagttttattattgaatttttattatgttttaaatattgtgtttagattttaataggaattatttaattataatattttaattattttaatagtatttttattttgtagataagagaattaaggaatagataatttagttgtttataatggtagaattaatggaatggagtgtaatttaggtttaattttagttagagattatagtttttttttttttattaaaaaaataaataaaataaaaaaattggtttttatagttgatagtatttgttaaagtattatatgttttaaaaatttattagtttaatttttgattaatgtatttatttaattagtaaattattttttgattagaatttttttgtaattttaaattaaataataaaataagatatagttttatagaattatatattggttaggtgagaagtttttagagcgtttaatttagatttttattttattattatggaaatatttagaatggtgtcgtaattttgttttttataatatagttagttaatggttggtaggttttaggattttgtatagaattttttttagtgtattatatttaaatgatagatatttacgtgggttatttgttggtaatgtattataaaaatatcgtttatatatttgaaaaagaatataagttattattattattattatatataattatttaattatttttagagatgatggttagatgggttgggcgtggttgacgaatttgtattagaaaaatttttttaaaaaaagattttattaaaaaaaaagtcgtttgtaatttttattttttatttttttaagtattatttattattttttaatagaattgttgagaagttttatattgggtataaggagcggtttttaggatcgtgtttttttaataaaagtttagtttcgcgtttgtttcgggcgcggcgttgaggaagggaggtgggaagagtagagcggttagaggtagggcgggcgggtgggtttgtaggttggagggtcgttggtttggagtatgaaggggcgagtttattaacggtttgttttttattggacggcgcggttcgttttgcgtatgtgttttcgggtttaaatttaggtataggttaagcgtttttgtttgttgagggcggagttaatggcgggggagtgttgttagcgcgcgtttttcggatcgtagttttcgcggtagtcgtttgagatttaaggttattgtttggtcgcggtttggtatttcggcgattcgttttttgttcggttttttggagttgtggttcgtgtgggtttttattttagatagttgcgttggtttagcggggtcggaatatggttgcgttcggtttggtaagtgtaggtttttcgttttaggcgagtggttgagcggttggttggggtacgggcgttcgaggttggggagaaggaaatgttaggttgaggttgtgatttttgagggattttagtgggaaagtcgtaggaatttttgaaattaagtgtgatcgtgtgtcgataattagagttaatttattgtatttttattattttttaagtttttatgtcgttatttcgtttgtgtttacgttttatttttgagaggtgtttgtgatttttgttgggtttttttttgtttttgtttttgagacggggttttgttttgttttttaggttggagtgtagtggcgcgattttggtttttgttttttagtttagttttagtttttaggtttttaaataatttttttttttatggtagaagtattgaaacgttttaaaagtgtgtttttgcgttatatttggtagttgggagaaatagattatgtaataagtacgtttcgaaataatttgacgtttttagtttttttgttaaaatggtggttttttatgtagtttttgaggttgatttatggagtatatgttattgataaatttttttgaaagatagttattagttaaaaggtataagttgtgaatgattaatgggggcgataatttattttgtttatatatttttggatttttttggtgtttattattttatattttatattttggttatggttattatataaaaattcgtattattttttttttaatttatttttttttttaagaaaatttttagtttcgatgattttttattatgtgacgttatatatataaatataaagagttgtatgaaagaataatataatttatattttttattatgagtatatatattgtttatattatatataattagaagaaagtaataaagttatttttattgtggggagagaagcggaataaagtttattagatgtttgtagtttagtttttaaatgtttgttataatttatgttatgttataatataattttaaaattgttttgagtttttaggagatgtttggtgtatagtatgtttatattggatgaagttattttgaaaataaattttattcgattttattttaaagaaattaaattgatgatttattttttttttagg

SEQ ID NO: 382 - DNA, 6317 bp, Artificial Sequence
  chemically treated genomic DNA (Homo sapiens)
tttgaaagaaaagtaaattattaatttggtttttttaagatagagtcgagtaaaatttatttttaaagtaattttatttagtatgggtatgttatatattaaatattttttaagggtttaaaataattttgaggttatgttatgatataatataggttatgataggtatttaaaaattgaattgtaggtatttggtaagttttatttcgtttttttttttatagtgagaatggttttattgtttttttttgattatatataatgtaaataatatatgtgtttatagtaaaaagtatagattatattatttttttatataattttttatgtttatatgtataacgttatataatgggagattatcgaagttgaagatttttttagaaggggagataaattagaaaagaaatgatacggatttttatatagtaattataattaaagtatgaaatatagaatagtgaatattaaagaagtttagaaatatgtaaataaaatgagttgtcgtttttattagttatttatagtttgtattttttaattgatagttgttttttagaagagtttgttaataatatatgttttataaattagttttaagaattgtataaaaggttattattttgatagaagaattgaaaacgttaaattatttcgagacgtatttgttatataatttgttttttttaattattaagtgtgacgtaaagatatatttttaaggcgttttaatatttttattatggggagaaaagttatttggaggtttaggaattggagttagattaaaaagtagaagttaagatcgcgttattgtattttagtttgggggatagagtaagatttcgttttaaaaataaaaataaaaaaaaatttagtagaaattataagtattttttaagagtaagacgtaggtatagacgaaatgacgatatgaaaatttaagaaataataaaagtatagtaaattaattttggttatcgatatacgattatatttgattttaaaaatttttgcggtttttttattgaaattttttagagattatagttttagtttagtatttttttttttttagtttcgggcgttcgtgttttagttagtcgtttaattattcgtttggagcggggggtttgtatttattagatcggacgtagttatgtttcggtttcgttgagttagcgtaattgtttgaggtggaagtttatacggattatagttttaggaagtcgagtaagaaacgaatcgtcggaatattaggtcgcggttaagtaataattttaagttttaggcgattgtcgcgagagttgcgattcggaaggcgcgcgttaataatattttttcgttattggtttcgtttttaataaataagaacgtttggtttgtgtttgggtttgaattcggagatatatgcgtaaaacgggtcgcgtcgtttaataggaagtaagtcgttagtgggttcgtttttttatgttttaggttaacggttttttagtttgtagatttattcgttcgttttatttttagtcgttttgttttttttattttttttttttagcgtcgcgttcgggataggcgcgagattgggtttttattaggaaggtacgattttgggaatcgttttttgtgtttaatgtaaaattttttaatagttttattaaggaataataagtaatatttggaaggatgagaggtagaaattgtagacgattttttttttaatagaatttttttttgaagagatttttttaatgtagattcgttagttacgtttagtttatttaattattatttttgaaaataattgaataattatgtataataatggtgatgatggtttgtatttttttttaagtatgtgggcgatatttttatgatgtattgttaataaatgatttacgtaaatatttattatttaagtatgatgtattgaaaagaattttatatagaattttgaaatttgttagttattgattagttatgttatggagggtaaaattgcggtattattttgggtgtttttatagtgatagaatggaagtttaaattagacgttttgaagattttttatttgattagtgtatgattttatgaagttgtattttattttattatttaatttaaaattataagaaaattttaattagaaaatagtttattaattgaataaatatattaattaggagttgagttaatagatttttaaaatatgtagtgttttaataaatgttgttaattatgaaggttaatttttttattttatttatttttttgatagaaaaaaaggaattatgatttttgattgaaattaggtttggattgtattttattttattaattttgttattatgggtaattaagttatttgttttttaatttttttgtttgtaaaatgagaatattattaaagtggttgagatgttgtaattgaataatttttgttaagatttaagtataatgtttggaatatagtaagaatttaataataaagttattggaattattatggagagttttttattatgtttggtagttttgttaattagtttaatttataatttggtgttgttatatttggaatagataatgataaatattaatatttattgattgtatattttatgtttagttttgaaatgttttgtatgtattgaagagaataattaatatttttgttttataaataagggtattgaaatatagagagttaagtgttttatttaagattatattattattaaatggtaggatgggttattattttaagaatttttattttataattgagtttttaattattatattttttgtttttgggtaagaaattttagtaagtacgattatagatgtaaagttttatatgtaaaattatatttttttgtttttattggaaattaagttttatatttattttgagaaatttggaatgtaatggtttgtgttgttgtagaaagtaggttatagagggcgttgaggattaattgttttaaagaaaatagagtagtatttttataaaaatagttgtggagattttatagtttttagagaaacgttttatttttatatgtatttgttgtagtatttaatagtttattatggttttagtattttaaaataggattgttaattaatggggggagtaatatttatttaaaaatttaagtttgtcgttataaatttttttttaaaatatattaaagattattttttatgaattgttaggataattttgaagtttttttttataattatttatttagttaaggggtgtgtgtgtatgtgtgtatttatatattagtatatggaagtattaatatatatataattagatgtgtatatgggaatataaagtatttagaaatttggtttgaaagagaagtaaaaaaaatttttcgttatttatggttttaggtatataatttaaaatttgtaaattttgaaattattttaaagaatattttgttttagatttttgatttttattaaataattatggtatgggtatttattattaaagtgttttttattaagtgttagtataaaaatatttataattgaattaatatttaaaaattagtttgtatttatttttattttatagtttaatatgtgtatttgttttggtgagtggataaataaatgtattttaatgtagtgtaatattttttagtaataaaagtaaattattgatatataatatggatgaattttgaaagtattgtattaagtgaaagaagttggatattaatgattgtatgaaaagaaattaaatcgttggttattaggggttgaggagggtgggggaaaaaagattgtaaaggaataagagggaattttttgcggtgttgaaaatattttatgttttgattacgatggtagttatatggttatatttatttgttaaaatttttagttagaattgtgtttttgaaaaaggcgatttttttttttttgagaaaggttttgtttggttgtttaggttggagtgtagtggtataattaaggtttattgtagtttttatttgttgggttaaaatgatttttttgttttagtttcgtgaatatttgggattataggtatgtattattatattttgttaatttttttttttttaattttttgtagagatgggatttttttatgttgtttaagttggttttgaatttttgggtttaagtgattttttggtttttgtttttcgaattgttgggttataggtatgagttattatatttggttaaaatagtgatttttatagtaaattatattttagtaaatttgtgagagcgatgataaaagagagaaagagaaaatgagagagatttaaaggtattgtatgaaaattaaatgtaatgtgtaaattttgattagagtttagtttaaaataaagtaattgtaaagagtattaagtaataagtgaaaatgaaaaaattaatttttagatgatattagagaattgtaaagtttttttaggtattataatgtgattatgtttatgtaatttgtttttatttttaggatatgtatattaaagtatttagaggtaaaatgttttgtgatatttgtaagtattttgaaattgttaattataaagagattgagatagttaaatatatacggtaaaatattaataattattgaatttagtttattggtgtgtttattaataatatttttttagtttttttgtatgtttgaaatattttatagaaaaatgatggggaaatttgaatttaataaaattgtttaagttttaaaaatttttgtaaaaatatttattatttattttgtaaaagttaaaagtgaaaatattagtaaatgattattatataattttgttagaaaaattatatatgaaaaatgaattttttttaaaaagtatagtatagttataattataataatatttgttaagataaaatagatttagttttatgattttggtttttttttataatgtaatttttttttttttattttttattgttaaatgttggtttttttgttaaggagatttatttaagtatttttttttgataaaaaattattttttaatagaaatgttatttatgttatgtagattataatggaaaagttaataaaatgtgtttgtaatgtataggtaggtggtagtaatgtttataaaatagttttattacgttatgagttgttaaggtttgtaatgtgttattaattgtaaagtgttatataaattaattgatttttatattttttaaattatttttgtgttaattattgtttattagttatagttatattttattatgtatatattgttttttttaagattataataaataatattattttgtagatttttattttgtattttataagataggatagtttatttttagttaatttattttttatttatataaaggaaattttgttattgaaaatatattaagatttttaaaagtttaataaaatggttttgtattgtaattttatttttgagaggatttaaattattttgagtgaaaattggtaagtaatgtaggatattgtttttaaattttaggtagttattgttttgtaaagtagtataggatttttaaaaagattttgtaagttgaaattatgtaaatcgatttttgtttgggaaaaattttgattgttttatgatttttaaaaaaaaattattagttggaggcggtggttaacgtttgtaattttagtattttgggagattgaggttggcggattatttgaggttaggagtttaagattagtttggttaacgtggtaaaatttcgtttttattaaaaatataaaaattagttgggcgtagtggtttacgtttgtaattttagtattttgggaggtcgaggtaggcggattacgaggttaggagatcgagatcgttttagttaatatggtgaaattttgtttttattaaaaaatataaaataattagtcgagtatggtggcgggtgtttgtagttttagttattcggggggttgaggtaggagaatggtatgaatttcgggaggcggagtttgtagtgagtcgagatcgtgtaattgtattttagtttgggtaatagagcgagatttcgttttaaaaataataaaaataaagatataaaaattagttaggagtggtggtgtacgtttgtaattttagttattcgggaggttgaggtaggagaattgtttgaatttgggagagaggttgtagtgagtcgagattacgttattgtattgtagtttgggagatagagcgagatttagttttaaaaaaaaaaaaaaaaaaaaattattaaaatattaatatgttttttgttgttag

SEQ ID NO: 383 - DNA, 6161 bp, Artificial Sequence
  chemically treated genomic DNA (Homo sapiens)
aggtggaagtgtattgaaaagttcgtgttttatttttatacgtttatatggggttttaaaaagggggaaaatttattttgatagggatatgatatagggacgtaggagttaatcgaaagagtttttagtggttaaagatggagtaatttgagtaataaaataaataaagtaagtattaaattatagtttaaagtataaaataagtgtttatgagtttatatttatatagatgatttaatatatttatattaataaatgggagagtattttgagaggttaaggtgggtagattatttgagtttaggagtttgagattagattaggtattgtgatgaaattttgtttttattaaaaatataaaaattagttgggtatggtggggtatgtttatagttttagttatttgggaggttggggagggaggattgtttgagtttgggagacggaggttgtagtgagttgtgattttattattgtattttagtttgggtaatagagtgaggttttgttttaaaataaataaatatataaataagataaatatataataaaaataaaaataaacgggaaagaagagataaattttttgtgtaggagaattttaaatgaattttgtagattttttattttataggagggtatatataattttaggttgttttagtgatttttttttaaagagtatagtacgggaagggggagcggggagaattaattttatagtggagaaatttgataaatacgattttcgttaagtgatcgaggttatattagttgttatgaattatgttgatagtgggtattttggatatgatgggatgaaatggtattttatttttacgattttttttataatagttcgtaatgttagtataaggaaaatattagattaggagtggtggtttacgtttgtaattcgagtattttgggaggttaaggtgggtggattataggttaggagtttgagattagtttggataatatggtgaaattttgtttttattaaaaatatataaattagttaggtacggtggcgggtgtttgtaattttagttatttgggaggttgaggtagaagaatcgtttgaattcgggaggcggaggttgtagtgagttgagatcgcgttattgtattttagttaggttgatagagtgagattttattttaaaaaaaaaaaaaaaaaaagaaaagaaaagaaaaagagaaaagaaaaatattagatagattttaatagaagggtattttatagtatacgtgattattgttttttaaatttgttaagattattagaaataagagaaattgttatagttataaggagatgtgataattaattgtgatttttttttttgagatgtggtttcgttttgttatttaggttgtagtatagtggtataattatagtttattgtagtttcgaattttggggtttaagtgatttttttatttattttagttttttaagtagttggggttatatgcgtgtattattatatttagttaatttttgtatttttttagagacggtatttcgttatgttgtttaggttggtttcgaatttttggatttaagtaatttatttaatttggttttttaaagtgttgggattataggtatgagttattatgttttgttaaatgtgatgtatttttgatgggattttggaagaggaaaaagatattaggtaaaaattaaggatatttgaataattatggattttagtaatgtatttatattgatttattaattgtaataaatatatcgtatgaatgtaagatgtttataatgaggtcggggcggtggtttatgtttgtaattttagtattttgggaggttgaggcggaaggattttttgagtttaggagttcgagattagtttgggtaatatagtgagatttttatttttataaaaaattttttgaaattagttaggtgtggtggtggtatatgtttgtagttttagttatttagaagattgagataggaggattgtttgagtcgggaggttgaggttgtagtaagttaggattacgttattatattgtagtttgagtaatagagcgatattttgttttaatgataataataataataataataataatggaaatttagtatgggttgtatatgggaaatttgtttagtttttttgaaaatttaaaatttttttgaaaattaaagtttgtttaaaaatttatatggggtttgtatttttttttatgataaggttttgtaggttatgattatagaggttggagagggtgtaggttatttcgtttttttttgttttagggatttttttttttaggagttgtgttttttttgtgagagagggtgagtttttatgattttaagttttttgttttttgatttcggtatttttagaagttgggattagtattgagtttaaattttcgaagcgtttaaatattggttttttgtttttatgtgatttggagtttgtagtttaatttttttttgttttattgtttgatttataaagtagggtaattaaggtatttcgggggtggttatgaagagtgaatgagatagtagataaattagatgtttatcgataggtgaagggattaatatagtgcggtataggcgtataagggaatggagtatggatatagtttataatatagataaattttgaagatatttttttaagggatataggttaggtatggtggtttatatttgtaattttagtattttgggaggtcgaggcgggtagattatttgaggttaggagttgagattagtttggttaatatggtaaaatttcgtttttattaaaaatataaatattagttgggtgtggtggtaggtatttgtaattttggatattcgggagattgaggtaagagagttgttggaattcgggaggtggaggttgtagtgagtcgagattgtgttattgtattttagtttgggcgatagagcgagattttgtcgaaagaaagaaagggaggaaggaaggaagaaagaaagggaagggaagggaagggaggggaggggaggggaggggagggaagggagagagaaagaagaaagagaaagaaaggaagaaagaaaaagaaggaaagaaagaaagaaagaaagaaagaaagaaagaaagaaagaaagaaagaaagaaagaaagaaagaaaagagtgaatttaggaacgaaagattatatatattgtatgattttatttatatgaaatgtttagagtaggtaaatttatagagatagaaagtatatttatggttgttaggagttgggaaagggtaggatggggaatgattgtttattggatgtggggttttattttggggtgatgagaatgttttggaattaaatttatggttgtataatattgtgaatatattaaatgtttttgaattgtatattttaaaatggttaaagtggtaagtttttattaagtagtaaattaaattttattataattttaaaaagattaaaaaataatttaaaaaagattaaatgagataacgtaaaaaagtattatttcgaaaatatagttgatattagtataatttttattaagttttaagagtttaaggtgtaggattttaagtttaaagggataggtttttttggttttttggtttagttatttggtttttttttttaatttattatttttatttttgggaggtttttagtatttagtttgtattagaggatggggtttattttttttttttttttaggtttagttattgattattagtattttggttaggggtattttcggttattgtttttcgtggtttaaggaagggaatagaaataatagttaagaagataatagtcgtcgggaagtttttatatttttggagaaatagagtttattaatgaatgaagtttttttagtttgatcggaggacggggtgttggggaggtttgggttaaagggtttatttttagtttttattttggtagggtcgatggtatatgtttatttagtgagggggttttagaggtttgtgggtacgaatttaagggttggtgtttaggggtaattagtttatgtttttgagttttgggaaatagtgagggttagttcggttttttacgtgtttttgggtagttttggtattggagtaggtgtaaattcgggattagggtaggattttttgagaggcgattgagtaaggttatttcgatttatgtttttttggttttgttcggggtatagtattttgtttatatttttgtagttttggtttttttttaggggttttgaggaggtagtatttggttatttggttatagttgttgtagggtagtttttggttttagttgtaggtaaagtattgtatgttgtaattttttgaaagataatacgtttatataatttagaattgaaatgttatagatattttttttgtttcgtttttttttttcggatatttagtttttttcggaggtagttaatgattttagaggttgtatatttatttagagttattttatgtatattaaggaaagtttatatagaggattgtttttggggtatttagatgtagcgttaaatgttatggaatattatagtgaggatattatttttttaagtttttaaattagagtaagggaaaggtcgatgttagagtttttttagtatttatgaagttttttttttttttttattgagttttattttataggtaatagtaggttttaagtttggggttattgtcgggtaatagtatttggtaagaatttaatgttttttttttatagttattgtattttggtttttttttatttatggtaattgagagagaaagtttatttttagatatatgtatttaagtaaaaaataaatgaatttatggaaatatattaagtaattatttagataatataagggatggtaaaaatggtgtagatggtggaggggagataagtagaagttggggtgtttttgttgaatgtttggttttgaattttagaggaggtcgtagggggttgggtaggaaggaggtgaatttttggggttaggaagattttgttgttcggaagagttttatgtttcgtgggggttgggtagatatatatatacgggttttaggttgaacggttcgggttatttatatattattgtttgataattatgttggttgttatagttttgattttggttttgttgggtaatgtttatgtttgttttaaaggtatttcgtacgaggtaggtatcgtgtgtcgtattattaagtttgtttttttggtgtgtaagtattagtgtatttgtttgttttgttaggggtttttttatggatatttattatgttaggagtttttttggtttgaagttagttttgaagtcggttgttatattagtttagagagaggagtgttttgggagggagatgggttgagtggagttgttattatttttttttgatttcgtttttaaggttaagttttttggtgagaaggttttagttgtattgtaaatagttaggtatagggatttgtgtttgtttgagatttagaattattggggttcgagttagggtttagatttgagttaggttagggggttgagttagggggtaaagattaggaggttggtgtatatttggtgttgggggttattttatggttaaagttaggggttgttatgagtttaggtgacggaggttttattattgattgttgtgtgattttggttagtttttttgttttttttgggttttagttttttgtttaatataataagggtatagggaggttaaatgatataatttttaaaatagagtatcgttaagtttaaaagttagaattatagatttttaggattatagatagtgttatagtatcgtttgggtgaggttagggttagtgtgcggttgggtttagggttgttttatttgttaggatcgtggggtttttatgtgttaggatttagaggttagggtatgattaggatttttagttggggttagggttagagttttttgtgttttttagaattgttattaattttaaatttagagggaggtttagtttaattttttagttttaagatttgttgggagttttattttagagaggttgagttatggttaaggttagttgggggtgggagtagggggtttggtgtgggtttgtagttttttatttattgtttttttttttagt

SEQ ID NO: 384 - DNA, 6161 bp, Artificial Sequence
  chemically treated genomic DNA (Homo sapiens)
attagaggggagggtagtggatgaggggttgtaggtttatattaagttttttgtttttatttttaattggttttggttatgatttagtttttttgagatgaggtttttagtaggttttaaagttgaggggttggattgggtttttttttgggtttaaggttgatggtaattttaggggatatagagagttttgattttgattttagttagagattttgattatattttagtttttggattttgatatatgggaattttacgattttagtaaatggggtagttttgagtttagtcgtatattaattttagttttatttagacgatgttgtgatattgtttgtagttttgggggtttataattttggtttttgaatttggcgatattttattttagaaattgtattatttagtttttttatatttttattatattgagtaagagattgaggtttagagagggtaggggagttggttaaagttatataatagttagtgatggagttttcgttatttgagtttatggtaatttttgattttggttatagagtgatttttaatattaaatatatattaattttttaatttttattttttgatttaattttttaatttggtttagatttgaattttaattcgaattttagtgattttgggttttagataaatataaatttttatatttggttgtttgtaatgtagttaggatttttttattaaagaatttgattttgaaggcgaggttaggagggggtgatgatagttttatttagtttattttttttttagggtatttttttttttgggttagtgtggtagtcggttttagggttggttttaggttagggaggtttttggtatagtgggtgtttatgaaaagatttttggtagggtagatagatgtattgatatttatatattaggagggtaggtttggtgatgcggtatacgatgtttgtttcgtgcgaggtgtttttggagtaggtatgggtattgtttagtagggttagggttaggattgtggtagttagtatggttattaggtagtggtgtgtaagtggttcgagtcgtttagtttggagttcgtatatgtatgtttgtttagtttttacggaatatgaggttttttcgggtagtagggtttttttggttttagagatttattttttttttgtttagttttttgcggttttttttagagtttagagttagatatttaataagagtattttaatttttatttgttttttttttattatttgtattatttttgttattttttatgttatttggataattgtttaatatgtttttatgaatttatttattttttatttaaatatatatatttaggaataagtttttttttttagttgttataaatagaaagaggttaaaatataatgattatgagaaaaagatattgaatttttgttagatattgttgttcgataatgattttaagtttgaagtttgttgttgtttgtaaagtaaaatttagtagaaaaagggagagggttttatgggtgttagagaaattttagtatcgattttttttttgttttgatttgaaagtttgaaaggataatgtttttattgtagtattttatggtatttgacgttgtatttgggtattttagaaatagttttttatgtagattttttttgatatgtataaaataattttgggtgggtatatagtttttgagattattggttgttttcgggagaaattgggtattcgggggaaaggggcggagtagggggaatgtttgtggtattttaattttgagttgtgtgaacgtgttattttttaaaaaattataatatatagtattttatttatagttggggttaagaattgttttgtagtaattgtgattagatgattaagtgttgtttttttagagtttttaggaaggagttagggttgtagggatgtgggtaggatgttgtgtttcgggtagggttaaggaaatatgagtcgggatggttttgtttagtcgttttttagggggttttgttttagtttcgagtttgtatttgttttaatattaaagttgtttagaagtacgtggggagtcgggttgatttttattgttttttaaggtttagagatataagttgattgtttttgggtattagtttttgggttcgtatttatagatttttggagtttttttattgagtgagtatgtattatcggttttgttagggtgggggttggaggtgagttttttagtttaggtttttttagtatttcgtttttcgattaggttggaggaattttatttattaatgggttttatttttttagaaatgtgaggatttttcggcggttattgtttttttggttgttgtttttgtttttttttttgggttacggagggtaatgatcgagggtgtttttggttagggtattggtggttagtggttgggtttggagagaaaagggaggtgggttttattttttagtgtagattgggtgttgggggttttttaagggtggggataatggattaaaaaaaaaaattaaataattaaattaaaaaattaaaagagtttatttttttaaatttagaattttgtattttagatttttaaaatttagtaagaattatattaatattagttgtattttcgagataatgtttttttgcgttattttatttaattttttttaaattattttttagtttttttaaaattgtagtagaatttaatttattgtttagtgaaaatttgttattttaattattttaaagtgtataatttaggggtatttagtatgtttatagtgttatgtagttatgaatttaattttagaatatttttattattttaaaatagagttttatatttaataaatagttattttttattttgtttttttttagtttttggtaattataaatgtgttttttgtttttatggatttgtttattttgaatattttatgtaaatagagttatatagtgtgtgtgatttttcgtttttgggtttattttttttttttttttttttttttttttttttttttttttttttttttttttttttttttttttttttttttttttttttttttttttttttttttttttttttttttttttttttttttttttttttttttttttttttttttttttttttttttttttttttttttttttttttttttttttttttttttttttttcgatagagtttcgttttgtcgtttaggttgaagtgtagtggtataatttcggtttattgtaatttttatttttcgggttttagtaatttttttgttttagtttttcgagtatttaggattataggtatttattattatatttagttaatgtttgtatttttagtagaggcgggattttgttatgttggttaggttggttttaatttttgattttaagtgatttgttcgtttcggttttttagaatgttaggattataggtgtgagttattatgtttggtttatgttttttagaggaatgtttttaaggtttgtttgtgttgtaggttgtgtttatattttatttttttatacgtttatatcgtattgtgttggtttttttatttgtcggtaggtatttggtttgtttgttattttatttattttttatagttattttcgggatgttttgattgttttgttttataggttaaatagtgaggtagagagaagttaaattataagttttaggttatatagggatagaaagttagtatttgagcgtttcgggaatttgggtttagtgttggttttagtttttaagaatatcggagttagagggtaagaggtttggggttatggaagtttatttttttttataggggagatatagtttttggggaagggaatttttgggatagggaggggcgggataatttgtattttttttagtttttgtaattataatttgtaaaattttgttatggaggagaatgtaaattttatgtgaatttttaagtagattttgatttttagaagaattttagatttttagagaaattgagtaagttttttatatataatttatattgagtttttattattattattattgttattattattattgagatagggtgtcgttttgttgtttagattgtagtgtagtggcgtgattttggtttattgtagttttaatttttcggtttaagtaatttttttgttttagttttttgagtagttggggttataggtatgtgttattattatatttggttaattttaaaaaattttttgtagagatggggattttattgtgttatttaggttggtttcgaatttttgagtttaagagattttttcgttttagttttttaaagtgttggaattataggtatgagttatcgtttcggttttattatgaatattttgtatttatacggtatatttgttataattaatgaattagtgtggatatattattgaaatttatggttatttagatgtttttagtttttatttaatatttttttttttttttaggattttattaagaatatattatatttggtaaggtatggtggtttatgtttgtaattttagtattttgggaggttaagttaggtggattgtttgaatttaggagttcgagattagtttgggtaatatggcgaaatatcgtttttaaaaaaatataaaaattagttgggtgtggtggtgtacgtatatagttttagttatttgggaggttgagatggatgggaggattatttgagttttagagttcgaggttgtagtgagttgtgattgtgttattgtattgtagtttgggtgataaagcgagattatattttaaaaaaaaaaattataattaattgttatatttttttgtagttgtgatagttttttttgtttttgatagttttgataggtttgaggagtagtggttacgtatattgtaggatgtttttttgttgggatttgtttgatgttttttttttttttttttttttttttttttttttttttttttttttttgagatggagttttattttgttaatttggttggagtgtagtggcgcgattttagtttattgtaattttcgtttttcgggtttaagcggtttttttgttttagttttttaagtagttgggattataggtattcgttatcgtgtttggttagtttgtgtatttttagtagagataggattttattatgttgtttaggttggttttaaatttttgatttgtgatttatttattttggttttttaaagtgttcggattataagcgtgagttattatttttggtttgatgttttttttatattggtattacgggttgttgtgaaaagggtcgtggaggtaaagtgttattttattttattatatttaggatgtttattattaatataatttatgatagttgatgtgatttcgattatttggcggaggtcgtatttgttagatttttttattgtgaagttaatttttttcgtttttttttttcgtattgtattttttggaagaaggttattaaggtagtttggagttgtgtgtgtttttttgtagggtggagaatttatagaatttatttgggatttttttgtatagaagatttgttttttttttttcgtttatttttatttttattatatatttattttatttatatatttatttattttgagatagggttttattttgttgtttaggttggagtgtagtggtgagattatagtttattgtaattttcgttttttaggtttaagtaattttttttttttagttttttaagtaattggaattataggtatgttttattatgtttagttaatttttgtgtttttggtagagatagggttttattatagtgtttaatttggttttagatttttgggtttaagtgatttgtttattttggttttttaaagtgtttttttatttattaatatgaatgtattaaattatttatgtgagtatagatttatagatatttattttatattttgggttataatttgatgtttattttatttattttgttgtttaagttgttttatttttggttattgggggttttttcggttggtttttgcgtttttgtgttatatttttattaaagtgggttttttttttttttggggttttatgtaaacgtataaagataaaatacgagttttttagtatatttttattt

SEQ ID NO: 385 - DNA, 6185 bp, Artificial Sequence
  chemically treated genomic DNA (Homo sapiens)
aaatgattttataattgtaagagtatttgatttatttttttatatttagtttaaatattaaaaattttttaaggaatgagaaattttaatgtttttgagaattttgatagtttttagagagtttagttttttgtagtattttattttgtaattttatataaatttttaatttataattagtggtatgtaatgataatttttaatatttattaagtgtttattgggttttaagtgttttacgtttgatatatgtattatatttaatttattttatttagtggtttttaattggggataattttgtatttttttttttaatatatttggtaatttttggagatagttttggatttttagatttatttgttataatttaggatgtatgtggttttacgagtatttagtgaatagaagttagagatattgttgaatattttatagtataagggtaatttttatattaaagaattatttatatttaaatgttagtagtattgaggtagagagattttaatttaatttgtttaataattttatgaggtgattttttttttttttttgagataaggttttattttgttatttaaattggagtgtagtggtatgattatagtttattgtagtttcgattttttaggtttaagttatttatttgttttagttttttaagtagttgagattagaagtatgtattattatatttggttattttttttatttttttgtagagataaggttttattgtgttgtttaggttgattttaaatttttgagtttaagtaatttttttgttttagttttttaaagttttgggattataggtatgagttatggtatttgattaaggtgagtgtatttaattttatttttaggtaaggaaataaaagatagaaaagttaagtagtttatttaaggttatagagttaagtgtggtgttaggattgaaaatttagttttttattgttttagtataagttatttttattatattttgttatgtttagagaatgttgatgtttattagtggattttaaattttgaaggatggagatattgttttattttgtatatttgttttagtatttaagtttttgtttggtgaaaaattaatagtaaatatttattttttgagtatttttaaatattttttttagaatgatatttaattattaggttagtaattttaagagaaaacggttgtttgagtgtatatattgtattataaaataaggggtgaatttaaaggaaaatataagatgtaattcgtgtttttaaggaggttgtagggaagaggggttatgaatgtatgtaaatagaagttggtgtgcgtgtgtgtttataaatagaattgttagattaaatattattttggaagtagtaaaagtaaattagaatttggtttagttatgttttaggatattttttttaagttttgaaatatttttgtaagattgtaatgtgtgtttatattttaggtaattattgtggtttattgttgaagagttgtggttgtttttatttttttagtttagataaatttataagtataattagattatatatatgaagttgaagagattttgtttttttttaacgagttttttttttcgataggagtgattattttttttttttttttatatttttaggttttagtgtatttgtgattgttatttatttattattattaaagtttatttaggagagaatttgagaaatatttttaaattaagttgaatatgatggataagtaaagtattgtgaaagtttatttttatgatttttaatggtgaaatttggtagggtgattaatttttgacgagaaggttattatttataattttttatatattgagattatttgtaagaagtatttagtatattgttgaatataaagtaggtattaaataaatgttggttttttttttttttatttattttcgtttttttttttaatatatttttaaaatgatgttatagaaatggttatttaattttttatatttaaggttagtttttgtattaggaaattttataggggaagtatgtgaagtatgtgtagttagttattaaatgtttgggttttggttatagattgtttaggtttaaattttagtttttttttttattattaattgtgtaatttgtttgggaaaatatgaaatttgtttttttttaggtttattatttgtaatatatagtgaatgaagaagttttttgttttatgaaggtgttgtaaagattaaaaaaggtaaattaggttgtgtatttgttataataattggtatatatggtaagtgattaataattataaggtattataaaattgttataaaatgatatgagttattattgagtagtatgaaagaagagttttattgttttatttattattattttggtttattaattttttttttgtttttgatattttagagatacgtttaggattttaattatgattttaagttatatttgaataattttttggtggataagtttttatttttatattatgtatgtatttagatgtaaattttgaatattatgtcgtaattagtgtatttggatatgtttgttaattgtgttaaagttttgaataatggtaaagttttatttttattaaaataaatttgggttgtaatgttttatgataaaaatttgtggtttttttatgtatatgtgtgtgtatatgtttaaaatgtaatgttatagttaaatgtaatttattaaaagtatgtaattttagtggttatttagtttggttatttggtttgtagatttttgtttttttgttttattgttaaataggtttagaagttattattttatgaaattaatgtgaggaaaaagattatgttgatatataagtgatattatataaatatatgagggatgatttgattagaagtagtattatatagtgataggagtaatggtttagaattagatttaggtttgaattttagttttattattataggtatttatttaattttttttgtttgtttaattgaaaattgaagataataatatttatttatatggttgttataagggttatatgaataatgtttggtaaatagtaagaatttaagtaattgttttattttttttagaaggagattggttgaaaaatatttggagttttttttagttatattttttggttagtttttatgattttttttggagtttaatttttaatttttttatttttatttgtttgttgataataaagaagaattaattattaatttattttaaaatgtatgtattatatttgatgggttatattaatagttataaattaaataatagattgggaatggggaagtggatgtggtgagtttaattatatgtttgggaaaagttaatagtgaagatagagttttataattttttgttataatggagagatgaaaatataggtagaggattttaaataatagagtggatggtgagttaaaaatgttgaaatttttttttggtgtttaatttaatgtaatgtggtttatttttttgtttttttttttattatttaaatttaggataataaagattaaatgtttttaaattttattttataatattaagaaaaaaaggtatgtttttgtttacggaagggtaaagtagagttatgaaaatttgttgaatatattttttatttttaatataggtttttgtttttttattatgaaatgtatattttatttgtattgtatttgggtgattataagttaataataagataatttataagatttttgttttagatgtgtcggtaataaagtaattaggttaaaatttttatttttttttgaattttttaatttaaatataatgtatgtttgtttttatatagtagggtttagggattagagggttggttttttaaaaatcgttagagatataggtaattttatataaaatttttagaaggaaggcgtttacgtttgggaatgtttagatgttttttagagagttgaagatggcgtttttttgagttaggttaaagttaatatattattttcgttttaaagattgtttggttttttttcggtggattagttaagatgttttgttgattgagattaggaaatttataggagggcgggttagtttatattgttttttgttattatcgttaaaatattttaaagttttttttaaaaatgcgtattgggttaaaaaggatagataaggaatatattttgggtcggtaattacgtaaagtattatttttttttatttttttgtagattttttttttttttttagtacgtgttttaagatttttgtgttatttttggagtttatttatttaaatttgaaattaataaagtttggttttttttttcgatacgtaaaggaagcgttaaggtaaatgtattagatttatattgtcgcggaatttttcggttttttaaggttgtattttgatatacgaaaggtatattttttttttttttttaaaatgtattttgtaaacgtaataggaattcgattaggattatcgggaaaaggaggaggaggaggaaggtaggtttcggggaagttggtggtagcgggttttgggtttggcggattttgacgcgaaggagggtttaggaagtttttcggggagtcggttttttcgtcggtggttttttttgttttttagcgttgttaattggatttaaagagaggtcgcgattgtcgtttatttgcgggatgggtttggtgttgggcggtaaggatacggatttggaaggagcgcgcgcgagggagggaggttgggagttagaatcgggaaagggaggtgcggggcggcgagggagcgaaggaggagaggaggaaggagcgggaggggtgttggcgggggtgcgtagtgggtggagaaagtcgttagagtaaatttggggtcggattaggtagtattcggtttttaatttgggtagtgaaggcgggggaaagagtaaaaggaaggggtggtgtgcggagtaggggtgggtggggggaattggaagtaaatgatattatagtaggttagagaaaaagggttgagcggtaggtatttagagtagtaggtttttggtattaggagtttgagtttagacggttttagtagggattttagcgttcgagagattatgtagaggtcgtttttggaaaaggttagcgttgtttttaaatttttttttaggtgagaaggtggttaatcgagtttcggaaagatacgtgtttacgaaagaggagggcgtgtgtatgggttgggtttggggtaaaggaataagtagtttttaaaaagatgcgttattatttattgttttgaaagaaaatgtgggtattgtagaataaaatagaaagtattaagaagagatggaagaatgaattgaagttgattgaatagagagttatatttatttgtaattgaaaagttagaattttaagatttaagtacgttattatgtatttgttttattttatttttttaagaaattaaaaatatttgttaataagtatttaagtatggtttattggttttttttttttatgttttggatatttgattgtttttttggtatatataggtgttatgtttgtatatagtaagtgtttagaaaatattttttgattgaatttagttaataaaaattttggggtaggtagaaaatatatgtttaaagtatttattgttatgagattggatatatttagtatttgttataggtaaatgattttttaaaaattgaaagtaaatttgttgaaatatttattttgaaaaaagttattttataagttataaattttaaaagttataggaatagatatcgaagttatatttaattgatatttaataaattgtatttatagtttaatgtgatgagttatagaagtttgtaaattttaatgagattttttaaaatagtatttaagttcggaattttaggtaaagtgttgttagatgtagtattttatatttgaagtgttttttggatattgtatttattttgtttttgttattatattggtgtgaatgaatgaataggtattgtttttttttgggatattatttgatatataattatttaatgaataagtatattgaggtattaaaaaagttaaatatgttataaatagtttatatatgtgtgtaggggggaaggaatttagtttttatattttttttatgtttagttttt

SEQ ID NO: 386 - DNA, 6185 bp, Artificial Sequence
  chemically treated genomic DNA (Homo sapiens)
gagaattaaatataagagagatgtgaaagttaaatttttttttttttatatatatatatgagttatttataatatatttgatttttttgatattttagtatgtttatttattgggtaattatgtgttaagtaatgttttaagagagagtagtatttatttatttatttatattagtataataataggaataaagtagatgtaatatttaaagaatattttaaatatgaagtgttatatttaataatattttgtttaagatttcgaatttagatgttattttaaaaaattttattaaagtttgtaagtttttgtggtttattatattaggttatgaatataatttattaaatgttagttggatataatttcggtatttatttttatggtttttaaaatttatagtttgtgaagtaattttttttaaaataaatattttaataaatttgtttttaatttttgaagaattatttatttgtgataaatattagatatatttagttttataataataaatattttaagtatatattttttatttattttaaaatttttgttggttgaatttagttaagaaatgttttttgagtatttattatatgtaggtatggtatttgtatgtgttaagaagataattaagtgtttaaggtatgaagggggaaaattaataaattatatttaggtatttattaataagtatttttagttttttagaaaaatgaaataaaataagtgtatagtagcgtatttgagttttgagattttaattttttagttgtaagtagatgtggttttttatttaattagttttagtttatttttttatttttttttaatgttttttgttttattttataatatttatatttttttttaaaataatgaatgatagcgtatttttttaaaaattgtttatttttttattttaaatttaatttatatatacgtttttttttttcgtgggtacgtgttttttcgaagttcggttggttatttttttatttgaaaaaaagtttggagataacgttggttttttttagaggcgatttttgtatggtttttcgggcgttggggtttttgttagggtcgtttgggtttaagtttttaatgttaaagatttattattttgggtgtttgtcgtttaattttttttttttgatttgttgtgatgttatttgtttttaattttttttatttatttttatttcgtatattattttttttttttgttttttttttcgtttttattgtttaggttaaaagtcgagtgttgtttggttcggttttaaatttgttttagcggttttttttatttattacgtattttcgttagtatttttttcgtttttttttttttttttttttcgttttttcgtcgtttcgtatttttttttttcgattttgatttttagtttttttttttcgcgcgcgttttttttaggttcgtgtttttatcgtttagtattaggtttatttcgtaggtgggcgatagtcgcggtttttttttaggtttagttggtaacgttggaggatagaagaagttatcggcgggagaatcggtttttcggagagttttttagattttttttcgcgttagggttcgttagatttaggattcgttgttattagttttttcggagtttgttttttttttttttttttttttttcgatgattttagtcgggtttttgttacgtttgtaaggtgtattttgaaaagggaaggaaaatgtgtttttcgtatattaaaatatagttttagagagtcgaaaagtttcgcggtagtgtgggtttgatgtatttattttagcgttttttttgcgtgtcggagaaaagaattaagttttattagttttaggtttaggtgagtgaattttaagggtggtatagaaattttaggatacgtattgaaagagaaaaaaaaatttgtaaggaggtaagaggagataatgttttgcgtaattatcggtttaggatgtgttttttgtttattttttttagtttagtgcgtatttttaaggaaggttttggagtgttttagcgataatgataaggaataatgtaaattaattcgtttttttatagattttttagttttagttagtaaaatattttgattaatttatcgaaaggaagttaagtagtttttgaagcgaaggtaatgtgttaattttgatttgatttagagaaacgttatttttaattttttgaggggtatttgggtatttttaggcgtaggcgttttttttttgagaattttgtgtaggattgtttgtgtttttgacggtttttaaagagttaattttttaatttttgaattttattgtgtaaaagtaagtatatattgtgtttgaattgaaaaatttaaaggaaagtaaaaattttggtttgattattttattgtcgatatatttaaggtaagggttttgtgaattattttgttgttgatttgtggttatttaaatatagtataaataaaatgtgtattttatgatggaaagataagaatttgtgttgaaaataaagaatgtgtttagtaggtttttatagttttgttttgttttttcgtgggtaaaagtatattttttttttttgatattgtaaagtaagatttagaaatatttaatttttattattttaaatttgaatagtagagaaaagagtaaagagataaattatattgtattaagttagatattaggaaagaattttagtatttttaatttattatttattttgttgtttgaaattttttatttgtgtttttatttttttattatgataaaaaattgtgagattttgtttttattattgattttttttagatatgtgattgaatttattatatttatttttttatttttaatttgttgtttggtttataattgttagtgtggtttattaaatataatatatgtattttgaaataaattaataattagtttttttttgttattaataagtaagtgaaaataaagggattaagaattaagttttaaagaggattatagaagttgattaaggaatatggttggaggagattttaaatattttttagttaatttttttttggaaagagtgaaatagttatttgagtttttattatttgttagatattatttatataatttttataataattatgtaaataggtgttattatttttagtttttagttaagtaaataagaaaagttaagtaaatgtttataatgatagagttaagatttaaatttgagtttagttttaaattattatttttattattgtgtaatattgtttttaattaaattattttttatgtatttatataatgttatttatatattaatatagtttttttttttatattagttttatgaaataataatttttagatttgtttaataatgaaataggaaagtagaaatttataaattaagtagttaaattaagtagttattggagttatatatttttaatgaattatatttaattataatattgtattttaagtatgtatatatatatgtatataggaagattatagatttttattataaaatattatagtttaaatttgttttggtagaaataaaattttattattatttagagttttaatatagttagtaagtatgtttagatgtattaattgcgatatgatatttaggatttgtatttaggtatatatataatgtgggaatgaggatttatttattagaaaattgtttaaatgtggtttaaggttatgattgaaattttaaacgtatttttgaaatgttaggaataggaaagagattaatgggttagggtgatagtaggtgaaatagtgaagttttttttttatgttgtttaatgatagtttatattattttataataattttataatattttatggttgttggttatttattatatatgttaattattatgataaatatatagtttaatttgttttttttaatttttataatatttttatgggataggaaatttttttatttattatatattatagataatgaatttgaggaaaaataagttttatgtttttttaagtaagttgtataattaataataaaagaggaaattgggatttaaatttaaataatttgtggttagagtttaagtatttaatgattgattatatatattttatatattttttttatagaattttttaatgtaagaattgattttaaatatagaagattgggtggttatttttgtggtattattttaaaggtatattaaaaagaagagcgaggatgagtaggagaaaaggaagttaatatttatttaatatttattttgtgtttagtaatgtgttgggtgttttttataaatgattttaatatatgaaagattataagtgataattttttcgttaaagattagttattttgttaggttttattattagaaattatgagagtgaatttttataatattttatttatttattatgtttaatttaatttgagagtgttttttagatttttttttgagtagattttaatagtgataagtgggtagtaattataagtatattaaaatttgaaaatgtggaagaagaaaagaaatagttatttttatcgggaagaaaagttcgttaaaaaaagataaggtttttttagttttatatatgtagtttggttgtgtttataagtttatttaagttagaagggtaagaatagttatagttttttaatagtgggttatagtgattatttaggatgtaaatatatattatagttttataaagatgttttaggatttgaaagaggtgttttgggatatgattaggttagattttagtttatttttattgtttttaaaataatgtttggtttgataattttgtttataaatatatacgtatattaatttttatttatatatatttataattttttttttttataatttttttggaggtacgaattgtattttatgtttttttttgaatttattttttattttgtaatatagtatatatatttaaataatcgtttttttttggggttattgatttaataattgaatgttattttaaaggggatatttgaagatgtttaaaagatgaatgtttattattaattttttattaagtaagagtttgggtgttaaagtagatgtatagaataaggtagtatttttattttttaaaatttagaatttattgatggatattaatattttttgaatatgatagagtatagtggaaatagtttgtgttaaagtaataaagaattaggtttttaattttggtattatatttagttttgtgattttaagtaagttatttaatttttttgttttttgtttttttgtttgaaaatgaggttaaatatatttattttggttaggtgttatggtttatgtttgtaattttagaattttgagaagttgaggtaggaggattgtttgagtttaggagtttgagattagtttgggtaatatagtaagattttgtttttataaaaaaataaaaaaaatagttaggtgtggtggtgtatgtttttgattttagttatttgggaggttgaggtaggtggatggtttgagtttgggagatcgaggttgtagtgagttgtgattatgttattgtattttagtttaggtgatagagtaagattttattttaaaaaaaaaaaaaaaattattttataggattgttgaatagattaagttagggtttttttattttagtattattgatatttgggtgtggataattttttgatgtgggggttgtttttgtattgtggaatgtttagtagtatttttagtttttatttattggatgttcgtaggattatatatattttaggttgtgatagatagatttggagatttaggattatttttagagattgttaaatatgttggggagagaggtataaagttgtttttagttaagaattattggatgaaataaattaaatgtgatatatatattagacgtaaagtatttagaatttaataaatatttaataaatattagaaattattattatatattattggttataaattagaaatttgtataggattgtaaaatggaatgttatagaaaattgaattttttaaaagttattagaatttttaggaatattggaattttttattttttaagaaatttttggtatttgaattaaatgtaaaggggtaaattaagtatttttgtaattgtaaaattattt

SEQ ID NO: 387 - DNA, 16720 bp, Artificial Sequence
  chemically treated genomic DNA (Homo sapiens)
tttttttttttttggagattgcgttttaaaggttggagtgtagtggtataattttggtttattgtatagttcgttttttgggtttatattatttttttgttttagtttttttagtagttgggattataggtgtttgttattatgttttgttaattttttgtagagatggggaaatgttatggttttaattttttgattttgtgatttattcgtttcggttttttaaagtgttgggattataggtgtgagttatcgcgtttagttttttttttttttttagataagagttttattttgttgttaaagttagagtgtagtggttaaattttagtttattgtaatttttgttttcggagtagttggaattatagttacgtattattacgtttagttaatttttttgtatttttagtagagatggggtttgcgcggttgaagtgtagtgatgcgattttagtttattgtaatttttgttttttaggtttaagtaatttttatgttttagtttttggagtagttggtattatagtatgtattattatgtttggttaatttttttgtattttagtagagatggggttttattatgttgtttaggttggttttaaatttttgagtttaggtagtgtcgtttttttgattttttaaagtgttagaattataggattgagttatcgtgttttggtttttattttaaaaattttatttttgtaggtaatatgttgggttttttagtatgatagtttatgttttttaattggagtgtttaggttatttattttttttttttaagatagggttttattttgttatttaggttagagtttagtggtaagattatgatttattgtagttttaaattggaatttttggtttaagttatttttttagttcggttttttgagtagtgaagattataggtatgtgttattatggttggttaaattttgtattttttgtagagataaggttttatgatgttgttttagttggttttgatttttagggtttaagtaatttttttattttggttttttaaagtgttaggaatataggtatgagttattatgtttagttatattatatatttttaatttataatagtttatatttaattgatattaaattagtttatttgtagtataagaattttttttagtttggttaatatggtgaaattttgtttttattaaaaatataaaaaaaaaaaaattagttaggtgtggtggtgttcgtttgtagttttagttatttgggaggttgaaatagaagattgtttgaatttggaagtagaggttgtagtgagttgagatcgtgttacgtttaggtaatacgagtaagatttcgttttaaaaaaaaaaaaggcggggttcggtggtttacgtttgttattttagtattttgggaggtcgaggcgggcggattacgagattaggagattaagatcgttttggttaatacggtgaaattttatttttattaaaaatataaaaaattagtcgggcgtggtggcgggtgtttgtagttttagttattagggaggttgaggtaggagaatggtatgaatttaggaggtggagtttgtagtgagttaagatcgcgttattgtattttagtttgggcgatagagcgagatttcgttttaaaaaaaaaataaaaaaaaaattttttggcggtttggtgtggtggtttatatttgtaattttagtattttgggaggttgagattggcggattatttgaggtcgggagtataagattagtttgattaatatggagaaatttcgtttttattaaaaatataaaattagtcgggtatggtggtatatgtttataattttagtaattcgggatgttgaggtaggagaattgtttgaatttgggaggtagaggttgtagtgagtcgagattatgttattgtattttagtttgggtaataagagtaaaattttattttaaaaaaaaaaaataatttttcggttgggtatagtggtttacgtttgtaatttattttagtattttgggaagttaaggtaggtagattacgaggttagagcgagatttcgtttcgaaaaaataaataaatattttttttattttttattatatagtttttgatattgttatgtgttttatttttatatatgttataaaatttatagtatattattatagttagaatttttatattagttagttgcgatggtttatttttgtaattttaatattttgggatgttaaggtaggttgattgttgaggtttagaagtttaagattagtttggttaatatagtgaaattttgtttttattaaaaatataaaaattagatgggtaattagttggacgtggtggtgtacgtttgtaattttagttattcgggaggttgaaataggagaattgtttgaatttaggaggtagagattgtagtgaattgagattacgttattatattttagtttaggtaatagagtgagatttcgttttaaaaaaaaaaattagttgggtatggtggtgtatatttgtggttttagttattcgggaggttgaggtagaagttgtagtgagtcgagattttgttattgtattttagtttggatgatagagtgagatttttgagataaataattggggttgggcgtagtagtttatacgtgtaattttagtattttgggaggtcgagatgggtggattatttgaggttaagagtttaagatcggtttggttaatatggtgaaattttgtttttattaaaaatataaaaatgagtcgggtatggtggtgcgtgtttgtaattttagttattttggagattgaggtaggaaaattgtttgaatttaggggtagaggttgtagtgagtcgagattgtattattgtattttagtttgggtaatagaatgagattttattttaaaataaaataaaaaaatataaatataaaattaaaaaaataaaaataaagggttaggtgtagttgtttatgtttgtaattttagtattttgggaggttaagatgggtaggttatttaggtcgggagttttagattagtttggtaaaaatggtgaaattcggtttttattaaaaatatataaaatggttaggcgcggtggtttacgtttgtaattttagtattttggtaggttgaggcgggtggattatttgacgtttaggaatttaagattagtttggttaaggatggtgaaattttgtttttattaaaaatataaaaattagttgggtatggtggtaggcgttgtaattttaggttatttaggaggttgaagtaggagaattgtttgaattttggttgtagtgagtcgagatcgtattattgtattttagtttgggtaatagagtgagattttattttaaaaaaaaaaaaaaaagagttgaggtttttttttattatttgtgtgaagattttagaaaatttgttttatttttttaaattttagtttttttattttttaattgttatgaggtttttgtgaggaataaatgagttgatatggatgtttttgtagttaataaaataaagggttttataaaataggtaataataataataattatttattattattatatgaagttatatgaatgtgtaagattttggaggaagatagtagagagagagagagagattagagattttagggttaaaagttggagaaattttatagtatattatttaaaagaggagtttatgatggaggtagaggtaaatttggagaggtaagaaattttgaagataggggagtgttttgtggtaggttttgtatataagaatttagtttggttaatatggcgaaatttagtttttattaaaaatacgaaaattagttaggttttgtggtaggtatttgtaattttagttatttgggaggttgaggtaggagaatcgtttgaatttgggaggtagaggttgtagtgagtcgagattttattattgtattttagttcgggtgataagagtaagattcgattttaaaaaaaaaaaaagtttagtttagttggtaagatttattaaaagtgtttatttagattttgggtgtcgtagaatgatttagagtttgaattaatatgaaatcgagaaaacgttttttgtaagggttttagggaatatttgaaattttgaagaattgtttgtatttattttgaagaatgggtgttaataagagatagtttttttttggtatttgttttttatttttaatttaattttaatttatatttttttattttatttggttttttttattttttttgtttttttttatttggttttcgttttttttaagtttattttttattttgttttataagatttgattatattaggatgtttttgtagtttataagaagatgattgggtgtttatacgtatatgagatgtgttttttttaaattttgttaagatatgggtatatatttatttgatgttaatttacggggaaaaaaatttgattatgttattttcgtgtttaaatttttatatatttttattgttttaggatagaggttggattttttagatatataagattttgtatttatgatttgttatttttataggtattttttatttttatttatttggtagttttttataatttttttgggttttcgtggttttttgttattgtaaacgtcgttttttttaggatgttttgtttttttagatttaatttggaaagttgtttttaagtttcggattgagttagatgttttttgggtatttttgttatagcgttgtgtggttgttgatagtttgattttttaattttttttatgtttttttgagggtagggaagatgagtatttttttttttcgtatagattttatcgtataagatttttttaaatagatcgaatttaaggagtttttttggttgttagtttacgtgtttcgatttggggtttttaaaatatacgtttattggaatcgggttaggggagttagtttggttaagggtttttttagttcggttaagggtttttttagttcgggagcgcgttatatgtagattttgggatggtcgttaggggtcgtcgggttttttgttttttttttttattcgggtcggggttagaggtttgtagagcgtatgttttggggtagttcgcggttcggcggggagcgtcggagttttttgtggtcgacgtgtattaaggtaggtttcgtttgggacgcgcggagggttcgggtagagggcggtaacgagcgggttatagcggagtacggtcggtttacgcggtttaagtcgttgttcgttttcgttcgtgtcgcgcggcgtcggttttacgtgaagttcggaggtaggaaggcgcggtgcgggttcgcgatttttcggtttcgcggggcgttttagcggcggttggcgtcgtttcgttcggagttagggtcgcgcggttttgcgcgcgcgtttttacggcgtcgcgtacgcgtcgtagcgacgatttaaattgcgcgagcgcgcgggtcgggttgcgcgcggtcgttcgggcgggggatgggtttttgtcgcgaggaggatggttttgttcggtatgcgtttggagaaggcggtttgtagatcggggagggagtttttgttcgggaagagggtgggtcgtaggagttcgagggtttttcgttgtgtatttttgggagtcgtgtgttttgaattatcgtagtagtttagtttgttagtagattatttgttggttatttattgcgttttttttttgcggggttgggggatagtagtgagaagagtaggttcgtgttattagcgaattatgtttttgaatttaggcgacggacgttattggtaagttatttatacgttatatattgatttaatttcgattacgtgtgatttgtgtgttttagtagaagttgagtgtgtggggtgtttacggggaagtttttagggggattttttattttgtttaggaggtttagggatggttttttaggtgaagtgatttttgaatggggttttgaaggaatagagttttttaggtagtttgagggtagtgggattagggtgatataggtagagggattgtacgtgtaacggtatgaaggtataggtattgtggttagggatattataggttttgtaggtgattggaggaggagagtaataagatgatatagtaggggtttcgggttacgaagcgttttgtgtgttaagatttaaggaattttgcggggtggaggaggtagggaagattttttttaagaagggtattagagtgaaatttggatagatgaattaggagtttacgaggtttttgttttaaagatattttaagagtaggaattttgttttgtttatcgttataatttttttattagatgtttttggtaatttatttagttttttagagtattggtttttttatttgtaaagtaatggtagggggtatgtggtgaggatataatttttttttttttgagacggagtttttatttttattatttaggttggagtgtagtggcgcgattttagtttattgtaatttttattttttaggtttaagtaattttgttttagtttgttgagtagttgagattataggaatatattattaggtttagttaatttttgtatttttttttttttagtagagacggggttttattatgttggttaggttggttttgaatttttgattttaggtgatttatttgtttttagttttttaaagtgttggaattataggtgtgagttatcgtattcggttaattttttttttttttttgatatagaattttggtttatcgtttaggttgtagtatagtgtcgtgtttttagtcgttgtagtttttatttttcgggtttaagcgatttttttgttttagtttttcgaatagtaatattttataatttttataaagtagtgaagttgtgtgtttttttttttaggaaaaatgaatatataggtttaggtataggttgtatagaacggggattttaggtgagaaatttttagtgtgaaatatattatttgtgtgtttggtataatagtagtttattaaatgtatattgttgatatatgagtttttttttttttttttttttggggattttatatatagagattttttagttttagtttggtaggtaagtttttttttttggtgtgggggacggagggtatagttgtagtggtttgggagggttttgtttttttttatagaaatcgaggttgtggtgaggttattggaggttagggtaggagtattaggtttcgggtagattgtttagattggcgtgtttatttattttttttaataaataaggaaggtgaggtgggggtagggtagttttagttttggtggagtatggttatgagattgggattttattttatttttttgtgatttgggttatttttttttgagttttattttttttttagttgtaaaattgggatgagtttgtttattttaaagggtagttgtgggtatttaggagtgtttgatggtggaagttgattttgtagtcgatttatttgtgattgttttattttttttttagagattgtatgttttttgaagatggaagttgtgttgtgtggggcggggtggggaagtatgatgttaaaagttaattttttatttttagtttagatatttattgtttggttaagaaaatagttagagaggtcgggttcggtggtttacgattgtaattttagtaatttgggaggttaaggtgggtagattatttgaggttaggagtttaagattagtttggtcgatatggtgaaatttcgtttttattaaaaatattaagtagtttagttaggcgtggtggtttgtcgtttgtagttttagtattagggaggttgaggcgggagaatcgtttgaatttgggaggcggaggttgtagtagttgagatcgtagtttgattttagtttgggtaatagagtgaggttttatgttaaaaagaagaaaagaaaagtaaataaaggaaaatatatttagagtagtgagagaagtttgtatataacgatttatttgtgtagtagaggttgtgtaggtaggtatcgggaatagggttttattttttagaaggtggttttttggtcgggagtagtggtttacgtttgtaattttagtattttgggaggtcgaggtgggtggattatgaggttaggagatcgagattattttggttaatacggtgaaatttcgtttttattaaaaatataaaaaattagttgggtgtggtggtaggcgtttgtagttttagttattcgggaggttgaggtaggagaatggcgtgaatttgggaggcggagtttgtagtgagtcgagatcgcgttattgtttttagattgggcgatagagcgagattttatttttaaaaaaaaaaaaaaaaaaaaaaaaagaaggtggttttttattttttgtttttttttgcgattgttagtttagtgtagggttttaagttttttattttggagaggaagtttttgggatttaaagacgatttaggtgtcgtttttatcgtagtagggagttgtcgttattgtttttttttatatttgtggtggatttgttattatttattttatttttttttaggttttagttgttttattgttttttttttggttttattattttttttttagttggtttttgttttttgttttttggatttggttaagtgtataggggatattggggaggtttgtttagattgttttagtttttgtttggattaaggtttgtttttagaattagttagataggtttgggttgtttttttaggttgttttttatttgttttgtgaatttaggtcgataaagttatttttttgagttttagttttttaattgtgaaataggagtgatagtgttgttttttttagttttttgtgaggaataaaagggttttgtatatggaagatatagtgagttagtcggtgttttagggtttatattttaggaagttgattggtatggtggataggtatgtaaattaaagtgattgtgatttaaaagtttgttttagttttttagagagaatgattagtttaggatggaggagggattagaggaggtgattttgagatattagtagatgtttttttagtgggataagggatgggaaggcgttttaggtaaagagatgtaaatagtatggagaggatagttagtattttggtttggtgggtttggtaaggagattgtgtgggaagagaagggaggatgtgatagataggaaatgaagttaaaggttttgttagtattcgatgttggagatttttaatatttagttaagaaatgtgggttttattttttaggaaaaggggattattaaggagtttaagtaggttagtagtttgttttaggtttgaggtttggaaagattatgaatgaggtcgggtatggtattttacgtttataattttagtattttgggaggtcgaggtgggaggattatttgagttcgggagtttgagattagtttgggtaatatagtgagattttgtttttataagaaaaaaaaaaattataaattagttaagcgtggtggtatatgtttgtagttttagttattttggaggttgaggtaggagggtcgtttgagtttaggaggtggaggttgtagtgagttgtgtacgtgttgttgtatttatagtttgggtaatagagtgagattttgttttaaaaaaaaataaatatatatatgtatatatatatatatatatatatttattgattacgaatgatttgagaatgagaggaggggatgagggtggggatcggaagattagtgaaaagttgttgttttttttagggaaaggaggaaggaaatatagttttaggtaagttgaaaaattattagggagtatggggaggaaggaagtagaagaaatttttttttttttttttttttttttgagacgagttttgttttgttattaggttggagtgtagtggcgtgatttcgatttattgtaagttttgtttttcgggtttacgttatttttttgttttagtttttcgagtagttaggattataagcgttcgttattacgtttgtttaattttttgtatttttagtagagacggggttttatcgtggtttcgattttttgattttatgattcgttcgtttcggttttttaaagtgttgggattataggcgtgagttatcgcgttcggttagaagaaatttttaataatatttaaggacggttagttttgagtttgattaattggttagattttggtttttttttaattttgagtgagatattttatttttttgagttttagtttttttttttgtagagtgggattattgtggttagtttgtagtgaaacgttttagaatattagttaaatataattaaggagatgttgattgggtttgttttatttatgataatagattttttggttaatgttttatgatattaatattttatatagtttttatgtgtttgattttatttcgggttgtgtttatggtagtttagttattagtattaattgtgttgatataattgttttttgtttttttttttgattttttattgtgagtattttttatgttaatatagttttttttttaggtatagtagattgttatagattattttgatgaattgatgagatgtttgttttggtatatagttgtttatttaaaataagggtgtttttttttttggtggagggatagagttttttttttgttgtttaggttggagtgtaatggtgtaaattcggtttattataatttttattttttgggtttaagcgatttttttgttttagtttttcgagtagttgggattatagtacgcgttattacgtttggttaattttgtatttttagtagagatggggtttttttacgttggttaggttggtttcgaatttttgattttaggtgatttattcgttttggttttttaatttgttgggattataggcgtgagttatcgtgttcggttataaagatgttttttatattttatatttttattttatttaattttgtttgtttgatattttttttgggatggtttttaagtattttagattgaatgaaaatatttagtaatatggagttttacgtttttttttttttgtttgtttaatagtgttttttattttattatatggaagtttattatttatttggttatttaagtttaagtttgggagtttttgtgtttggttaagtttatagggggattttgggtaggtttgttaagaattttttggatttttttaggatgaataaattaagttaagtgttgtggtacgtgtttatgattttaggtttttgggaagttgaggtgggaagatcgtttgagtttatgagttcgaggttgtaataagttaattgtattattgtattttagtttaggtgatagagtgagatttttttttttaaaaaaataaaataaaaggttaggtatggtggtttatatttataattttagtattttgggagtttaaggttagagaatcgtttgagtttaggagttcgggattagtttgggtaatatggtaagacgttgtttttgtaaaatatataaaaattagtcgggcgtggtggtgtatatttgtagttttagttatttaggatggtttaagttcgggtggttgaggttgtagtgagttatgattatgttattgtatttaagtttgggtaggattttgttttaaaaataaatataaaggatgaataaattatgagagtaaaaaagggttagttttttttatttttgttatatttttttatttaaagttaagtagtagtgtagtaggataagtcgtagataaaattttttagatatcgagttaaagaaggaagggttttatttagttgggagttttggtaagatttacgtttttaaaaattgagtttttcgagtgagtagtttttgttttttttaagggtttataattttaagggggtttgtatgaagaggtcgtgattgattgagtaagtaggggatatgtgattgggggttgtatgtattggttattagaacggaatagaataggatagggatttttatagtgtttttttatacgatgtttggaatttatagataatataatcggttaggttaggggtcgatttttaattagatataggtcgcggcgttaggttgtttgtttgtggattttatttttgttttttagtttttatttttttggaggtagaaattgggtataagataatatgaggggtggtttttttttttagtagtaaagtattataaatatttgtggatttataattattttatttagttttgatgatagttttgagaagtagttattgtatttttttttatagatgaggatatagtttagagaggttaaggtaattggttagttataagttttggaaggtgaatttagttttttttaattttaaagaatgtgtattttttagtgtgggataaggggttttaaaagataggtgggaggatttttagttttgggagaataaaagttgggtgaagtttagaattgttattttattagttagaattgggttagtgataatttgtagaagtttagtttgtaaaggtttattaggattttagatttttggttatttttttatttttagtatttagttttttttttttaggataattagtagaaaagtgtttggttttgtgtttatatattatggaggggagagttagagaggcgaggttttcgggaattattagaaggaaggaatgagggggttgttggttaggtttagagttgagatcgagaagggtttttggagtttttttttttttcgtaatattaggtagaggtttagataatttgattgttttttatgattttaaagattgtggtttcggtcgggtatggtggtttatagttgttgtaattttagtattttgggaggttgaggcgggtagatcgtttgagtttaggagttttagattagtttgggtaatttggtaaaattttgtttttataaaatatataaaaattagttggatattgtgatgcgtatttgtagttttagttattttagaggttgaggtgggaggattatttgagtttaagaggttaaatttgtaatgagtcgtgatttggttattgtatttgagtttgggtaatagagagtgagatgttgttttaaaaaaataaataaataaataaataaaaataagtatttgatgattttattggggttaattatgaagagattttttagtgtaagattaggattttttaatagtatatcgaagtttcgagaaattcgtttagttaaatttgataagggtgcgatgtttatgtggtttaaagtattatttttttttggtgtatttatttaggtaagacggttaaagtgggaatttattgagattgtaataattttaaagtttatatcgtgaaattttttagttttgttattagaagtaataatttttgtaggatatataaaggtgaaatttaaaggatagggttgggcgcggtggtttatatttgtaattttagtattttgggaggttgaggtgggtggattatttgagtttaggagtttaagattagttttattaatatgtgaaattttatttttattaaaaatattaaaaattagttaggcgtcgtggtaggcgtttgtaattttaggtatttaggaggttgaggtaggagaattggtttgaatttaggaggcggaggttgtagtgagtcgagattgtgttattgtattttagtttgggtgatatagtaagatttcgtttcggaaaaaaaaaaaaaaagaaagaaatttaaaggatagaagaaaagtattaaatatttttttttaaagttattaaggtttaggtttttgaattttttattgattacggttgtatttttaaaatagggcgtatcgtgggtgatattaggtgtatggtatgaggaattggtattagaattttgtttgatcggaattagattataatatgtttgttaaatttgtttttttagaagtagtaggtttgagggttgtagtggtagaaatgtttttaaggaatggtatttatatgtcgggtaattgatgtttagagtaatttttttatagtagtcgcgatttttagtgtatgtgtgtttttgtttttttgagatagtgtttgtttttttcgtttaggttaaagtatagtggtataattttagtttaatttagttttagttttttaggtttacgttatttttttattttagttttttgagtagttaggattttaggcgtgtattattatgttcggttaatttttgtaattttttggatagaaatggggtttcgttatgttgtttacgttggttttgaatttttgggtttaagcgatttttttgtttcgattttttaaagtgttaggattataggtgtggtggtattttgtttttaaaaaaaattaattaattaaataagaaaagaaaatagtttttttttttttttgattataataatatattattaaagttattggtgtttatatggggttgaatggagttatgatggatattttatttaatgttgtttttttaatgttttaattttttataatagatttaaaaattttttaaatatatgtggttaggtacgatggtttacgtttgtaatttcgtattttgggaggttaaggtgggtggattatttgaggttaggagtttaagattagcgggattaatatggagaaattttatttttattaaaaatataaaataagtcgggcgtggtggtatatgtttgtaattttagttattttagaggttgaggtaggagaattatttgaatttgggaggtagaggttgtggtgagtcgagattgcgttatggtattttagtttgggtaataagaataaaattttgttttaaaaaaaaaaaaaaaaaaaatatgtaatcggttgtacgtagtggttttacgtttgtaattttaggatttcgggaggttgaggtaggtggattatttgagattaggagtttgggattagtttggttaatatggtgaaatttcgtttttattaaaaatataaaatttgggttgggtatagtggtttacgtttataattttagtattttgggaggttaaggcggggtggattattgagattaggagttcgagattagtttggttaaattggtgaaatttcgtttttattaaaaatataaaaattagttgggtgtggtggtgggtgtttgtaattttagttattcgagaggttgaggtaggagaattatttgaatttaggaggtagaggttgtatgagtcgagatcgtattattgtattttagtttgggtgatagaacgagattttattttaaaaaaataaaaataaaataaaatttagtagggtatggtgatgtatatttgtaattttagttattcggaaggttgaggtataagaattgttttaattcgggaggtggaggttgtagtgagttgagattatgtttgtgcgttttagtttggcgatagagtgagatttcgttttaaaaaatagaaaaatatatgtaatgttttttgttaaatattttagataatataggaagataaaacgaaataagtaatgattattttataatattatttttcgaggttattattgttaatatgggatatattttttttttttatattttttttatatattttttgtgtatgtattttttttttaaaaaaaaaaaaaatggatgataggttgtttttttttttttttttttttttttttttttggttggggggtggagttttattatttttttttttaggttggagtgttgagtgtaatggtatgattttggttttattttaatttttattttttaggtttaagtaatttttttgttttagttttttaagtagttgggattatagtcgtatattattatgtttggttaatttttgtatttttttttttttttttggtggcgacggggttttattatgttggttaggttggtttcgaatttttgattttaagtgatttatttattttggttttcgaaagtgttaaagtattgggattataggcgtgagttatcgcgtttaggtttttttttttttttttttttttgagatagtttggttttgttgtttaggttggagtgtagtggttcgattttggtttattataatttttatttcgcgggtttaagcgatttttttgttttagttttttgagtagttgggattataggtgtttattattgtgtttggttaatttttgtatttttagtagagacggggttttgttatgttggttaggttggtttggaatttttgattttaggtaattcgttcgtttcggttttttatagtgttgggattatagatgtgagttattatatttggtcgtttgttttttattttgtttgttttatttggtaatggggaatatttttttatttaatagattgatttttgaaaatattatttttgatggttttatattgttttattatgaatatattatatatttagtttattattattgaatattcgggttttgtttttgttgtttttaaaatgttatgaaggatatagtagagaatatttgtgtaattaatttgtgggtgtatttattattttgtttttgggatatattttgagaagtggaattgttgggtaattttttttaacgtatttttagagtgtttgataaatattgtttgattggtttaggaaaatgtttgttattttttatatgtagtatttgattgatttttagg

SEQ ID NO: 388 - DNA, 16720 bp, Artificial Sequence
  chemically treated genomic DNA (Homo sapiens)
tttgaaagttagttaaatattatatatgagaaatggtaaatatttttttgggttaattagataatatttattaaatattttagaaatacgttaagaggaattgtttaataattttattttttaaaatgtattttaagaatagaataatggatgtatttatagattaattatataaatattttttattgtattttttataatattttaaaaataataaaaatagaattcgaatgtttaatagtagtgaattaaatatgtggtatatttatgatagaatagtatgaagttattaaaagtgatgtttttagagattaatttattgaatagaaagatgttttttattgttaagtaaaataagtagaatgaaaaatagacggttaggtgtggtggtttatatttgtaattttaatattgtgggaggtcggggcgggcggattatttgagattaggagttttaaattagtttggttaatatggtaaaatttcgtttttattaaaaatataaaaattagttaggtatagtgatgggtatttgtaattttagttatttaggaggttgaggtaggagaatcgtttgaattcgcgaggtggaggttgtggtgagttaagatcgagttattgtattttagtttgggtaatagagttagattgttttaaaaaaaaaaaaaaaaaaaaaagtttgggcgcggtggtttacgtttgtaattttagtattttggtattttcggaggttaaggtgggtggattatttgaggttaggagttcgagattagtttggttaatatggtgaaatttcgtcgttattaaaaaaaaaaaaaaaaatataaaaattagttaggtatggtggtgtgcgattgtaattttagttatttgggaggttgaggtaggagaattgtttgaatttaggaggtggaggttgaggtgaggttaagattatgttattgtatttagtattttagtttgggagaaagagtagtgaaattttattttttaattaaaaaaaaaaaaaaaaaaaaaggaagaaaaatagtttattatttattttttttttttttggaaaaaaaatgtatatataaaaaatatgtgagaaaaatgtggggaaggaaaatatattttatattaataatggtaatttcggaaaatggtattataagataattattatttgtttcgttttatttttttatattatttaagatgtttaataaggagtattatatgtatttttttgttttttgagacggagttttattttgtcgttaggttggagcgtataggtatgattttagtttattgtaatttttatttttcgggttgaagtaatttttgtgttttagtttttcgagtagttgagattataggtgtgtattattatgttttgttaagttttgttttgtttttgtttttttgaaatggagtttcgttttgttatttaggttagagtgtaatggtgcgatttcggtttatgtaatttttgttttttgggtttaagtgatttttttgttttagtttttcgagtagttgggattataggtatttattattatatttagttaatttttgtatttttagtagagacgaggttttattagtttggttaggttggtttcgaatttttgattttagtgatttatttcgttttggttttttaaagtgttggaattataggcgtgagttattgtgtttagtttaaattttgtatttttagtagagacggggttttattatgttggttaggttggttttaaatttttaattttaagtaatttatttgttttagtttttcgaagttttgggattataggcgtgaggttattgcgtatagtcgattatatgttttttttttttttttttttgaagtagagttttgtttttattgtttaggttggagtgttatggcgtaatttcggtttattataatttttattttttaggtttaagtgatttttttgttttagtttttggagtagttaggattataggtatgtgttattacgttcggtttattttgtatttttagtagagatggggtttttttatgttggtttcgttggttttgaatttttgattttagatgatttatttattttggttttttaaagtgcgggattataggcgtgagttatcgtgtttggttatatgtatttaaaaaatttttaagtttgttgtaaaaaattaaaatattgaaggaataatattaaatgaaatatttattataattttatttaattttatgtaagtattagtaattttggtaatgtgttgttataattagagggggagaagagttattttttttttttatttaattgattgattttttttagagataaggtgttattatatttgtaattttagtattttgggaagtcgaggtaggaggatcgtttgagtttaggagtttaagattagcgtgggtaatatggcgaaattttatttttatttaaaaaattataaaaattagtcgggtatggtggtgtacgtttgaagttttggttatttaggaggttgaggtgggaggatggcgtgagtttgggaggttgaggttaaattgagttgagattgtgttattgtattttagtttgggcgaaagagatagatattgttttaaaaaaataaaaatatatatgtattgaagatcgcggttgttgtgggaaggttattttgagtattagttgttcggtatgtgagtgttattttttgggggtatttttgttattgtagtttttaggtttgttgtttttggaagaataagtttgataaatatattgtggtttggtttcggttaagtaaaattttggtattagttttttatattatgtatttgatgttatttacgatgcgttttattttaagggtatagtcgtggttaatggagagtttaaagatttaagttttgatgattttgaggggaaatatttggtgttttttttttattttttggattttttttttttttttttttttttcgagacggagttttgttgtgttatttaggttggagtgtagtggtatagtttcggtttattgtaattttcgttttttgggtttaagttaatttttttgttttagttttttgagtatttggaattataggcgtttgttacgacgtttggttaatttttggtatttttagtagagatgggattttatatgttggtgaggttggttttgaatttttgaatttaggtgatttatttattttagttttttaaagtgttgggattataggtgtgagttatcgcgtttagttttattttttggattttatttttgtgtgttttatagaaattgttgtttttagtgataaagttaaggaattttacgatgtgaattttgaagttgttgtagttttagtggatttttattttagtcgttttgtttggataaatatattaagaaagaatggtgttttgggttatataaatatcgtatttttgttagatttaattaagcgaatttttcgagatttcggtgtgttgttagaaggttttggttttgtattaagaggtttttttataattgattttaatggagttattaagtatttgtttttgtttgtttgtttgtttgtttttttgagatagtattttattttttgttgtttaggtttaagtgtagtggttaaattacggtttattgtaggtttgattttttgagtttaggtgatttttttattttagtttttagaatagttgggattataagtgcgtattatagtgtttagttaatttttatatattttgtagagatagggttttgttaagttgtttaggttggtttagaatttttgggtttaagcgatttattcgttttagttttttaaagtgttgggattataatagttgtgagttattatgttcggtcggagttatagtttttaaggttatgaaaaataattaagttgtttaagtttttatttaatgttacgaagggaaggagaattttaagagtttttttcggttttagttttgggtttaattagtagtttttttattttttttttttagtggttttcgagaatttcgtttttttagtttttttttttatggtatatggatataaggttaggtatttttttgttgattattttggggaaggagaattaaatattaaagatgggaaagtaattaaaggtttagaattttgataagtttttgtaggttgagtttttgtaggttgttattggtttagttttgattgatgaggtggtagttttgaattttatttaatttttatttttttagggttgagaatttttttatttgttttttgagattttttgttttatattaaaaagtgtatattttttgggattagagggaattgggtttattttttagagtttgtggttggttagttgttttaatttttttgaattgtatttttatttataaaaggggatgtaatgattattttttagggttgttattaagattgaatgaaatggttgtaaatttataaatatttatagtgttttattattaagggaggagattattttttatattgttttatgtttaatttttgtttttaaagaagtaaaaattaaaaggtagaaatgaaatttataggtagatagtttggcgtcgcgatttgtgtttggttaaagatcgatttttgatttaatcggttatgttatttatagattttagatatcgtatggaaaagtattgtgaaaatttttgttttgttttgtttcgttttgataattagtgtatgtagtttttagttatatattttttgtttgtttaattaattacgatttttttatgtagatttttttagagttgtaagtttttaaaagggataggaattgtttattcggggagtttagtttttggagacgtgaattttgttaaagtttttagttgaataaagtttttttttttttaattcggtgtttggggggttttgtttgcggtttattttgttatattattgtttggttttgggtgaggaggtgtagtaaggataaaggagattaatttttttttatttttataatttgtttattttttgtatttatttttgagatagggttttgtttagatttgagtgtagtggtatggttatggtttattgtagttttaattattcgggtttgagttattttggatagttgggattataggtgtgtattattacgttcggttaatttttgtatattttgtagaaataacgttttgttatgttgtttaggttggtttcgaatttttgggtttaagcgattttttagttttggatttttaaagtgttgggattataggtgtaagttattatgtttggttttttattttatttttttaagagagggggttttattttgttatttaggttggagtgtagtggtgtaattagtttattgtagtttcgaatttatggatttaagcgatttttttattttagttttttaagagtttgggattatgggtacgtgttatagtatttggtttgatttgtttattttaaaaaagtttagaggatttttggtaggtttgtttaagatttttttatgagtttggttaaatataaagatttttaggtttgggtttaaatgattaggtagatggtagatttttatgtagtgagatagagaatattgttgaataaataggagagaagagacgtgaagttttatgttgttaggtgtttttatttaatttgaagtgtttgggagttattttagaaaggatgttaggtaggtaaagttagatggggtagggatgtgggatataagaggtatttttgtggtcgggtacggtggtttacgtttgtaattttagtagattgggaggttaaggcgggtggattatttgaggttaggagttcgagattagtttgattaacgtggaggaattttatttttattaaaaatataaaattagttaggcgtggtgacgcgtgttgtaattttagttattcgggaggttgaggtaggagaatcgtttgaatttaggaagtggaggttgtggtaagtcgagtttgtattattgtattttagtttgggtaataagagagaaattttgtttttttattaaaaaaagaggtatttttgttttagatagatagttgtatgttaaggtaaatattttattagtttattagaataatttgtagtagtttgttgtgtttgggagggagattgtattagtatgaaaagtatttataataagaagttaggagaaaaagtaggaaataattatgttagtatagttggtgttgatggttgggttgttatgagtatagttcggaatggagttagatatataagggttatatgaagtgttggtgttatggggtattaattaaaaaatttgttattatggatggaataaatttagttaatatttttttagttgtgtttggttaatattttggagcgttttattataagttggttataatgattttattttatagagaagaaaattgaggtttagaaaggtgaagtattttatttaaaattggagagaggttaagatttaattagttagttagatttagagttggtcgtttttgagtgttattagaaattttttttggtcgggcgcggtggtttacgtttgtaattttagtattttgggaggtcgaggcgggcggattatgaggttaggagatcgagattacggtgaaatttcgtttttattaaaaatataaaaaattagataggcgtggtggcgggcgtttgtagttttagttattcgggaggttgaggtaggaaaatggcgtgaattcgggaggtagagtttgtagtgagtcgagattacgttattgtattttagtttggtgatagagtaagattcgttttaaaaaaaaaaaaaaaaaaaaagaaattttttttgttttttttttttttatgttttttagtagttttttagtttgtttggaattgtgtttttttttttttttttttaggaaagatagtaattttttattggtttttcggtttttatttttattttttttttttatttttaagttattcgtgattaataaatatgtgtgtgtgtatatatatatatatatatatttatttttttttgagatagggttttattttgttgtttaggttgtaggtgtagtagtacgtatatagtttattgtaatttttattttttaggtttaagcgatttttttgttttagtttttagagtagttgggattataggtatgtattattacgtttggttaatttgtaattttttttttttttgtagagataaggttttattatgttgtttaggttggttttaaattttcgggtttaagtgatttttttatttcgattttttaaagtattgggattataggcgtgaggtattatgttcggttttatttatgatttttttaaattttaaatttgaagtaagttgttggtttgtttggattttttagtggttttttttttttggaagataaagtttatattttttagttgggtattagaggtttttaatatcgggtattgatagaatttttagttttattttttatttattatatttttttttttttttttatataatttttttgttagatttattaggttagaatgttaattgttttttttatattatttgtatttttttatttggaacgtttttttattttttattttattggaagaatatttattggtgttttaaagttattttttttgattttttttttattttgaattagttattttttttgagaaattgggatagatttttggattataattattttaatttatatgtttgtttattatattaattaattttttaaaatatgagttttggggtatcggttaatttattgtattttttatatgtaaaatttttttattttttataggaagttgaagaaggtagtattgttatttttattttatagttaaggaattgaggtttagaaagataattttatcggtttaagtttatagagtaagtaaagggtagtttagaaaagtaatttaggtttatttgattgattttgaaggtagattttggtttaggtaggggttaaggtagtttgggtaggtttttttagtattttttatgtatttggttaagtttaagaagtagagagtagaagttagttgaggagaggatggtgagattagagaggagataatgaggtagttagagtttgagggaaggtggggtgggtggtgatagatttattatagatgtggggaaggatagtggcgataattttttgttgcggtggagacggtatttgagtcgtttttgagttttagaggttttttttttaaaatggaagatttgaggttttgtattgggttggtaatcgtagggaagggtaggggatggagggttattttttttttttttttttttttttttttttgaaggtggagtttcgttttgtcgtttagtttggaggtaatggcgcgatttcggtttattgtaagtttcgttttttaggtttacgttatttttttgttttagtttttcgagtagttgggattataggcgtttgttattatatttagttaattttttgtatttttagtagagacggggttttatcgtgttagttaggatggtttcgattttttgattttatgatttatttatttcggttttttaaagtgttgggattataggcgtgagttattgttttcggttagaggattattttttaaaaggtggagttttgttttcggtatttgtttgtatagtttttattgtataaatgggtcgttgtatatagattttttttattgttttgggtgtgtttttttttatttgtttttttttttttttttttgatatggagttttattttgttgtttaagttggagttagattacgattttagttattgtaattttcgttttttaggtttaagcgattttttcgttttagtttttttagtgttgggattataggcgataggttattacgtttggttaagttgtttggtatttttagtaaagacggggttttattatgtcggttaggttggttttgaatttttgattttaggtgatttgtttattttggttttttaaattgttggggttatagtcgtgagttatcgagttcggtttttttggttgtttttttaattaggtagtgagtatttgggttgggaataaggagttggtttttggtattatgtttttttatttcgttttatataatatagtttttatttttaaggagtatatagtttttgggagaagagtgagatagttatagataagtcggttatagagttagtttttattattaggtatttttgaatgtttatagttgttttttgaggtgagtagatttattttagttttatagttaaggggaagatgaggtttagggaaaggtgatttaggttatagagaggtggaatgaaattttagttttatgattatgttttattagagttggagttgttttatttttattttattttttttatttattgaagaaagtgggtaggtacgttagtttagatagtttgttcggagtttggtgtttttgttttgatttttagtgattttattatagtttcgatttttgtaaaaggagatagagtttttttaggttattgtagttgtgtttttcgttttttatattaggaggaagaatttgtttgttagattaaggttgaaaaatttttgtgtgtaaggtttttaggagggaagggaggagagggtttatgtgttaataatatatatttggtgagttgttgttatgttaggtatataggtggtatattttatattaggagttttttatttgggattttcgttttatataatttgtgtttgggtttatgtgtttattttttttgggggaagggatatataattttattgttttatgaaaattataggatattattattcgggaggttgagataggagaatcgtttgaattcgggaggtggaggttgtagcgattgagagtacgatattatattatagtttgggcgatagattaagattttgtattagaaaaaaaaaaaaaattggtcgggtgcggtggtttatatttgtaattttagtattttgggaggttgagggtaggtggattatttgaggttaggagtttaagattagtttggttaatatggtgaaatttcgtttttattaaaaaaaaaaaaatataaaaattagttgggtttggtggtgtgtttttgtagttttagttgtttagtaggttgaggtagaattgtttgaatttaggaggtggaggttgtagtgagttgagatcgcgttattgtattttagtttgggtaataagagtggaaatttcgttttaaaaaaaaaaaaattatatttttattatatgttttttattattgttttatagataaggaaattaatgttttgggggattgggtgggttgttaagggtatttgatgagaaagttgtaacgatgaatagaataggatttttgtttttgggatgtttttgaaataggagtttcgtgaatttttaatttatttgtttaggttttattttgatattttttttgggggaaattttttttgttttttttatttcgtagagttttttgagttttggtatataagacgtttcgtgattcgaggtttttgttgtattattttgttattttttttttttagttatttgtaagatttgtggtatttttgattataatatttatatttttatgtcgttgtacgtgtaatttttttgtttgtattattttaattttattatttttagattgtttgaaaaattttgtttttttaaaattttatttaagagttattttatttggaaagttatttttgagttttttgggtagggtgggggatttttttgagggttttttcgtaaatattttatatatttaatttttgttagggtatataagttatacgtggtcgaagttaggttaatatgtgacgtatgaatgatttgttagtagcgttcgtcgtttgggtttaagggtatagttcgttaatgatacgggtttgttttttttattattgttttttagtttcgtaagagagggacgtaataaatggttagtaaataatttgttgatagattgagttgttgcggtagtttaagatatacggtttttaaaggtgtatagcgggagattttcgagtttttacgatttatttttttttcgggtaagggtttttttttcgatttgtaaatcgttttttttaagcgtatgtcggataaaattatttttttcgcggtagagatttatttttcgttcgggcggtcgcgcgtaattcggttcgcgcgttcgcgtagtttgaatcgtcgttgcggcgcgtgcgcggcgtcgtgagagcgcgcgcgtagggtcgcgcggttttagtttcgagcgaggcggcgttagtcgtcgttggagcgtttcgcggggtcggggaatcgcgagttcgtatcgcgtttttttgttttcgggttttacgtggggtcggcgtcgcgcgatacgggcgagagcgggtagcgatttaggtcgcgtggatcggtcgtgtttcgttgtggttcgttcgttatcgttttttgttcggatttttcgcgcgttttaggcgagatttattttggtgtacgtcggttataaggaatttcggcgtttttcgtcgggtcgcgaattgttttagagtatgcgttttgtaggtttttggtttcgattcgggtgagaaaggaaaataaagagttcggcggtttttggcggttattttaggatttgtatgtggcgcgttttcgggttgggggagtttttggtcgggttgggggagtttttggttaggttggtttttttggttcggttttagtgggcgtgtattttggaaattttaaatcgggatacgtggattaataattagaaagattttttgagttcggtttgtttaggaaaattttgtgcggtagggtttgtacggagaaaaaagatatttattttttttatttttaagagggtatggagaaggttgaaaaattagattattaataattatataacgttatgatagggatatttagagggtatttgatttagttcggggtttaagaatagttttttaagttaagtttaggggggtaggatattttaggagaagcgacgtttgtaatgatagggaattacgagaatttagggaggttgtgggaaattgttaagtagatgggagtagagggtgtttgtgggagtgatagattatggatatagggttttgtgtgtttaaggggtttagtttttattttgaggtagtagggatatatgggaatttgggtacgggaatggtatgattagattttttttttcgtgagttaatattagatgggtatgtgtttatgttttaataaggtttgagggaggtatattttatatgcgtgtgaatatttagttatttttttatgagttataagagtattttaatatgattagattttatagaataaaatagagaatggatttggggaaaacgggagttaagtggggaggagtaagaggaatgagagagattagataaaatagaagggtgtgagttggggttgggttagagatggaaaataggtattaagaaaaggttgttttttattaatatttattttttaggatggatataaatagttttttaggattttaggtgttttttgaaatttttgtaaaggacgttttttcgattttatgttgatttagattttgagttattttacggtatttaaagtttagatggatatttttgatgagttttattaattgaattgaattttttttttttttgagatcgagttttgtttttgttattcgggttggagtgtaatggtgagatttcggtttattgtaatttttgttttttaggtttaagcgatttttttgttttagttttttaaatagttgggattataggtgtttgttataaagtttggttaattttcgtatttttagtagagattgggtttcgttatgttggttaggttgaatttttatatgtagagtttgttataaagtatttttttgtttttagggttttttatttttttaagtttatttttgtttttattatggattttttttttggatgatgtattgtgaaatttttttaatttttaattttgggatttttgatttttttttttttttttgttgtttttttttaagattttatatatttatgtagttttatgtaataataataagtgattattattattattgtttattttgtaagattttttattttgttaattatagaaatatttatgttagtttatttgttttttataaaaattttatggtagttggaagataagaaaattgaagtttaaagaggtaaagtaagttttttggggtttttatataagtggtggaaggagattttaatttttttttttttttttttgagatggggttttattttgttgtttaggttggagtgtagtggtgcgatttcggtttattgtagttagggtttaagtaatttttttgttttagttttttgagtagtttgggattatagcgtttgttattatgtttagttaatttttgtatttttagtagagatagggttttattatttttggttaggttggttttgaatttttaaacgttaggtgatttattcgttttagtttattaaagtgttgggattataggcgtgagttatcgcgtttggttattttgtgtatttttagtagagatcgggttttattatttttgttaggttggtttggaattttcgatttaggtgatttgtttattttggttttttaaagtgttgggattataggtatgagtaattgtatttggttttttatttttatttttttagttttgtatttgtatttttttattttattttgagatggagttttattttgttgtttaggttggagtgtagtggtgtaatttcggtttattgtaatttttgtttttgggtttaagtaatttttttgttttagtttttagagtagttgggattatagatacgtattattatgttcggtttatttttgtatttttaatagagatagggttttattatgttggttaggtcggttttgagtttttgattttaagtgatttatttatttcggttttttaaagtgttgggattatacgtgtgaattattgcgtttagttttagttgtttgttttaagagttttattttgttatttaggttggagtgtagtggtaggatttcggtttattgtaatttttgttttagtttttcgagtagttgggattatagatgtgtattattatgtttagttaatttttttttttgagacggagttttattttgttgtttaggttggagtgtaatggcgtgattttagtttattgtaatttttgttttttgggtttaagtaatttttttgttttagtttttcgagtagttgggattataggcgtgtattattacgtttagttaattgtttatttaatttttgtatttttggtagagatagggttttattatgttggttaggttggttttgaatttttgagttttagtagttagtttgttttggtattttaaagtgttggaattataggagtgagttatcgtaattggttgatatggaggttttggttgtaataatgtattgtgggttttataatatatataaaagtaagatatatgataatattaaagattatatagtgagaaatggaagaaatatttatttattttttcgagacggagtttcgttttgatttcgtgatttgtttgttttggttttttaaagtgttgggatggattataggcgtgagttattgtgtttagtcggaagattgttttttttttttgagatggagttttgtttttgttgtttaggttggagtgtaatggtatgatttcggtttattgtaatttttgttttttaggtttaagtaatttttttgttttagtatttcgagttgttgggattataggtatgtgttattatgttcggttaattttgtatttttagtagagacggggtttttttatgttggttaggttggttttgtattttcgattttaggtgattcgttagttttagttttttaaagtgttgggattataagtgtgagttattatattaggtcgttagaaggttttttttttgttttttttttgagacggagtttcgttttgtcgtttaggttggagtgtagtggcgcgattttggtttattgtaagttttattttttgggtttatgttatttttttgttttagtttttttagtagttgggattataggtattcgttattacgttcggttaattttttgtatttttagtagagatggggttttatcgtgttagttaagacggttttgattttttgatttcgtgattcgttcgtttcggttttttaaaatgttgggataataggcgtgagttatcgggtttcgttttttttttttttgagacggagttttgttcgtgttgtttaggcgtggtacgattttagtttattgtaatttttgtttttaggtttaagtaattttttgttttagttttttaagtagttgagattataggcgagtattattatatttggttaatttttttttttttgtatttttagtagaggtagggttttattatattggttaggttggggaagatttttatattataagtgaattggtttaatattaattgaatgtggattattgtaagttaaaaatgtataatatggttgggtatggtgatttatgtttgtatttttagtattttgggaggttaaggtgggaggattgtttgagttttggaggttaagattagttgggataatattatgagattttgtttttataaaaaatataaaatttagttagttatagtggtatatgtttgtggtttttattatttaggagatcgagttgggaggatggtttgagttaggagttttagtttaaggttgtagtgagttataattttgttattgaattttggtttgggtgatagagtgagattttgttttaaaaaaaaaaagtaaatagtttaaatattttaattaaaagatatagattgttatattgaaaaatttaatatgttatttatagaaataaaatttttaaaataagggttagggtacggtggtttagttttgtaattttagtattttgggaggttagggaggcggtattgtttgagtttaggagtttgagattagtttgggtaatatggtgaaattttatttttattaaaatataaaaaaattagttaggtatggtggtgtatgttgtagtattagttgttttagaggttgaggtatgaaaattgtttgaatttgggaggtagaggttgtagtgagttgagatcgtattattgtattttagtcgcgtaaattttatttttattaaaaatataaaaaaattagttgggcgtggtggtgcgtgattgtaattttagttatttcggaggtagaagttgtagtgagttgagatttggttattgtattttggttttggtaatagagtgagatttttgtttaaaaaaaaaaaagaggttgggcgcggtggtttatatttgtaattttagtattttgggaggtcgaggcgggtggattataaggttaggagattgagattatggtatttttttatttttataaaaaattagtagggtatggtggtaggtatttgtagttttagttgttggggaggttgaggtaggagaatggtgtgaatttaggaggcggattgtgtagtgagttaagattgtgttattgtattttagtttttggaacgtagtttttaaaaaaaaagaaa

SEQ ID NO: 389 - DNA, 6052 bp, Artificial Sequence
  chemically treated genomic DNA (Homo sapiens)
tttttaagtttgttaggtatgttttcgttttagggtttttgtattggttgttgttttttattttagggtttttgtattggttgtttattttgtttggaaatttttttttttatatatttatgtggtttgttttttggatcgttttaagtttttatttaagttattgttttaatgaggtttattttggttatttatttagtgaggtttacgtttttttattttggtattttatagttattattattttttacgttattttagattgtatatatttattatggtttgttgttgatgtttgttttagtttaggatataggttttaataaggtaggggttttgttttttttttttagtagtatattttaagaatttagaatagagataggaatatagtaggtgtttaagatatgttagttgaatgttttttttttttagattttaaatagttttggtagaattggtgaaaaagaggatggatttagagaggtcggagtgtggtagggtttggattgtttatttttaaggtagttgagtaattttgggtaatatttgggggaagtttatttttttatagtacgattatatgggatatttaggggaaagtaattttttttaggaaggaaaatttaatgttgggatttaggggagtttagtttttaatttagttttgttattgatttggatttgttgtgtgatttgggataagatattatttgtttttgaaatttaattttttttttgttagataaaattagtatttatttaaaagtaataaatttttatatttatttaaaattaataaatatttacgttattgtgttggggatttatagtttgaggttaaattttttttttgttatttgttagttgtgtgttattaggtaatttaggtaatttttttgattttttattttttaatttataggtgaggatgatgatagtgattgtattataagtacgtgagttttttatttgtatggattgttttattttttatatatttgtgagtaattttattatttttttttttatgggaagttatgggaaagtggttggtatgggtcgtttagggagttgatggaaattttagggtaggttgtgtgttaggttgattttagagtttcgggttttgtttatttttttattttgttattgtattttggtttatggaaggttttgtttagttttttaattaagtgtattttggtttcggtttatttttattatttggattataattttggtcggaggtattgtaatgatttggagttgataagatattttttaggtaggataggtgtttaaagagttattttttatattaatattaattaaatttcggagttagggatagaggagaaatttgttagggttcgagaagggatgaggtttgaagggtattgagttttatgtggttatagtattaaggattattggaggaacgggaaaatagattatttatattttagatatagagtcggtgttggttagcgttttagtttgggttttttgagataaggatttgagtgtacgtggttgataaggaatttttggtagaagattaggaagggaaaacggggcgggagggtgaatgggtcgggaagggaaaggaagttaatgaagtgtgcgttattaataaagtgtgcgttgttaataaattttgcgttgttaataaagtgtgcgttattaataaagtgtgagttattaataaattttgcgttgttaataaagtgtgagttattaataaagtgtgtattgttaataaagtgtgcgttattaataaattgtgcgttgttaaagtatgcgttattaataaagtgtgcgttgttaataaagtgtgcgttattaataaagtgtgcgttgttaataaattgtgcgttatttataaagtgtgcgttgttaataaagtgtgcgttattaagtgtgtattgtcgataaagtgcgtattgttaataaagtgtgtgttgttaataaattgcgagttgttaatatagtgcgtgttgttaataaagtgtacgttgttaataaagtgtatattgttaataaagtgtacgttgttaataaagtgtgttttgttagtgaagtgtgcgttgttaaagtgtgtgttgttaaagtgcgcgttgtcgataaagtgtgtattgttaatagtgtgtgttgttaataaagtgtgtgatgttaatagtgtgtgttgttataaagtgtgcgttgttaataaagtgtgtattgttaataaaatgtgggttgtttaaatgaagtgtgcgttgttaataaagtgtgtattattaagttagatattattgttgggaaatggtattaaaaaattttttttcgaattattttatttaggggtatttataagtaaaagtttgatattatcggttgagggttgtttttgggggtaattttttgaatttgtagttttttgtaggtttttgggtttttaggttgtagtgagtcgagatcgtgttattggaatttagtttggatgatagagtaagatttcgttttaaaaaaaaaaaaaaaaaaaaaaaaaaaaaaagagtttgtgggtatagaagggtagattttagcggtgggaggttcgttagggtttttaaagtattaagagatatgggtagggttttgattgtattgttggagttagatttacgtttggtttttggggagtagtaagaggttttggttagttttgagtttatatttttttatgggggagagagagggttatttttggggtttttttcgaaattagtattttggagaggagaatatttgtgagaattttttttggattttagtagattaagttcgggtaggggttttggtgtttttttttttttgtttattagttttagtgtttgtggtgtttttagagatgttggttggatagtttttgttttttagggaggttaggatatttgttttgttttttgttttttattttttaggttagaattagttatttttttgtagttaatatttttataagatattgagagtgatttttttttattgtgataaaatatttttaatataatatttattattttaattatttttaggggtataatttagtggtattaagtttaattatgttgttgtgtagttattattattatttatttttagaatttttttatttgtttaaattttgtatttatgaaatattaattgttttttttttttttttagtttttggaaattagtattttattttttatttttgttgttgttgttgttgtttgtttgtttgtttgagatagagttttatttttgttgtttaggttggagtgtagtggtatgattttggtttattgtattttgtttttattttttgggtttaagcgatttttttgttttagttttttaagtagttgggattataggtatgcgttattatgtttagttaattttgtatttttagtagagatggggttttattatgttggttaggttggtttcgaatttttgattttaggtgatttgttcgttttagttttttaaattgttgggattataggtgtaaattattgcgtttagttgatttattttatttaagtataattttattttgttttagtatagtcgttttttttcgtgttgataaattgtgggtgttattttttatttattgtttgtttttattatttagaatgtagggtttttgtttgttttgtttaatgttgtatttttaattgtgtattgttttaggatgttttaagtatatagtaggtgtttagtaaagtaaatatgtaaatttatgaatgtggttattttagttttttttgagtttttattaggtttttatttagggataggcgtgagtataggtgtgggaaaggaagtattagtagaaaatagtagtcgtagatggagaggggtgggtaggaaggaggggttttggacgatgttagttaatgataaatcgttatttagattttaggttttttgtgatagtggggttaggtggtaaagagtttttaatacggtttttagagttggagtttaaagagttggagtattaggggttttagaaataagggaagttaattaggaaattgattttttatataaaatatttaggttttgagaatgtttaggaagaggtgagagttgtttttaaatttagatgggttgttagtggtaagaaggtgatgttaaggggttgtattagggttaatgggtaggtgttgtaaggatttttattttggcggatgtaataagaattggtttttatttttttttttatttaataagaggtgtttaatagtggtttaagttttttggtgaaagtgagtttttggttttcgtgtgtatgtagagtttaggatttatttatttatggtttgaatttttaatggatatatttattagttatttgttaagtgcgttttttttgtgttagattgtgtggcgtttagtattgtgaaagtaatgatgattaaatattatttaaataaatatatatttaataataaagtgtgaaggtataaaattagtttgttagagagagagaagttttatttagataggggattaaaggtttttttagagttttttagatattggagagagttatgagtgatgggtatgtttttagtttgtgagatcgggggagtatattttaggtagagggtatttaggaaaaatagtacggggtgttagcgttgttagggattttagtatatatggaagaaggtaaggtttagagattcgagtgatttgtttagggatataaggtaaatcggtggaatcgtcgaggggtggaggattagttatagtttttcgttttttacgttattttttggaaattagatattcgtttcgcggttaagatttattagttttaagcggcggaggttagaggtagcgaggggtgaggttagaggtgggggcgagcggggattggatatttggggagtggggaaaggggaagggggcggtatcgttgacgttattttcggggtcggggtatataagcggggcgcgagggcgttgttgttgttatcgtttttgttattgtagtgttcgagtttcgtgtaggggagtttgcgggaggatcgatcgatagacgaacgtacgtcgaggtattgcgtttttagtttcgcgtcggtgttatcgtagttcgatttcggtcgttagtttagtcgtttttcgttcggtgtttaggtgttcggttttatatcgttagttgttcggcgttcgggttcgttatgcgttcgtcgttgttttggtttttttgttttgcgtcgggtaaggtgagcgagcgcggggagttcgcgggagagggtttcgggcgtttttgtttattttgaggttcgggtatcgcgcggcgtttcgtatttttttatatttttattcgggcgcggcgagtttttagtatcgcggatagcgttttcgtttttcgtttgattttgtagtgtggttttcgtttgggatttataagatatttgggtttgatttttaatttttcggggtaatttttttttgtgtttattttttgtttgggtttggcgtttcggttgtattagggttagtgtcggttgcgcggtggtcggttaaggttattgcggggaggtgggagtatggttgttcgtaattttttattttttttttttttttattttacgtttttcgtttttttgtttttgatttttatttttttatattattttttataattttttttttttattttttttttcgttttttttatttttggggtttttttttttttcgtttgttttttattcgttttattgtgtagtttttggttttgtttgatggcgtttttcgttttaaagtatattcgttttagagtaagagtttttaaagggggagggggaggattttttagtgtagtttttggggattattttattgtgggtagtaattagggaagggaaataaaattagttttagtttttttttttggtgggggtagttttgaggggtggtattgggtgaacgggttttagtgagttcggttagaaaggattggtttttatttggagtagaggagtgattttagtattttttttttttttttagt

SEQ ID NO: 390 - DNA, 6052 bp, Artificial Sequence
  chemically treated genomic DNA (Homo sapiens)
attgggaagaagaagagagtgttggggttatttttttgttttaagtggaggttagttttttttgatcgggtttattggggttcgtttatttaatgttattttttaaaattgtttttattaaaaagagaggttagggttgattttgttttttttttttggttgttgtttatagtggggtggtttttagaggttgtattgagaggttttttttttttttttttggaaatttttgttttggagcgggtgtgttttggagcggggagcgttattaaataaggttaagagttgtatagtgggacgggtgggagatagacgaaggggagagagattttagaggtggggggggcgggggaagagatggaggaaggggattgtgagggatgatatggagaagtagaagttaagggtagaaaggcggggagcgtgagatgaaaggggaagaggggtggagggttgcgagtagttatgtttttattttttcgtagtgattttggtcggttatcgcgtaatcggtattggttttgatgtaatcgaggcgttaagtttagataaggggtgggtataagggggagttgtttcggggggttgggagttaggtttaagtgttttgtgggttttaggcggaggttatattgtagggttaggcgggaggcggaggcgttgttcgcggtgttgaaaattcgtcgcgttcgaatgagagtgtggaggggtgcggggcgtcgcgcggtgttcggattttaaggtgggtaggggcgttcggaattttttttcgcgagtttttcgcgttcgtttattttgttcggcgtagagtagaagagttaggatagcggcggacgtatggcggattcgggcgtcgagtagttggcggtgtggggtcgggtatttaggtatcgggcgaggggcggttggattggcggtcggggtcgggttgcggtggtatcggcgcggggttgggggcgtagtgtttcggcgtgcgttcgtttgtcggtcgattttttcgtaagtttttttgtacggggttcgagtattgtagtggtaggagcggtggtagtagtagcgttttcgcgtttcgtttatatatttcgatttcggaaatgacgttagcggtgtcgttttttttttttttttttattttttaggtgtttagttttcgttcgtttttatttttaattttatttttcgttatttttggttttcgtcgtttggagttggtgggttttggtcgcgaggcgggtatttggtttttaagaggtggcgtgggaggcggggggttgtggttgattttttatttttcgacgattttatcgatttgttttgtgtttttgggtaagttattcggatttttggattttgtttttttttatgtgtattgaggtttttggtagcgttagtatttcgtgttattttttttaagtgttttttgtttggggtatgttttttcggttttataggttggaggtatgtttattatttatggttttttttaatatttaggaggttttagaggggtttttgattttttgtttgagtgaggtttttttttttttggtaagttagttttgtgtttttatattttgttgttgaatgtgtatttatttgaataatgtttagttattattatttttatagtgttgagcgttatataatttggtatagaggaaacgtatttgataggtaattgatgaatgtatttattaaaggtttaagttatgggtgagtgaattttgggttttgtatatatacgggaattaggggtttatttttattaggaagtttaagttattgttggatattttttgttaggtagagggaggagtgggggttagtttttattatattcgttaaaataggagtttttgtaatatttatttattagttttagtgtaattttttagtattatttttttgttattggtagtttatttgaatttgagaatagtttttatttttttttgagtatttttaaaatttggatattttgtgtaaaaggttagttttttggttggttttttttatttttggggtttttgatgttttagttttttgggttttagttttgggggtcgtgttggaagttttttgttatttgattttattgttatagggaatttgggatttgggtgacggtttgttattggttggtatcgtttagagttttttttttttgtttatttttttttatttgcggttgttgttttttattaatatttttttttttatatttgtgtttacgtttgtttttaaatgagaatttggtgggagtttaaaggagattgaaatggttatatttatgaatttatatatttgttttgttaagtatttattatgtgtttagaatattttagaatagtatatagttgagggtatagtattaaatagaatagatagaagttttatattttagatggtgaagatagataatgaataagaagtaatatttatagtttgttagtacggaaggggacggttgtgttgagatagggtggggttatatttaaatagggtgggttagttgggcgtagtggtttatatttgtaattttagtagtttgggaggttgaggcgggtagattatttgaggttaggagttcgagattagtttgattaatatggtgaaattttatttttattaaaaatataaaattagttgggtatggtggcgtatgtttgtaattttagttatttggaaggttgaggtaggggaatcgtttgaatttaagaggtggaggtagagtgtagtgagttaagattatgttattgtattttagtttgggtaataagagtgaaattttgttttaaataaataaataaataataataataataatagaaatgggaaataggatgttggtttttaggggttgagggggaggaggaaatagttagtgttttatgggtatagagtttgggtagatgaaaaagttttggaaatggatagtgatgatggttgtatagtaatataattggatttaatgttattgaattatgtttttaaaaatggttaagatggtaaatgttatgttagggatattttattataataaaaaaaaattatttttagtgttttgtggggatgttgattgtaagaaggtggttggttttagtttggaggatagagagtagggggtagagtaggtgttttggtttttttggaggatagaagttgtttagttagtatttttgggagtattataggtattggaattagtgaatagaaggggaggggtattagagtttttgttcgggtttggtttattgggatttagggaggatttttatagatgtttttttttttagaatgttgatttcgagagaggttttaaaagtagtttttttttttttttatggggagatgtaggtttagagttggttaggattttttgttgttttttaaaagttaggcgtgaatttaattttaatagtgtagttagagttttgtttatgttttttggtgttttgagggttttgacgaattttttatcgttgggatttatttttttgtgtttataggttttttttttttttttttttttttttttttttttgagacggagttttgttttattatttaggttggattttagtggtacgatttcggtttattgtaatttagaaatttagaagtttgtagaaagttgtaagtttagggagttatttttaggagtagtttttagtcggtgatattaggtttttatttgtaaatatttttgggtgggataattcgaaggaggattttttggtattattttttagtagtgatgtttggtttgatagtgtatattttattgatagcgtatattttatttagatagtttatattttattgatagtgtatattttattgatagcgtatattttatgatagtatatattattgatattatatattttattgatagtatatattattgatagtgtatattttatcgatagcgcgtattttgatagtatatattttgatagcgtatattttattgatagagtatattttattgatagcgtgtattttattgatagtgtgtattttattgatagcgtatattttattgatagtacgtattatattgatagttcgtagtttattgatagtatatattttattgatagtgcgtattttatcgatagtgtatatttgatagcgtatattttattgatagcgtatattttatggatagcgtataatttattgatagcgtatattttattgatagcgtatattttattgatagcgtatattttattaatagcgtatattttgatagcgtataatttattgatagcgtatattttattgatagtgtatattttattgatagtttatattttattgatagcgtaaagtttattgatagtttatattttattgatagcgtatattttattgatagcgtaaagtttattgatagcgtatattttattgatagcgtatattttattggtttttttttttttttcgatttatttattttttcgtttcgttttttttttttggttttttattagggattttttgttagttacgtgtatttaaatttttgttttagggaatttaagttaagacgttgattagtatcggttttgtgtttgaggtgtgggtggtttgttttttcgtttttttaatggtttttggtattgtggttatatggaatttagtgttttttaagttttattttttttcgggttttggtaggttttttttttgtttttggtttcggggtttggttggtgttagtgtggagggtggttttttaaatatttgttttatttaggaagtgttttgttagttttaggttattgtaatgttttcgattaaggttgtggtttaaatggtgagggtgggtcgaggttagaatgtatttggttgggaaattgaatagggttttttatgagttaaggtgtagtgatagaatgaaggggtgggtagagttcggggttttagggttagtttgatatatagtttattttggggtttttattaattttttgagcggtttatgttagttatttttttatgattttttatgaggaggaggatgatagaattgtttataagtgtgtgaagagtgaagtagtttatgtaggtgaaaggtttacgtatttgtgatgtagttattattattatttttatttgtagattaggaggtagagggttagagaggttgtttaagttgtttaatagtatatagttagtaagtagtagaggaaggatttaattttaggttgtgggtttttaatatagtaacgtggatgtttattggttttagataaatgtggaagtttattgtttttaggtagatgttaattttgtttgataaaaggggaattgagttttagagatagatagtgttttgttttaagttatatagtaaatttaaattaatagtagggttgggttgagagttaagtttttttgggttttagtattgggtttttttttttggaaaaggttgtttttttttgaatgttttatgtgatcgtgttatgggggaatgagttttttttaggtattgtttagggttgtttagttgttttggagatgagtagtttaggttttgttatatttcggtttttttggatttatttttttttttattagttttattaaagttgtttggggtttgggaaggggagatatttaattaatatgttttgagtatttgttgtgtttttgtttttgttttggatttttgaaatatgttgttaaagagaagaggtaaggtttttgttttgttggagtttatgttttaggttgagatagatattaatagtaaattataataaatatgtgtagtttagagtggcgtagaaggtggtgatggttgtaaaatattagggtgggagggcgtgggttttattaaataagtggttaaggtaagttttattaagatagtaatttgagtgaggatttgaagcggtttagggagtaaattatataggtgtatggaggaagaaatttttaggtagagtgaatagttagtgtaaaggttttggggtggggggtaatagttagtgtaaaggttttggggcgggggtatgtttggtaggtttgggaa

SEQ ID NO: 391 - DNA, 6087 bp, Artificial Sequence
  chemically treated genomic DNA (Homo sapiens)
aaagtattaatttgaggaattaataaatgtttatgaaatttttataatttatgtttttttgttatggttttagtcggttttttcgtttagggtttttgatttttcgtaatatttttttttttttttttatataaatgtgttatggcgatgaaggtttgtttattttttcgattttgatgtaggattttttgatttgtttgatatattaaagataagttggttaaatagagaaatataattttaaaatttattagagtggggtttttaatagatttaattaaagtcgtggggtttagtttataaagattttttgttatttgatttaacgttttagttttaggtataatggataagtgagtttgagaggttttaaaaatttgtttttttaatttagttatgtttagtgataaattattttttttgttaagaaggtgttttttgaaagaatattgttttaatgaaagaatagagttagagtgttttagaggtagagttaaggagttgatattttattttaagtgggaattattgtaaggttttagtaggaaagtaataggatttgatttaagttttttaaagtgtattttggttgttgtgtggagaatggattgtagaggtaagagaattaggaaggaaggtaggtaggaggtttttttggggatagggtgggagttgacggtggttaggaggtggaggagatggagtaggaggtaggatgtttaataggttttgattattgagggtgaggaaagggaaggattaaggatattttttgggtgatttggagattcggataggtggtgatgttttttattgttaaggggaagaatacggtgggacgtgggaaggaatagttaataaatattaattgaagattttttgtatgtttggtgttgagggatatatagagaggtgtggagagaggttttattttgtttggttatggatagtttagttatagagatgagatgtttatatgaagtaagagaaaaaggtgtgatattaattattaagatgtagttttatgagatttggttggcgtttttttatttataaagtttttttatatattatttattcgatttatattattattaaataagataggtagtattatttttattttatagatgagaaaattaaggtttggagaggttgtgattagttttagtttagttagttaggttggatgtaaattagtagaagttttagaatttttatataggtatttgttttgtagtagggtgggacggggatttgttttgaagttttattttatattaagtatattggttttatttggtttgggttttggtagtggttgagaaaggggtgggagaagttaatggggttggaaaggagagtataaaatttatgaaagtaatttattggtgatatttattgagatatatttagttttgtttgtttttaagttagggtttttttttattttggatggaaggagttgttttaagatagtagaaggtagtatggagtatattgattgtggaagaggtaaggtttaatttagagtgatttttgtaggatttgagggttagggagggtagttttaggagggatataatttaggagtaaaggtgtggtgggttgttaattgaagtttgttgaaggtattagagattttttagttttatatatgggtaatttgtattggtggttgggatttgtttatttaggtgggaattttgggttagtttttggggaaggtttttttttagttttggtggatatgggtttgttttttgtttttaggttttagtttttaggtagggatttattttttgaaattttgtaatttaggtttggttattaggtgagtttaggatgtgttttattagattgaggtatattgtaaaataaatttaggttggtaaggtattgtattttttttttttttttttagttatgtttagtgtttttttatatagagttttttagtagagattatttttatttgtttattttaattagtggtttttaatcgataggatatagagtttttaatgatgttttattgtttttgtatgtatcgtgggtagtttttttattgagaggttttattagtgaatatttggtgtgtttgttataatttttttttttttttttttttgtttagtaatttatttatttttaaagttttgtttaagtattattttattggtttttttattttattttggttggtgtttttttttgagtttttttgttttttgtgtttatttttatttattacgtgttatttttgttgtatatggtgtgaggggtttaattttgattttttttagattggtagataattaagttattggtatttataaaatattttttttttatttatttgaattgttatttttattgtatatattttttttatatatgtttagatttatttttgtttgtttgttttggtggtaattttatgttattttaattttaatggaattataataagttttgtatagtgtgttattattattattggttttgtattttagttgataaaaattgatatttgttatgatattgttttttcgtgtaagaatatgtttagattttattgtaaatttatattttgtgggtaagttttatagattttattattaaatttattattgttattaaatttatttataaatattttatagattttgatatttttgtgaattagatattttttttatttttatttttaattggttattgttaatgtagagaaaagttatttatttttgtatatttattttaaatttagttatattattaaattttgttattatttttgatttgtttttttagaaaatttaaagataataggggatggggtagtgtttggagaaatttagattttgggtattgtagtgtatgtttttttggggatatgaggtatagcgagaaatttatgaaattgataggttagttgtgtatatggaggcgggggcgagataaggtggtttttaattttttagagaagtttttttttttcgaggtttaggattttttagtttttatttttgtattttatttttatttttttattattaaggagttgaggtatttttgtatattttaggtgattttgaataggtttttttgtaggatttttaagagaaagggttgattatagtagaaatagaagttatgattgtagtagggaaagggaggatttagggttggtttatttgagtgttgaggtttaatatttttaggggtttcgaagaggttattagagttttttgatatttttagattagtagaagtggtagtatttggtagaattaggaataatagtagttattatggagtgcgtttttaatagttttttgaggatttttttttatagatgaagaaattggagtttagggaaattaaggaatttattttagtttatatagatagtaaatggtagaggaggaatttaaatttaggaatttaattttatagtttgtcgtatttaatatttttacgtggttatttaggttatttatgttaagtttatcggttaaagattggattttttagaaattgtagagtttttttagggattttggagtttatgtatatattagatattgtttgtagatattatagtaatatgtgtttatttgggttttgtggtgaattgaatggtgatttttttttatttttcgtaaaggataattttatttggaattttagaaggtgattgtatttgtaataggggtttttgtaaatgtaatgaaggtaaagattttaagatgagattattttggattagaatgttttttttagagatagaaaggaggggatatatagagatatagcgaggaagggcgtgtaaaaatggaggtaggtagaggttggaacgatgtcgttgtatgtttaggaatgttataggttattcgaagttggaagttgttgggaagtattcgtttttggagttttcggaggaagtatggttttgttaattttttgtttttaggtttttgatttttagaattgtgaaagaataaatttttgttgttttaaattatttgtttggtggttatttgttatagaagttttgggaaatcgatataaatgtttattatttttttgtttttttttttttgtttttttttttttgatggagttttatttttgttgtttaggttggagtgtagtggcgcgatttcggtttattataattttcgttttttgggtttaagtaatttttttgttttagtttttcgagtaattgggattataggtatgtgttattatgttaggttaattttgtatttttagtaaagatggggtttttttatgttggttaggttggtttcgaatttttgattttaggtgatttatttgtttcggttttttaaagtgttggaattatatgtgtaagttattatgtttggtttaaatgtttattattattattttttataagaaatataggtattttaagttattattaaatttatagttattatttattattatttatttttttttattaatggatatgtaattattattattatgaaaagtaaattatatttgtaattttattattttttagatggagaaatagtttgagagagggtagtggagaagtaagagagttggtttggaatttagttgtttgattcgtgagttatttttttttttttaaagttttattaagtttggggttgtttatggtttttattaattatataaagaaagttagggttatgtttatttattaggaggtttagggttatttttcgtttttttttgtttggtaatattaagagttattttttgattgttttagaaaagtaagaattgttaaaggttattgtgttaagtttgtttaatttatgttgtttgatattttatttttttttattttgtttttattttttttatttagtgtttttgattgtaatatttttggttggggtgggatagggtggttagataaaagtagagtaggatttggaaagttggtttgtatgggttgtagtttgtcgttgagttgtattatggtgcggtttgtggtttgggtaggtgagtcgtcggatagtgggttgggtttcgggagttgtggggaggtggggatgtggatgtttagggattatttgttattatttgtaaggaagtaggaggatttaggagaattttagagggttattttatttttttttatgttttttggtttgtagttttttgattattttttttgtgggtttttttttaggtttttttagtttaagagattttatgttgtaagggaaggttttttttaataggttgaagatgatttgatttttttttttttgttttgaaagtttagagttaatgaggtttttgtattgggtttttgtgttttttttatgtttttaggttttttttgttggttttatttaagaagcgtttattgttaagaattttttttttaattttatattgtttgttttgtaagagggtagtttggggttaagattttgggtatttttgtaaatttttatggaggttttattaggttgatagagaagtttaaggttattaggtgaaagagattttttcgaaggagttttgttagattttaggtttttaaggttgtggttgtttattatagttaggtagcggaaaggtaataggaagttataaacgatgggagtagaggtataggttttttttaggagatgaattttttttatgtagtttttttagattgattttttttagttttaaaataggtttgttttttgtttcgaaagagaaattatttttttaaataatttataagttagtagtttttttataatttttttgaatttatattgttttttattgaggtatagagagggggtagttttagtttatggaattttttattagtttttaggattaatttaggttaggaagagattttcgtggtttggtttgtatgaagggatgggtatagtgtttttttgggttttttttgaaaggagaaagtttgatttgtatgaaattagttttttttgattattttttgtgttttcgtaagttgtggggtttgggaaggtgagaatggtagtataattttggtttttttttttgtgttgttttagg

SEQ ID NO: 392 - DNA, 6087 bp, Artificial Sequence
  chemically treated genomic DNA (Homo sapiens)
tttggagtaatataagagagaaggttagggttatgttgttatttttatttttttaggttttatagtttacggaagtataggaggtggttagggagggttgattttatataaattaagttttttttttttagaagggatttaggagggtattgtgtttatttttttatgtagattagattacgggggtttttttttggtttgggttggttttagaagttgatggaaagttttatgggttgaggttgttttttttttatattttagtaaagggtagtgtggatttaggaagattgtggaaaaattgttgatttgtgagttatttagagagatagtttttttttcggaataagaaataagtttgttttggggttagaaagaattaatttggaagggttgtatggagagagtttattttttggggagggtttgtgtttttgtttttatcgtttatggttttttgttgttttttcgttatttggttgtggtaggtaattatagttttggagatttagggtttgataggattttttcgaagagattttttttatttggtgattttggatttttttgttaatttaatagaatttttatgaaaatttgtaaggatgtttaggattttggttttaggttgtttttttgtaggatagataatatgaggttggagaagaggtttttggtagtgggcgttttttggataaggttaataggagggatttaagaatatgggaaagatataaagatttagtgtaggggttttattgattttgggtttttaggatagagagaggaaagttaagttatttttagtttgttgagaaaagtttttttttgtaatatgaagttttttgggttgaaagagtttaagggggagtttataggaaaggtaattaagggattgtaagttaggaggtatggagagggataaaatgattttttgaagtttttttgagtttttttgtttttttgtaaatggtagtaagtggtttttgaatatttatatttttatttttttatagttttcgagatttagtttattattcgacggtttatttgtttaggttatagatcgtattatgatgtagtttagcggtaggttgtagtttatataaattagttttttaggttttgttttgtttttatttggttattttgttttattttagttaggagtgttgtaattaggggtattgggtgggggggatgggagtagggtggggaggggtaagatgttaagtagtatgaattgggtaaatttgatataatggtttttagtaatttttgtttttttggaataattagagggtgatttttagtgttgttaaatagaggaaagcgggaagtggttttgaattttttgatggatgagtatgattttgattttttttgtgtagttggtgaggattataagtagttttagatttaatagggttttggaggaagagaaatgatttacgagttaggtagttgggttttagattagtttttttgtttttttattgtttttttttaaattgtttttttatttagaagataatggggttgtaaatataatttattttttatgatagtaatagttgtatatttattgatggagaaaaatagataatgataaatagtgattataagtttggtaatggtttgaaatgtttatgttttttatgaagaataataatggtggatatttgggttaggtatggtggtttatatatgtaattttagtattttgagaggtcgaggtaggtagattatttgagattaggagttcgagattagtttaattaatatggagaaattttatttttattaaaaatataaaattagtttggtatggtggtatatgtttgtaattttagttattcgggaggttgaggtaggagaattgtttgaatttaggaggcggaggttgtggtgagtcgagatcgcgttattgtattttagtttgggtaataagagtgaaattttattaaaaaaaaaaaaataaaaaaaaaaaaatagaagaatggtggatatttgtgtcggttttttagagtttttgtaataaatggttattaaataggtgatttgaaataatagaagtttatttttttatagttttggaggttagaagtttggaaataaggagttggtagggttatgtttttttcgaaggttttaggggcgaatattttttagtagtttttagtttcggatggtttgtggtatttttgggtatgtaacggtatcgttttagtttttgtttgtttttatttttatacgttttttttcgttgtgtttttgtatgtttttttttttttgtttttgagaaggatattttaatttaagatgattttattttgagatttttatttttattatatttgtaaagatttttattataaatatagttattttttgagattttaggtgaagttattttttgcggggggtgggagggggttattatttaatttattataggatttaagtgggtatatattattgtaatgtttgtagataatgtttggtgtatgtatgaattttagggtttttgagaaagttttgtagtttttaggggatttagtttttggtcggtgggtttaatatgaatggtttagatggttacgtgggaatattgggtgcggtaggttgtggagttaggtttttgagtttgaattttttttttgttatttattatttgtgtaaattgaagtgagttttttaatttttttgaattttagtttttttatttgtaaaggggaatttttagaggattgttgggaacgtattttatggtggttgttattatttttggttttgttaagtgttgttatttttgttggtttaggggtgttagagggttttagtaattttttcgaggtttttgagagtgttggattttagtatttagatggattagttttaagttttttttttttttgttgtagttatggtttttgtttttgttgtggttagtttttttttttggggattttgtaaaagagtttgtttagggttatttgagatgtgtagaggtgttttagttttttggtggtgggggagtgagagtgggatgtaggagtgaggattgggaggttttgagtttcggggaggagaggtttttttggagagttaggggttattttatttcgttttcgtttttatatatataattgatttgttagttttatgaatttttcgttatgttttatgtttttaggaggatatgtattgtagtgtttagaatttgagtttttttaaatattgttttattttttattgtttttaggttttttagaaaaatagattaaaaataataatagagtttggtaatatggttggatttaaggtgaatgtataaaaatgaatagtttttttttatattagtaataattaattagaaatagaagtgaaggaaatgtttgatttatagaagtgttaaaatttataaaatatttataaataaatttaataataataataagtttaatagtagaatttataaaatttatttataggatataaatttgtaataggatttgaatatgtttttgtacgggaaaataatattataataaatgttaatttttgttaattaaaatataaaattagtaatgatggtgatatattatataaaatttattataattttattgggattaaaatagtatggaattgttattaggatagataaatagaggtaggtttgagtatatatggagagggtgtgtgtaatgaaggtagtagtttaaatgaataagaaaaagatgttttataaatgttaatgatttaattgtttattaatttggaaagaattaaagttaggttttttatattatatatagtagaaatgatacgtggtaaatgaaggtgggtatagggagtaaaggagtttaaggagaaatattagttagggtggggtgggaaagttagtggagtgatgtttgaatagagttttgagaataagtaggttgttggataaagagagaaagggaaggaagttataataaatatattagatgtttattgatggagttttttagtgaggaaattgtttacgatatatgtagggatagtgggatattattaaaaattttgtgttttgtcggttgagaattattggttgaggtaggtaggtgggggtgatttttgttgaggggttttgtgtaaaagggtattggatatggttggagggagaggagagagatataatgttttgttagtttggatttattttatagtatgttttagtttagtagggtatattttgggtttatttgatggttagatttgaattgtaagattttaaggaataagtttttgtttggaggttgagatttgggagtagaaggtaggtttatgtttattaaagttggggaggagttttttttagggattgatttagagtttttatttaagtaggtaggttttagttattagtatagattgtttatgtgtagaattgagaggtttttgatgtttttagtaaattttaattaatagtttattatatttttgtttttaaattgtgttttttttggggttgttttttttggtttttaagttttatagagattattttgagttaagttttgttttttttatagttaatgtattttatattattttttgttattttggaataattttttttatttagaataggaaagaattttggtttggagatagatagaattgggtgtattttaatggatattattaataaattatttttatagattttatatttttttttttagttttattggttttttttattttttttttagttattgttaaagtttaaattaagtaaaattagtgtgtttgatataaaatgaggttttaaagtaagttttcgttttattttattgtagagtagatgtttgtatagaaattttaaagtttttgttgatttgtatttaatttggttggttgagttggggttagttatagtttttttaagttttggtttttttatttgtaaaatggggataatattatttattttatttggtaatgatgtggatcgaatagataatgtgtgagagggttttgtaggtgggaggacgttagttagattttatgggattgtattttgatggttggtattatattttttttttttgttttatgtgagtattttatttttgtagttggattgtttatagttaggtagagtggggtttttttttatatttttttatgtgttttttagtattaagtatatagggggtttttaattaatgtttgttaattgtttttttttacgttttatcgtgtttttttttttagtagtaaaagatattattatttattcgggtttttaagttatttaggaagtgtttttgatttttttttttttttatttttaatgattaggatttattagatattttgttttttgttttattttttttattttttaattatcgttaatttttattttgtttttagaagagttttttatttgtttttttttttaatttttttgtttttgtaatttattttttatatagtagttagagtatattttgagaaatttaaattagattttgttgtttttttgttaagattttgtaatggtttttatttaaaataaaatattaattttttaattttatttttagaatattttaattttatttttttattaggataatgtttttttaaaggatatttttttggtagggaagataatttattattggatataattaaattaaaaaaataaatttttgaagttttttaggtttatttatttattgtgtttggagttgaggcgttagattaggtggtagaaaatttttatggattaaattttacgattttgattaagtttattggaggttttattttagtaaattttggaattatgtttttttgtttaattagtttgtttttagtgtgttagataagttaaagaattttgtattaaaatcgagagaatgaataagtttttatcgttatggtatatttatataaaaagaaagggagagatgttgcgggaagttagggattttgaacggagggatcggttgaagttatggtagaagaatataaattgtgaaaattttatggatatttattagttttttaaattaatatttt

SEQ ID NO: 393 - DNA, 6079 bp, Artificial Sequence
  chemically treated genomic DNA (Homo sapiens)
ttttgataaaaataaatgtaaaaatgtttttgtattgaaataaaatattatagtaaaaataaattgaaataataagatataaataataggagaaattatttgtataaaaatagtaaattattttaaaatttgattatgaatagttatgtaataaattttggggtgaagttttgttagtaaatttagtggaaatagtttatttttggagattaaaatatgtttttaaataatatttttatattaaaaatgaaaaattaaatataattaaatgtaaaataatataatattgttaattttaatgtgtttgaattttttatttgtgcgattatattgaagatttattatatttaaattttggggataaaaaatagaagaaaataagttaatttattgaattataaatttaaatgagtagtatttatatttaattttttttatgtgtgtgtttgaatatgtataggtaattttaattaattggaagatcgtttgataaaatattgggaaattttgtaattaggttattgaatatttagtttaattatgttggtatgtatttttatttgtttttaatgttaaggatttattggtaaaatgaatgtttattttgtggtttgttatgtagaaaatgtttaatttagtgtttgatttattttgttaaattttttttattgaatgtgtttatttatttatgtaaaattgggtatgttgttttttgttattatgatattataattaaatagttaaaagaagaatagtaagattttttataaaggttgatgaaatttttataaaattatttagtttttttgttttgtttcgttttgttttgttttgtagggattatgaaaaatgtaaatgtgttttgaatatttttgtattgaagaagttgataaatataatagttagtataaataattattttgttattaaaattaatatttaaaaaatatttttaatatatggaaataattgttgttatgatattgattattttttaaagatggaattgaatatgaatttaaagattttaattttataaataaaaatggtatgatagaatagtatttatatatatttgaaatggaaaattttaagttaattttatttggatatattgtgaaattttttaagggggttgtatatttataatagtattagtttatgtaatttgaggatattttttagtagattggattttttttatttttagttttgttttattgtttagagtattggtattggtaaatttttattattattataattataggtttggagatatattttttaatttaaaattagttttaatattagttttgaattgaaaaaaattttttataagtttggaatttataataagatgtaataatttattttttgaattattattgtttattttttatagtgttaagagatatatatttatataaatataattattttttaagaatttttttttaattgaaatgtttgaaatgagataaagaatttagaaattggatgttaaggatgtttagtaagtatttttgaaatttaatttaaggaagttagaaaaacgatttaagatttgatagatgaagtagttatattaataaataattaaattgaatttttgaaattggaaaatttattataggaattttaaaatatagttgaatgttttaataatagattagataaagtagaggaaagaattttggtgtttgaagattggttattttaattaatttatatagataaagaaaaagaaaaaggagttttaaaaaatgaatgaagtttcggagagatatgggattatgtaaaatgattaaatttataatttattggtatttttgagagaaaagaagtgatagtaagtaagttgaaaaatatattttaggatataatatatgaaaaattttttaattttgtaagagaggtcgatatgtaaatttaagaaatttagagaatttttgagatatattatgtaagatgattatttttaatgtatatagtttttggtttagtggggtggtttacgtttgtaattttagtattttgggaggttaaggcgggcggattacgaggttaggagatggagattattttggttaatatggtgaaatttcgtttttattaaaaatataaaaaattagtcgtgtgtggtggcgggcgtttgtagttttcgtaattcgggaggttgaggtaggagaatggcgtgaattcgggaggcggagtttgtagtgagcggagatggcgttattgtattttagtttgggcgatagagagagatttcgttttaaaaaaaaaaaaaaaaaaaaaaaaagatgtttttagaataatagaatagatgtaatttagttgttttgttttacgttttttttattgtaattattaatttttatatttatttttattttgtataaagtttataaaaatatatttgaaataaaaggtatttggagtattttttttatgtataagattgaaatttttttaatgtagtaattttttttatgtttagaaaagggtatgaataagttttataataattttagagaaagaatagtaaaatataagttggtaatattatttttttgaggattgtgttttttatttttaggggaaaaaaagaaggttttaaattaagggtagtatagattggaaaatttatgttatagagtaattatttgtttattttgttttattttattaaatgtaaattttatgaagataggggttgttgtttgttttgtttattgttttaattttagtatttaaaatagtgttttgtatatagtaggtgttgaatgaatatttgaggaataaataaattaatgaattgtatttttatggtgtgattgttagaaaatttttgaatttttagaaggttagtgatatttatattgaaaagtatatgtatgtagtttatatatttcgtatatatgaataaatgtatataaatatatatttaaagtatggtagaaatatttttatttattaggtttttaattatttatttgtggttttttattattagagaagattttggaaagttttttgtgtttattttgagaaatttatttgtttttattttttattgttttattaagagttttataaataatatttgttttatttttgataatattaaaaatttgttttatatattaaggtaaatgataaagtggtttattgaatagtatattatattttttaggggaatttgttttatagaaaatattaattaaagattatattttaagagagttgtgtaatataattggatgatttataaaagaaagtaatgaaatatgtataatgttgttaatgattatggtaaaatgtaagagaaatgtagtaaaaagcgtattaaaatatattttaaagtatttttatgtaaatatttataattaatggatattgaatattttttaaatataagatatatgatagtggtgggtagatataaaggtaaagatggtaagtattatgaggatagggattcgttttatttatttattaggggagttaaaattaagtttggtttagtaaatatttattaaatttttattatgtatcgggtttaggttaggtgtaggagtgaaaaagataaatgagatttggtgtttgttatgttgtataggggtttataattatggtattgtatgtttgggtgtgtatttttgtgtggatatatggggatatgtgtattttataggaatcgttataaatgtagtatggcgggttaagataaagtttagtattatgtagggaaatagtttatatacggagacgaaaggaggaggaggtggaagtttagcgatattttgggaataattgttagttagagaatgggaagattattttatgttgaaagaatagtatgagcgtggttagagattggaaagaaaataatgtttggggaattataagtattttagcggataggtggtgttagggaaggtttattattgtatattatttttgatttattttgaaatttttgtaaaataattatataagaaatttttgtcgttaaaaaagtatttttttttatttttagtatttttttttttttgttttggtgttgttagatagcggagtattaaataatcgggggtagggtggggggcggttggagggaagcggtgggaggcgatagattttgaagatatttatgagagttatgttagttgttagatatagacgatttaaagttttttattagatataattattttaatataaagattattttattttaattatttttacggtagtttatggaaattaatagattggaaattaaatgtaaattaaggagaattttatatgaatttatttagttggtgcggaaaatcgaatttagatttaatagacgtttatttagcgtaattatgtttttatatatttttttttttttgtaaagtaaggttaatttattgttcgagtggttgtttggattaattggaataaatacggacgcggtgggagttttattttggcgaaattagggtgagaggttttttgtgggtttttatcgaggagatatggaaacgaaaaagatatggaatatattttgaaagtattggtgtgaaaaattatgtttcgagggttaatacgaaagtatagaaacgatggcgggaaatagttttttaggttggaatgaaagttttttttgtttatagagtaaatcgtttttaattttatttcgtttttcgtgttttttaataattttgttttagtattgttaaggggtatttaagttttttatatttattttagttaacggaataaaaatttatattttttttttattttaattttttaggttaaatgagttatagtatttagtttggaaaatgagtcgagtttttaatttacgtgtaaatattttaaatataatattgtagtcgtttgtttggattttttatttaagaattataatatttagaatgtattgttttttttttcgttttttacggagggaatgtttaatttgattttatttttataagtaatagttatatgatacgtttttcgttaagatggcggatatttttttttcggagtttgatgtgatcgtaatagggacgggtatgtgtagtttggtgttttttggataaagtttaggaagattgttttgtttttgttttttttgttagtggcgagttttgggataaatatcgtgggtcgagagtgggagggagaattgaaaggaagtgaggtagttcggagttagcgcgggagttggtagttatagggaggggttgggattcgtagtgtttatcgttatttgagtaggggttgatttggtcgatgttgattgttgaggttggttgttgcggtgatttttgttaatttttttagagggaagtggatgtgtagtgttatgaaatggagggtcgggattttattaacggagacgattttggtaagatattatgattttttttttattgattttaaggtgatattttttattattttgtttcgttattttataggatttttttatagatttgtatgattttagtatatatcgtagtttagatatagtttaatttttagttttataagaaagatgtttaattattgtttatgtgcgtatgaatttattagggaaagtaaacggattttattttgttgagaaatttagggaattttattttgttgaggtagttattatttttgttttatggtgtttaaagtattttgttttttattattaataattaaatgtgttgagaataaggttttgagttttagtttaggtgtgtgattttatttaatttttgttttttcgtcgtttgttttttatgttttgggtggaattagaaatttttttgtagtttttagttgatatatttagtgtataatacgtagtagaatatatatggtagtaattttaattttttttaatagtgtaagggatgattattttagatggaatgaaataggttgtttgatggggttttttattgtttgtagaatgtggtaggttagagaagttttggtggatgggattttgtttattgtgttaatgaatttagttcgttgtttttttatatagttatgattaggagtagttatgttt

SEQ ID NO: 394 - DNA, 6079 bp, Artificial Sequence
  chemically treated genomic DNA (Homo sapiens)
aaatatggttgtttttaattatggttgtatgagaagataacgaattgaatttattaatataatggatagggttttatttattagagtttttttggtttattatattttataaatagtaaaaaattttattaaataatttattttattttatttaaaatgattattttttatattattaaaaaaaattgaaattgttgttatatgtgttttgttacgtgttgtatattgaatatgttaattagaaattgtagaggagtttttggttttatttaaaatatgaagaataaacgacgggaaaataagagttagataaggttatatatttgaattggaatttaggattttatttttagtatatttagttattgatggtagaaagtaagatgttttaagtattataaagtaggaataatggttattttaataaaataaaattttttaggttttttaataaaatagaattcgtttattttttttagtaaatttatacgtatatgggtaataattgagtattttttttgtaaaattgaggattaagttgtgtttgagttgcgatgtatgttaagattatataaatttatgaaaaagttttatgaaatggcgagataaaatgatggggaatattattttgaaattaataaggaaggaattataatgttttgttaaagtcgttttcgttgataaaatttcgattttttattttatgatattgtatatttatttttttttaaggaaattaataggaattatcgtagtaattaattttagtaattagtatcgattagattaatttttatttaaatggcgataagtattgcgggttttagtttttttttgtaattgttaattttcgcgttgatttcggattattttatttttttttagtttttttttttattttcgatttacgatgtttgttttaaaattcgttattgatagaaaaaatagaaataagatagtttttttaaattttgtttaggaagtattaggttatatatattcgtttttattacgattatattaaatttcgaagggagagtattcgttattttgacgggaaacgtgttatgtgattattatttgtggaaatgagattaagttaggtatttttttcgtggaaggcggaaaagaaaatagtgtattttgggtgttgtagtttttgggtggaaggtttaggtaggcgattatagtattatatttaaaatgtttatacgtaagttaaaagttcgatttattttttaggttgaatgttgtagtttatttagtttggagggttgaagtaggaaagaaatgtagatttttatttcgttagttaggatgaatgtgggagatttggatattttttgataatattgaagtaaaattgttaggagatacggagagcggagtgaaattgaaggcggtttgttttgtgaataaaggagatttttattttagtttaaaaaattgtttttcgttatcgtttttgtattttcgtgttggttttcgaggtatggttttttatattaatatttttagaatatattttatatttttttcgtttttatgttttttcgatgaaaatttataaaaaattttttattttagtttcgttagaatggaatttttatcgcgttcgtatttgttttagttagtttagatagttattcgggtaataaattagttttgttttataggagggaaaaaatatatgaaagtatggttgcgttggataagcgtttgttgagtttgaattcgatttttcgtattaattagataagtttatgtaagattttttttagtttatatttagtttttaatttattagtttttataagttatcgtagaaataattaaggtaaaatggtttttatattaaagtgattgtatttgatgaggggttttaggtcgtttatgtttaatagttaatatagtttttataagtatttttaaggtttgtcgttttttatcgtttttttttaatcgttttttattttgttttcgattatttaatatttcgttgtttgataatattaaagtaaaaggggaaggatgttgggaatgaaggaggatatttttttgacgatagaaattttttgtgtagttattttataagagttttaaaataaattaaagataatgtgtagtagtgggttttttttgatattatttattcgttaagatgtttgtggttttttagatattgttttttttttagtttttgattacgtttatgttgtttttttagtatggaatgatttttttattttttagttaatagttatttttaggatgtcgttgggtttttattttttttttttttcgttttcgtgtgtgggttgtttttttatatggtgttagattttgttttaattcgttatattgtatttatgacgatttttatagagtatatatatttttatatatttatataaaaatatatatttagatatgtaatattataattataaatttttgtatagtatgatagatattaagttttatttattttttttatttttgtatttaatttaagttcggtgtatagtaggaatttaataaatgtttgttaaattaaatttgattttgatttttttaatagatggatgagacgagtttttgtttttatagtgtttattatttttgtttttatatttgtttattattattatgtgttttatatttagaagatgtttagtgtttattaattgtaaatatttatatgaaaatgttttaaaatgtattttgatacgttttttattgtattttttttgtattttattataattattagtaatattgtatatgttttattatttttttttatagattatttagttgtattatataatttttttaagatatggtttttgattagtattttttgtaaaatagatttttttgagaagtataatgtattgtttagtaaattattttgttatttgttttggtatgtaaagtaagtttttagtattattagaagtgaaatagatattatttgtgagatttttgataagatagtagaaaatggaaataaatggattttttagagtaaatatagaaaattttttaaaattttttttaataatgagaagttatagatggatggttaaaaatttgataaataaaagtatttttattatattttggatatatatttatatatatttgtttatgtatacgagatatataaattatatatatatattttttaatatgagtattattgattttttagggatttagaaattttttgataattatattatgaagatgtaatttattaatttgtttattttttaaatatttatttagtatttattatgtgtaagatattattttggatgttgagattagagtaatgaataaaatagataataatttttgtttttatgaagtttatatttagtagggtaaaataaaataaataagtaattattttgtagtatagattttttaatttgtgttgtttttagtttgaaatttttttttttttttttaaggatagaaagtataatttttagaaggataatattattaatttatattttgttgttttttttttaaagttattatgggatttatttatgtttttttttgggtatggaaaagattattatattaggaaaattttaattttgtgtatggagaaaatgttttaaatattttttattttaaatgtatttttgtagattttatgtaaagtaaagatgaatataggagttaataattgtagtaaaaaaagcgtaaagtaaaatagttgaattgtatttattttgttattttaaggatatttttttttttttttttttttttttttgagacggagtttttttttgtcgtttaggttggagtgtagtggcgttattttcgtttattgtaagtttcgtttttcgggtttacgttatttttttgttttagtttttcgagttgcggggattataggcgttcgttattatatacggttaattttttgtatttttagtagagacggggttttattatgttagttaagatggtttttattttttgatttcgtgattcgttcgttttgattttttaaagtgttgggattataggcgtgagttattttattgggttaaagattatgtatattggagatagttattttgtataatatgttttagagattttttgaattttttgaatttgtatgtcgattttttttgtaaggttggggaattttttatgtattatattttgaaatatgttttttaatttgtttattgttatttttttttttttaggaatgttaatgagttgtaggtttgattattttatataattttatattttttcgaggttttatttattttttgaaatttttttttttttttttttgtttgtgtaggttgattagaataattagtttttaagtattaaaatttttttttttgttttgtttagtttgttgttaaggtatttaattgtattttgaaatttttatagtgaattttttaattttagaagtttagtttggttatttattaatatgattgttttatttgttaagttttggatcgtttttttggtttttttggattgaattttaaggatgtttattgagtatttttgatatttagtttttgaattttttgttttattttagatattttaattgaaaagagatttttagaaaatagttgtgtttgtatgaatgtgtattttttaatattatgaaaaataagtaataataatttaggaagtagattattatattttattataagttttagatttataaagaattttttttaatttagaattagtattaaagttaattttgaattaaaaaatgtgtttttaagtttgtagttgtagtggtggtaaaaatttattagtattaatattttggataataaaatagagttaaaagtaaagaaagtttagtttattggagaatatttttaaattatatgaattagtgttgttgtgagtatataatttttttgaggagttttataatatatttagatgaagttaatttaaagttttttattttaaatgtgtataaatattattttattatattatttttgtttataaaattgaggtttttgagtttatgtttaattttatttttaaaagataattaatgttatgatagtaattatttttatatattagaaatattttttaagtgttagttttagtaataaaatgattatttgtattaattattgtatttgttagtttttttaatatagaaatatttagaatatatttatattttttatagtttttgtaaaataaaataaaacgaaataaaataaagaggttgaataattttgtgggaattttattaatttttatagaaagttttgttattttttttttagttgtttaattgtaatgttatagtaatagaaagtagtatatttaattttgtatggatgaataaatatatttaataaggaagatttaatagagtaaattaaatattggattaaatattttttgtataatagattataaaatgggtatttattttattaatggatttttggtattagaagtaaatagaagtgtatattaatataattaaattgaatatttagtggtttgattgtaaagttttttaatattttattaaacgattttttagttaattaaaattgtttatatatatttaagtatatatatagaaaagattaagtatagatattatttatttaaatttataatttaatagattaatttgtttttttttattttttatttttaaagtttgaatatagtaaatttttagtatgatcgtataaatgaaaagtttaaatatattgaaattggtaatattgtgttgttttgtatttaattgtatttaattttttatttttgatataagaatattatttaaagatatattttaatttttaagggtgagttatttttattaaatttgttgataaaattttattttagaatttattatatggttatttatagttaaattttaaaatagtttattatttttgtataagtagttttttttattatttatgttttattattttagtttgtttttattgtaatgttttattttaatgtaaaagtatttttatatttatttttattaaga

SEQ ID NO: 395 - DNA, 8303 bp, Artificial Sequence
  chemically treated genomic DNA (Homo sapiens)
aggtatttgtttattaatttgttgtttttttttttagtttttcggtaagattatttcgagttttttaatgttttttttgtttttgtttatattgagtgtatgacgcgggatgggtttcgtaggttggttgtgggttattatagttttttaggaaggggagaaatttaatttttgttagtacgtggtgggcgtaggcgtttataaatatttaggaataaatgaatgtataagtgagtgtatgaatgggtgagtggatacgaagtttttaaggtgggtgtagggaggtgggggtgtgaagagttatcgaggttattttgcggttttggtttttaggttatttcgcgacgcgcgtttacgtcgattagcggaaggtgtttagttagtgggggcggggcgagttagtcgcgaggacgcgttcgcgggggggcggggttaagaggacgcgtcgggagtagcggagcgacgaggataggtcgcggggaggggcggggttacggggggtgcgtcgggcggaaggggcgggaagagggcgggttcggcgcgcggtagcgcgggttttttagtgtataatggttagagtaggcggcggagttttaattttatttagtgcggagcgcgtcgcgagtttcgtcgtaagttgagcgttttcgttcgttaggcgcgtcggcgtcgggttatgtattcggggaatcgtagcggcggttacggttattgggacggcggcggggtcgcgggcgttgaggggtcggcgtcggcggggatattgagtttcgcgtttttttttagtttcggtatttacgagcgtttggcgttgttgttgggttttattgggttgttgggcgtcggtaataatttgttggtgttcgttttttattataagttttagcggtttcgtatttttatttatttttttttggttaatattagttttagcgatttgttggtgttttttttcggggttatttttattttcgtgttttgtttgaggaacggttgggtgtgggatatcgtgggttgcgtgtgggacgggtttagcggtagttttttcggtgagttggattgggagaaggtagttttttttttgtaaatttttattttttatttcgttgttcgtttcgtgcgttcgttttttagttcgtttcgtatcgtttttcgttcggtttcgcgtttttcgttttatatcgtttcgtttttcgttcgtttttttaacgttgttcgattttagtcgtatggcgggtgttttttttttttttcgttttttttcgttttacgttgtttaggattttatttttgtggttttttatttgttttttacgttgattttaaatttcggttcgtttttttttttatttgtttttattttttaagattatttaataaggtacgaaattacggttttttatattttgaggaaagagacgagggtttgtagagttaagagatttaagaaaaaaagtgattaattcgtgaaagttggagggagtgatgagattagatttatgtattattatttgttttttaaaatgagagtagaaaattaaaataataatgtgtaaaaaaaaatttttattagtatttgtaaatttttgaatgttttttagggaatgagatagttttatttaggtttttagaatgtaaattggtatgtgttttgtaagttgtttttattatttttcgttttatagatgggttttagtatattagaattttgggtgagattataaatggtttagttaatattattttaggtgaataaatattgtaattagttttgtaatcggtagattttattaaagtagaattttattgttgaagatgtatttcgatagtatttttattatggaagatttaagttttattgagatatgatgttttgaaggatgattaataatttagtaaattattgaaggaagcgtagaaaggaaattatttttttgtgtgttttaggaattttatttgtagggagatttgaaatagaaatgtgtattttttaaggtttaaagttttttttttaaattttgaaatttattgatattttattgttttaattttggtaggtttgggagaataaaaatttttgtagaattattaaaaatatttttttatttagtaatttttatgttatgataaatttaaatattatatttgtaatgatttattttttggcgttttgaaggaaataagaaaatagattttatttgattgttttagaggttataatattttttttttcgttttttataagttttaatttgataattttatttgaataaatatttgaaatttagggaggggattgtaagtgtatgtaggttgtggtatggacgattatgggattatattttttatattaattgtaaaatatttattaggtagttttttcggtaatgttaagaaggttatttaagtttaagtttaaagtattattagtagtgttttttagggtagttaataggtgtttgtttatagatattaaagtttttttttttttgaagtgttttttttgtgttggaaaattttgttttcgtgttcgggagtttgaatataagggtgtattgagttttttataagtgttagttgttatttatttttttttttattttttttttttgttgattttatttttttgtgttttttggttatttttttttttttgttttttttttttattattttttttagggttttagtttagtgattttttaagtttatttagatttttgtttgagggttgttttattttttagggtatttagtgtttttaattatgattttttttttgtttttaatgtagaggtggaaattttgagataagagatttcgagatttaagttttggggggtaagttagtagtgaagttattatagagtttaaaaagtttttagcgaagatgatttttttgtttggagtaaatttcggagtttgtgtttttagatttaggttaaggatgaagaaaaggagggtattttttgagttatttttgagtaagaattatttaatagtggagtattgaaggggaggaagttaaaaatgagggaagtagttttttgatgtagaggtttttggagaggtttgttttatttgttggaaagattattggtttgatggtataagagtggattttgttttttattttgcgatttatgtattgtgcgggtttttttaagttatttaatttttttagttattagtttttttatttttattattgggtaatttagtttaatgttttgtaaggttattttatttgttttgtattttgatgatttttttgatatttgtaggttagaacgtgtttgattttagcgtttattgattgtgttttttgtttttatttttattttgagttttgtttttttaagttaagaagtagtatgtattatggttatatttttttagatattattatagatttagtttttatttttatattttgttggaagaagtagaataagtaatttagatatatttatatttatatttgagtgggttaggtaattgttgtattttgtatttagtttttggttttttagggaatgttaaaaatgagtggaatttttgatatttttgagatagaggttttgattagataggattgttaggattgttattttagttaaattaaaggtgtgtgttttatgtaatttaatttaagttttaattgaatggtttgtttttttagtatttaggattattagttattttgggttagataggtatagtttgtattgatttatattttagtaggtttaatagtagtgaaaattagagtttaaaattgtgtaatgatgaatattagaaagtttagtagtattgttgttttagtttaaagatttttaggtgagtatgttttttagtattttggtttttttatttttggttatatagggtattatatagatgtttttcgtatatggaatgtaattagtattatgtttaaagttaataggagaattttattatttttttttttttaaattttttttttaaaaataagaataaatagtgttagttttggtagaggatgtttagatagattttttgtttgggatgtagagatttagggttgtagagatagtggcgaaatgtaaatattattgtatttaaatgttagaagtaggtattatttatgttaagatattttaatatgaaattagaagttttttttttttatttatatttatatattttttttttttattatttatatgtatgtgtatatttatataatatttttaatatatttttttttttagggttattatgagtttaaatatttttaaatggttagttgttttattgaattaatttttttgtaataatttgattagtaattgagtagaaatagttttatgttgttattatgagattttaagggtggttgtggtatggaaaggttttatatttagttgttttggaattatatatagattgtaatggttatagaaatattttgaattatggtagtatgtatatagtttataatttgtttttataaatagtggagttatgcgttttttttagtttaagtttatagttgtgtatagatttatttatatgatagtttttttaaaagttaaagttagagaattgtattatgttattttttttttatttttgtggaatattatgtttattttttattattatgttgtttgatttttgggagggttgttatatttttattgtttatttttaagaaattagaaaatatgtgagaaagtatttaagatatgttttagtagaggtttatgtttaaataagatgttatattttaatggattgttattgttgtatgaaattattttttttttatattgtttataatgtatttttttttgaattttttttttttagagaagagttttagttataaatgtatatatgatgtattttgatatttattgttaagatgaaatgtagaaatgaaattatatatttattttagtatttttagatgtgattagatgtatttgtttatgtttttatgttattgatttataagaaaaaaaatattttaaaagggtaatcgttaaatagttaggatttgtaattttagtgtttttgggataattggaatattagaaggatagattttattatagtataattatattttattttttttattagtagttgttattagacgttgttattttttaaaatggcggataatttttttatagagtttgatgtggttataatagggataggtttgttcgaatttatttttgtagttgtatgtttaagaagtggttagagggttttgtatattgatttaagaagttattatggaggaaattgggttagttttagttttttaggattgttattttggttgaaggagtattagtaaaataatgatattggggaagaaagtattgttgtatggtaggatttgatttatgaaatagaagaagttattatttttcgtaagaaggatgaaattatttaatatatagaagttttttgttacgttagttaggatatggaggataacgttgaagagattggtgttttgtagaaaaatttttttttgggggtgtttaatatttttattgaagttttggattttgtattatttgaagaaagttagttatcgtattttaatagcgacgaaatgtttgtaaaatatatttagaaaagtgatatagagattttattagaagtaattgatgtagaggaattagtggagaaggaaaagtattgtggagataaaatttgtatgtatatagttttagataaagatggagataaagatgaaagtaaatttatagtagaagataaggtcgatgaattaattagaaataggattatttatttttaaatagttaaagaaggtaggaggtttaatattgatttggtgttaaaattgttgtatttttaaggattgttaattgattttttaattaaattagatgttagtcgttatgtagaatttaaaaatgttattaggatttttgtatttcgggaaggaaaggtagaataagttttttgttttagagtagatgtttttaatagtaaggaatttattatggttgaaaagaggatgttaatgaaattttttatattttgtttagagtatgaataatattttgatgaatattaagtttttaggtagtgtttatttttagaatatttaaaaattaaaaaattaatttttaatttttaatattttgtattgtatttaattgtaatgatattagaattattttgtattataatagatggttttaacgtaattaaaaattttttttagtgtttcggacggtttggtaatattttttttttattttttttgtatggttaaggagaaattttttagggtttttgtaggatgtgtgtagtttttggtggaatttattgttttcgttataaagtataatgttttgtagtcgataaagaatttggacgatgtaaagtaattatagattattttggttaaagaataaatgttaaatattttattgtggaagatagttatttttttgaggaaatatgtttaaatgtgtagtataagtagatttttagggtagtatttattatagattagtttatattaaagatagatttagattagtagatttttattttgatagtttttttagtagagttaggagtttgtgttgtacgggttatagaattatgttttttaattatgatatgtatgaaggatatttatttggtatatttgatatgtttattttttaaaatagtaagagaagatttagaattagtggtgaagaaattatttatttcgtatattgaaatagaaataaacgaggaagaatttataaagttaagatttttgtgggttttttattttaatatgagagatttttcgggaattagtagaagttcgtataatggtttgttttttaatgtttatgtttgttttgggtttgattgtggtttgggaaatgagtatgttgttaagtaagttgaaatatttttttaggagatttttttaattgaagaattttgttttttatttttaaatttagaagatattatttttgatggtgatgataagtagttagaggtttttggaattaataatgtagtaatggttaaattagaattttttgaggaaagtaaaaatttagaaagtttagagaagtatttttaaaattagaaaagagtaatttcgaaatgttgttttggattttttttatggtattagaatttttttatttaaaggatagttttttatatgagtaattagaagtggttatatatgatgaatgttatgtagatgttgtttttaatttttagatatttagtattgaatatttttgttaatttattaatgagtgatttattgattattgaatattttgtttagaatgggttatatgatttagaattttaaaatagagttagttttattttagtattgggtatatatgtaagggttttatattagtaatttagtttaaaggtaatgtatttgttaatgatttttagattttatttttgtttatagaataattagtaatatttaagtaatattttaattatttttgtagttgttatagttgttgcggtttgttcgaatagtgaaatatatataaatggtaaattatgtggattttttgtatataatataaatgtatagatatggtggtaggaatagtaattaatataaatgttaatatgataataaaatatatttgtttataatcgtttaaagattagttttgtatgattttttatgtattgtgaaggtttgaagtttataatatttatttgatttttgtaattgatgaggtaatgatgttattatagtattttaatttataaaaagaattggagtttaattagtggttgtaaagtttattttggggaggttgattgtaaaggaaatttgaaagataagatttatttttatttaatattttagaaaatttttgtagagttttgttttggtatttaaaatagtttttaataagtaatttagattaaaaggaaaaatgaagtgttttaggagaagatattttagaagggttgttttgaaatttttaaggaggaatttttaggaatttttaaggagaaatagagtgaggtttttttaatttgagattatagatatttataaaattttttataaatagattatttaaggttttttagtgagaatgaaatatattattttgttggttttattattttaattaatattattataatataattgataggaatgaattaaaggaggatttattatgttttttcggttgtgttttatttaataaattgtgaagtaataattttttgtaattttttttgttttttagttgtta

SEQ ID NO: 396 - DNA, 8303 bp, Artificial Sequence
  chemically treated genomic DNA (Homo sapiens)
taatagttaagaggtaagagagattatagaaaattgttattttataatttgttaagtgggatataatcgaaagggtatggtaaatttttttttgatttatttttattagttatgttatagtgatattaattaaagtggtagagttaataaggtggtatgttttatttttattgaaaaattttgggtaatttatttatagagggttttataagtatttgtaattttaggttaaaaaggttttattttgtttttttttaggaatttttaagaatttttttttaggaattttagaatagtttttttgaagtatttttttttggggtattttatttttttttttggtttaagttatttattggaagttattttaagtgttagggtagggttttgtagaaattttttgaagtattaaataagaataaattttattttttaaattttttttgtaattaatttttttaaaatgagttttataattattaattgaattttaattttttttgtaaattagaatattgtggtggtattattgttttattagttataagggttaagtgagtattataaattttagatttttatagtgtataaaggattatgtaaagttaatttttaaacgattatagataaatgtattttattattatattggtatttgtattagttgttatttttattattatgtttatatatttatattatatgtaaaagatttatataatttattatttgtgtatgttttattattcgaataggtcgtagtaattgtaatagttgtaaaagtaattaaaatattatttgggtattattaattgttttgtagataaagataaaatttgaagattattagtaaatatattatttttaagttgagttgttaatatggaatttttatatatatatttaatattaaaataaagttaattttgttttaagattttgggttatatagtttattttaaataaaatgtttaataattaataaattatttattgataggttaataaagatatttaatgttgaatgtttgagagttaaagataatatttgtatagtatttattatatataattatttttaattatttatatgggaaattgttttttaaatgagaaaattttgatgttatgaaggaggtttaaaatagtatttcgagattgtttttttttaattttgaaggtgtttttttgggttttttaggtttttgttttttttagaggattttagtttggttattattatattattggttttaggagtttttggttgtttattattattattaaagataatgttttttggatttggaggtggagggtagaattttttagttggaaagattttttggaaaagtgttttagtttgtttgatagtatgtttattttttaggttatagttaggtttagagtagatataaatattggaaggtaagttattatacgagtttttgttgattttcgaggaattttttatattaaaataaagagtttataagagttttggttttgtaagttttttttcgtttatttttgttttagtatacggagtgaataatttttttattattgattttaagtttttttttgttgttttagaagatgaatatgttaaatgtattagataggtgttttttatgtatgttatggttgaagaatataattttgtgattcgtatagtataagtttttggttttgttggaggaattattagaatggaagtttgttgatttaaatttgtttttagtatagattgatttgtaatgagtattgttttagagatttgtttatattgtatatttgagtatgtttttttagaaaggtaattgttttttataataaaatatttagtatttattttttgattaaagtgatttataattgttttatatcgtttagattttttgtcgattataaagtattgtattttatgacgaagataatagattttattaaaaattgtatatattttatagaaattttggggaatttttttttggttatataagggaaataaaaagggggtgttgttaaatcgttcgagatattgaaggaagtttttagttgcgttaagattatttattgtagtgtaagatgattttgatgttattgtaattgagtgtagtataaaatgttgaaggttgggagttagttttttagtttttaagtattttgaaaatgaatattgtttgaaagtttggtatttattaggatgttgtttatattttaaataaaatgtgagaaattttattagtattttttttttaattatggtgagttttttgttattaaagatatttgttttggaataaggaatttgttttatttttttttttcgaaatgtaagaattttagtgatatttttaaattttatataacgattaatatttgatttgattaaaagattaattagtaatttttgagaatatagtagttttgatattaaattaatattaaattttttgttttttttaattatttgagagtaagtaattttatttttaattggtttatcggttttattttttattgtagatttgtttttatttttatttttatttttatttgaaattgtgtgtatataagttttatttttataatatttttttttttttattgatttttttatattagttatttttagtgaaatttttgtattatttttttgagtgtgttttgtaggtatttcgtcgttattaaaatacgataattggttttttttaggtaatgtagaatttagaattttagtgaaggtattagatatttttaaagaaggatttttttgtagagtattaatttttttaacgttgttttttatattttgattggcgtagtaaaaagtttttgtgtgttgaatagttttattttttttgcgaagagtgatggttttttttgttttatggattaggttttgttatataatagtatttttttttttaatgttattgttttgttgatatttttttaattaggatagtaattttgaaaagttgaaattagtttagttttttttatagtagttttttgaattaatatgtagaattttttgattattttttgaatatgtagttgtaaggatggattcgggtaaatttgtttttattataattatattaaattttgtgggaagattgttcgttattttaggaagtaatagcgtttggtgataattgttgatgaaagaaatgaggtgtgattatgttgtaataaaatttgtttttttgatgttttagttattttagaagtattgaagttgtaggttttagttgtttaacggttatttttttaaaatatttttttttttataagttagtagtataaaaatatgagtaagtatatttaattatatttgagaatattaaaatggatgtgtggttttatttttgtattttattttagtagtaaatgttaaaatgtattatatatgtatttgtgattggaatttttttttgaaagaagaaaatttaagaaagaatatattgtaaataatataagagaaaaataattttatgtaataatgataatttattggagtgtgatattttatttggatataaatttttattaaagtatgttttaaatgtttttttatatattttttaattttttgagaatggataatagagatataatagtttttttaagaattaggtaatatagtaatagagaatgaatataatgttttataaaaataaagaagaaataatataatataattttttaattttagtttttaagaaaattattatgtgaataaatttatatatagttgtgagtttagattaaaaggaacgtatggttttattgtttatagaaatagattataaattatgtgtatattgttatgatttaaaatatttttgtggttattatagtttatgtgtgattttagaatagttgaatataagatttttttatgttataattatttttaggattttatggtagtaatatgagattatttttatttaattattagttagattattataaaaggattaatttagtaaaataattggttatttaaaaatatttaggtttataatagttttgaggaggaaaatgtattaaaaatattatatgaatgtatatatgtatataagtaataaaggaaaaaagtgtgtaagtgtaagtaaaaaaggaaaatttttgattttatattaaaatattttaatataaataatatttatttttaatatttgaatatagtgatgtttgtatttcgttattgtttttgtaattttgaatttttgtattttaagtaaaaggtttatttaaatattttttgttaagattaatattgtttgtttttatttttgaaggggaagtttaaaaaaaaaaaaataataaggtttttttgttaattttgagtataatgttggttatattttatgtgcggaagatatttgtgtgatgttttgtgtggttagaggtagaaaggttaaggtgttgaagagtatatttatttgaaagtttttaggttaaagtaataatattgttaaattttttaatatttattattgtatagttttgagttttggtttttattattgttaaatttattgaaatataaattagtataagttgtatttgtttagtttaagatgattaataattttggatattggaaaaataagttatttaattggaatttagattaaattgtatagggtatatatttttagtttaattaaaatggtaattttaatagttttgtttagttaaagtttttgttttaaaaatattaaggattttatttatttttggtattttttaagaagttaggaattaagtatagaatgtagtagttgtttggtttatttaagtataaatataagtatgtttgaattatttattttgttttttttagtagggtgtgaagatggagattgaatttatgatggtatttgaagaggtgtaattatagtatatgttgttttttggtttagaaagatagggtttagggtaggagtaggagtagaagatataattaataagcgttaagattaggtacgttttaatttatagatattaaaggggttattaaaatgtaaagtaagtaggatggttttatagagtattaagttgaattatttaataatagagatgagagaattgatagttggagagattaagtgatttgagaaagttcgtataatgtatgagtcgtaggataaggaataggatttatttttgtgttattagattaatggtttttttaatagatagggtaagtttttttaaaagtttttgtattaagaagttattttttttatttttaatttttttttttttaatattttattgttaggtagtttttgtttagggataatttaggaagtgttttttttttttttatttttaatttggatttagaagtataaatttcggaatttattttaggtaaagaaattattttcgttaaaaattttttaaattttatagtaattttattattaatttgttttttagggtttaagtttcggaattttttattttagggtttttatttttatattaaaaatagggagaaagttatggttgaaagtattaaatgttttgaaaaatagggtagtttttaggtaaaaatttaagtgaatttagaaaattattgggttgggattttaggagggatggtgaagaagaaaaataggaagggagaagtgattaggagatataggagggtgggattagtagaggaaagaggtgaggaagagggtggatgatagttagtatttataaagaatttagtatatttttgtgtttaaattttcgggtacgaaaatagaattttttagtatagaaaaggtattttaaggaaaaaagaattttgatgtttgtgaataaatatttgttgattattttggagaatattattgatgatattttaggtttgggtttgaataatttttttagtattgtcgaagaaattgtttgataggtattttataattaatataaggagtgtaattttatagtcgtttatattatagtttatatatatttgtagttttttttttaaattttaaatgtttgtttaaatgaaattattagattaaagtttatgaggggcggggaggaaaatattataatttttgaagtaattaaataaaatttatttttttattttttttaaaacgttaaaaaatgaattattataaatataatatttgggtttgttatagtatagaggttattgaataagaaaatatttttgataattttataaagatttttgtttttttaaatttattaagattaaagtaataaagtattaatggattttaggatttaaaaaaggaattttaagttttgagaaatatatatttttattttaaatttttttataaatgaaatttttgaggtatataaaaaaataattttttttttacgttttttttaatgatttgttgagttgttgattattttttaaaatattatgttttagtgaaatttaaattttttataataagagtattgtcgaaatatatttttaataatgaagttttattttaatgaaatttatcgattgtagagttaattatagtatttgtttatttgagatggtattggttgagttatttgtaattttatttaagattttggtgtgttggaatttatttataagacggaaaatagtaaaaatagtttatagggtatatgttaatttgtattttgaggatttgaatgaaattgttttattttttagaaagtatttaaaggtttataagtattaatgagaatttttttttatatattgttattttggttttttatttttattttaggaaataaatagtagtatatgaatttaattttattattttttttaatttttacgagttaattatttttttttttgaattttttgattttataggttttcgtttttttttttaaagtgtaaaaagtcgtggtttcgtgttttgttgagtgattttaggaggtaaaaataaataagaaaggaggcgggtcggggtttggggttaacgtggggggtagatgagagattataggaatggagttttggatagcgtggggcgggaggggacggaggaagaggaaggtattcgttatgcggttggggtcgggtagcgttgaggaggcgagcggggagcggggcggtgtagggcggggggcgcggggtcgagcgggaagcggtgcggggcgggttggggggcggacgtacggagcgggtagcggggtggggagtggaagtttgtagaggggaggttgtttttttttagtttaatttatcgaagaggttgtcgttaaattcgttttatacgtagtttacggtgttttatatttagtcgttttttaggtaggatacgaaggtaaaggtgatttcgaagagggatattagtaggtcgttgaggttgatgttgattaggaggaggtgagtgggagtgcggagtcgttggaatttgtagtagaggacgagtattagtaggttgttgtcgacgtttagtagtttaatggagtttagtagtagcgttaggcgttcgtaggtgtcggggttgaagaggggcgcggggtttagtgttttcgtcggcgtcggttttttagcgttcgcggtttcgtcgtcgttttagtagtcgtggtcgtcgttgcggtttttcgagtatatggttcggcgtcggcgcgtttggcgggcggaggcgtttagtttgcggcggggttcgcggcgcgtttcgtattgggtggggttggggtttcgtcgtttgttttagttattgtgtattgaggggttcgcgttatcgcgcgtcgggttcgtttttttttcgtttttttcgttcggcgtatttttcgtggtttcgttttttttcgcggtttgttttcgtcgtttcgttgttttcggcgcgtttttttagtttcgttttttcgcgggcgcgttttcgcggttagttcgtttcgtttttattggttgggtatttttcgttggtcggcgtggacgcgcgtcgcgggatagtttgggggttagggtcgtagggtagtttcgatggttttttatatttttatttttttgtatttattttgaaagtttcgtgtttatttatttatttatgtatttatttatatatttatttatttttaagtatttatgagcgtttgcgtttattacgtgttggtaagaattgggttttttttttttttgggaagttgtaataatttataattagtttacgaagtttatttcgcgttatatatttaatgtaaataaaagtaaagaaaatattgaagagttcggggtagttttatcggaaaattgagaagaaaaataataaattgatagataggtgttt

SEQ ID NO: 397 - DNA, 7440 bp, Artificial Sequence
  chemically treated genomic DNA (Homo sapiens)
tcgggacgttttgaggttttttagaggtgggttcgattgggatagggcgttagattttttttggggcgagcgcgggtcgggagcggtagtgggtcggggttgggggatttcgttggaagtaaggtcgggggttttcggaggtttttttaggtgcgttcgggtgcgttcgtgggaaggggtgggtatttaggatgtcgggggcgggggattgttcgtttatagattttacggagttaggggtagtcgtcgggggtgggattttgtattttagtttttttattggcggtttagtagggcgtcgggcgttgaagttttaaagagtttttttttcgtcgttttttcgttttttttttttttttatttttttgttttcgcgttgttagtttatttcggtttttggagttttttatttacgattttgagtttcgacggaaaatatttttgtttttttcgatatttttttttcgtttcggtattatttttttttgttgtttagtttttaagtcggggttttttagttttaggttttttttttcggtttcgtaacggaagtgttgggtataatgtcggtgttaaattttcgttttttttttttttggattttggagttttttttttcgttttagggatagatttaggggttatagtttttttagagttatggagtgaatgtttaagaatcgaagatttatattttaaattattttacgggcgtgcggagtatttttttcggtttcgttcggggaagaggggtgtcgaggattcgggaaatatagtgtttacgtttagaggttgtaggaattgcgtgttaggggtttggagggagggcggggtattcgagagttagggttttttcgattacggcggagatatggaggagtttttagatggtttaggaaaatacggttttcgaggttcgttcgattttagcgtgagaaattgggtttttattttggttataggggttagatagtgtttttggggtagggtgtagggtgaggagagaaggaggataagagttttgtattcgtttgattcgagttttgttcgggttttcgttttgtgggtgtattgcggatgttttttcgtcgcgagaatgggcggtttttggtaataacgttttttaggggagttattagagttgagcgtgtttggtgttttttaaggttaggttgggcgattttcgtagaggtttttcgatagatgttagttagaggttaggattttgttatatttttaaggatttggatatttttgggtatcgggttaagacggcgttttaaagttaggtggttcgtcgtaggtagtttttagtagtttggttttttcgttcgtataattttttatttataggttaggtgtaatttcgatgtaggtttttggttcgattttttacgcgtttaggcggatagttaaggtttggttgagttttcggtaggggcgtttggaatgtgatcggttatttattttcggttttgtatttgtttgtgtatgtaagtttataggtgtagaggtattcgaatcgtgtgtattttttcggttatagtattttaggtacgtatacgtatgtatatgtacgtgtgtatacggcgcggtatgtttacgcgtttttacgggcggattggtatttaggcgtggtcgtgcgtatatatacgtatatgtatatagttattagcgtttattcgcgttttttcgtaggtatatataaatagaattcgtattcgcgttttcgtttatacgtttttcgtagggtgtcgggtggaattcgggtttttttaatttttttattcgagaatttcgcgcggagtcgagggtagttttggggcggcgttcgacggggtttggcgaggggatttcgcgttattttttcgggaggttgtgtttgagggtttttttgggttcgtagtcgtattggagttgggggcggtggttaacggcggtcgtacggtttaggttcggagcgggtattagggatcgatattgttatttagcggtgcgtatagtttcggcggcggcggttcgttttttagatgttaggcgtatttggattttagggaaggcgttagagggggtcggaatgtttgcgggtgatttcgaggtgtttaaaacgacgatagttggggcggggcggagtcggggagattttgagtttcgttttgttagtatttggtagtttttttacgcgggttaagagtaggatttaattatcggttatttagtggtttcggtttagtttagtcgttaggatttgggagaagataagatatcgtttgttttttgggaaagttaagtcgagaagttagtaggaatgtgaggggattttatttaagttttatttggatagttttttagttgtgtggttttcgggtcgaggggagtagaggtaggaggttaattttgagtagtagtattttggattttaagaaggagtttttcgggtttttttgtttttattcgtattttttaatttggtgattttgggttagttgattaatattatttttatttataagaggatatttatatttgtaagatgaggatattaataatatttgtttttttaggttgttgtaaggattaaattagataatttatattaaaagtttagaggggtttttgatacgtagttaatatttaataaataagagttattatgtttttatattttgtatttttagtttcgtttgttattattttgttgttttgtattttgttttgggaggttgaagtgagtttttttggggttggttgattgattatttttgtttgttttgtttttttttttacgtgagtgattgggggagggtagttttttggtgttggaggggatagtttagagagtgatatttgagtttttattttagaggtttttagagttaaatggggttgttagggattttaagagagggtagtatgtggtttttgtttttgattcgttgtgtgattttgggggtgataatatttgtttttagtttttttttttacgaattaaggatttagaataggagaatttgaattattaggttaggaggttgggtttgtatttgcgacggtggaatagaagggttggggttagatttggggtagttattttggtttttggttttagtttgtagtatatttttgtgtttatgtatagagattaagtttaggtgttaatttttatagttgttggggaggatgttttaggataggattttttttattttgtaaatgagaaagaggtgtaggaaggggtagtggatcgttttaggttatagagttagagtttaggttgcgggttagtgtttttttttttatagtcggttgtcgcgtttttttttttttttatatatagacgtatagaattgcgtattcgattatgtttgttgggttggcgtggttgtgatgggttcgcgtgcgtttgtggagcggtgtgtgtgttggcgggtgtgaaggaggttgggttgagcggttgttttggtatttagagttggcgtgggttttttttatatggagggaagaggaagagggggaggagagttaagaggagtttggtgggagggagggtaggtttagggaagggtttgtggtggggattttagttaggggtttcgttcggtgtgcggagtggattgtggaggggagaggcggttttggtagttttttttttttttttgggataatttttttattttacgggtttttagttgggttttagggttttttgataatttagtgatttttgtattgttttttttttagttgtatgttttgtggttggagttgaggattttttgaaggggatgtgatagttgtaggtattttttgaagttttttttgtagggattttttttttttttggggtgtttagttttatgtatcgtttttggttttttgtaaagttttttggtttttggagttttttggttttttttagttagagtttttaagttacgggattgttttttttttattattttatttcgtatttaattttattagtaatatagtgtaagaagtcgtgaaattttggttaggtttttaatagtttcgtgttttagtttttttatttgtaagtagtagagaaaaaatggtatttattttataggtttgttatgaggatgaaatgagttaatattataaaaaatgttgttaggtatgatggcgtttggagttttagttatttaggaggtgagaggatggtttgagtttaagagttttagattagtttggataatatattaagattttgtttttataaataaatagataaataaatagatattttttttaagtgttaaaagtgtttggtatttagtagattattagtgttaggtgtttatatatatttcgattattgtttttgttttagtgttttttataggggttggagagtaggtgttaagaaatgatcgaatgggtaaatggatgaatagaatatttttttttagagtttatatgttcgtgggtttttgggattattttttttttttttttgtttttttgagtttttttagtattggtttttgtttaggttttgcgttgtttttaggtttttgttgtggttattgtttttggtagggttattttttatagttttttttgtggttggttttttattatttagatgatttggtgggtgaggttatttagtaaggagttatgtttgttttgttttttgatttatttttttattattttgtttttttttttttttgtggtttacgtgtttgtatgtttttttttatgaggtagggggttatgtgtgttttatttatttttgtagttatagtattttgagtaatgtttgttatatagtaggtgtttaattaatgttgaatgaatgggtaaatgcgggatggcgggatagagtttttttaaggtattttgttagagaatgtttttttgttattttgaatttagtgtatttttagatgatttttttatttttttttgtagtttatgttttttttttttttttttttttagatacggtttatttatttttggtaattaatatggttaattttatatttgttaatggtagttcgggtaattagttcgtgcgtttggttacgttattattttataatcgttatgagacggtggaaatggtttttattgttatagtgataggttttttgagtttggtgattgtcgtgggtaatattttggtgatgttgtttattaaggttaataggtagttgtagatagttaataattattttttttttagtttggcgtgtgttgattttattataggcgttttttttatgaatttttatatcgtgtatattattaagggttattggtttttgggcgtcgtggtttgcgatttgtggttggttttggattacgtggtgagtaacgttttcgttatgaatttttttattattagttttgatcgttatttttgcgttattaagttttttatttattttgttcggcgtattattaagatggtaggttttatgattgttgttgtttgggtattgtttttcgtgttttgggcgtttgttattttgttttggtagtttgtggtgggtaagcggacggtgttcgataattagtgttttatttagtttttgtttaatttagtagtgatttttggtatagttattgttgttttttatttgtttgtggttattatgacggtgttgtatatttatatttttttggttagtcgtagtcgagtttataagtatcggttcgagggttcgaaggagaagaaagttaagacgttggttttttttaagagtttattaatgaagtagagcgttaagaagttttcgttcggggaggtcgttcgggaggagttgcgtaatggtaagttggaggaggttttttcgttagcgttgttatcgttatcgcgtttcgtggttgataaggatatttttaatgagtttagtttaggtagtgttatttagaatattaaggaacgtttagttatagagttgtttattatagaggttattacgttcgttatgttcgttttttttttgtagtcgcgggtttttaatttagtttttagatggtttaagatttagattgtgacgaagtagataggtaatgagtgtgtgatagttattgagattgtgtttgttacgtcggttggtatgcgttttgcggttaacgtggttcgtaagttcgttagtatcgttcgtaattaggtgcgtaagaagcggtagatggcggttcgggagcgtaaagtgatacgaacgatttttgttattttgttagtttttatttttatttggacgttttataacgttatggttttggtgaatattttttgttagagttgtatttttgatacggtgtggtttattggttattggttttgttacgttaatagtattattaattttgtttgttatgttttgtgtaacgttatttttaaaaagatttttcggtatttgttgttgtgttagtatcggaatatcggtattgttaggtaggtaggtaggagtgttttaggaggtgttggtgttgcgtgcgtgtgttggggggattatacggtttatttgttgtggggaagagttgtaggtattattttgcgtttacgtttgttgaggaggaagtttagaagaggttttgtggttgtatttagagattagatttttgtttaggttgaggaggtttattttagggagtgtttgaattggggttgtttggtttatttttgtggttttgttttagcgagttgcggggtattggtttgggtgggtatttgttttattgtgattaattattagtagtgttggaagaatggatatttggatgggggtcgaagtttagggtttttttaggaagaataaaggggttagtgtttggaaaaggaggtttgggaagggagtagaagggtggggttttttattttgttgtaatcggtgttttttgtttttttgtatttcgtatgtaggtttagttttttttttttaaattttattttaggggtagaaattttttttggttgtagttatttagttaggttttgggtgggtatgatggaggttaggtttttttcgttttagtagtattgtttttgttatattaagatggggtagttgggaggttagaggttttgttttaggaattgaggtttggttttttgcgattttaggttgagtcgtgagtggtttacgtatttagaagatagttttttgtagtttcggttttagaaggttgttttaggttatatatcgagttagggtgaggttgtggtggatggtatttttatttgttttttttaaattttttattttttggtttttgtagggtggaggtttgggttatataggtaagaggaaaggggttaatttggtggtttattcgggtttttatgatagtgggaaggggggaggtgggtagtgaggtaggtacgtagttttcgtatttgtttttttttatgggtagaatttttttgattggttgtgggttgtattaaaagatttttga

SEQ ID NO: 398 - DNA, 7440 bp, Artificial Sequence
  chemically treated genomic DNA (Homo sapiens)
ttaaaggttttttgatataatttatagttaattaggaaggttttatttatgggggagagtagatgcgagggttgcgtgtttattttattgtttattttttttttttttattgttatggaaattcgagtgagttattaggttgatttttttttttttgtttgtgtgatttaggtttttattttgtagaagttagggggtgagaggtttgaagagggtagatgggaatgttatttattatagttttattttgattcgatgtgtgatttgggatagttttttaaggtcggggttgtagggggttgttttttgaatacgtggattatttacggtttagtttgggatcgtagaaggttagattttagtttttgagatagaatttttgattttttagttgttttattttaatgtgataagggtagtgttgttggggcgggggggatttggtttttattatatttatttagaatttggttaagtagttgtagttagaggagatttttgtttttggagtgggatttggggagagggggttgagtttatatgcggggtgtaagggggtagaaagtatcgattatagtagaatgggggattttatttttttattttttttttaagtttttttttttaagtattggtttttttgttttttttgagggggttttgggtttcggtttttatttagatgtttatttttttagtattgttgatggttggttatagtggggtaggtgtttatttaggttagtgtttcgtagttcgttgaagtagggttatagaggtgggttaggtagttttagtttagatattttttggggtgagtttttttagtttgagtagagatttggtttttgaatgtagttatagagttttttttgaattttttttttagtaaacgtgaacgtagaatggtgtttgtaatttttttttatagtaagtgagtcgtgtggtttttttagtatacgtacgtaatattagtattttttagggtatttttgtttgtttatttggtagtgtcgatgtttcgatattggtatagtagtaggtgtcggaaggtttttttaaaggtggcgttgtatagagtatagtaggtagggttgatggtgttgttgacgtagtagagttagtagttaatggattatatcgtgttagggatgtagttttggtagaaggtgtttattaggattatgacgttgtagggcgtttaggtgaggatgaaggttagtagaatggtaaagatcgttcgtgttattttgcgttttcgggtcgttatttgtcgttttttgcgtatttggttgcgagcgatgttggcgaatttgcgggttacgttggtcgtagggcgtatgttagtcggcgtggtaggtataattttaatggttgttatatatttattgtttgtttgtttcgttataatttggattttggattatttggaggttgggttgagggttcgcggttgtaggggaggggcgggtatggcgggcgtggtggtttttgtggtggatagttttgtggttgggcgttttttggtgttttgggtggtattgtttgagttggatttattggaagtgtttttattagttacggggcgcggtggcggtggtagcgttggcgggggggttttttttagtttgttattgcgtagtttttttcgggcggttttttcgggcgggggttttttgacgttttgttttattagtgggtttttgaggaaggttagcgttttggtttttttttttttcgggttttcgggtcggtgtttgtggattcggttgcgattggttagggagatgtggatgtatagtatcgttatgatgattataggtaggtagaaggtagtaatggttgtgttaaaggttattgttgggttggataggaattggatgaagtattggttgtcgggtatcgttcgtttatttattataaattgttagaataagatggtaggcgtttagagtacgaaggatagtatttaggtagtagtaattatgaggtttgttattttggtggtgcgtcgggtagggtaggtgagaggtttggtgacgtagaagtagcggttaaagttgatgatgagaaggtttatgacggaggcgttgtttattacgtagtttagggttagttataggtcgtagattacggcgtttaggggttagtagtttttgatgatgtatacggtgtagaggtttatggagaaggcgtttatgatgagattagtatacgttaggttgaagaggaagtagttgttgattgtttgtagttgtttgttgattttgatggatagtattattaggatgttgtttacgatagttattaggtttagggagtttgttattgtggtaatgaagattatttttatcgttttatagcgattgtgggatgatgacgtgattaggcgtacggattgattgttcgagttgttattgataggtgtgaagttggttatgttggttgttaggggtgggtaggtcgtgtttggggaggaaggggagagaaaagtatgaattataggagggaatgggggagttatttggaggtatattggatttaaggtgatagagggatattttttggtagaatgttttgagagaattttgtttcgttatttcgtatttgtttatttatttaatattaattgagtatttattatgtggtaagtattgtttagggtgttgtggttatagaagtgaataagatatatatggttttttgttttatggggggagatatgtaaatacgtgagttataaaagaaaaaaaaggtagggtgatgagagagtgagttagaaggtaggataggtatgattttttgttaggtggttttatttattaggttatttgggtgatgaggagttagttataggaggagttgtggagagtggttttgttaggggtagtagttatagtaaaggtttggaggtagcgtaaggtttggatagaggttagtgttgggggagtttagggaagtaagaggaggaggagagtggttttagaggtttacgagtatgtgggttttggagggaggtgttttgtttatttatttatttattcggttattttttaatatttgttttttaatttttgtagaagatattgggataaaggtaataatcggggtatgtatgagtatttaatattgatggtttattaagtgttaagtatttttgatatttaaaaaaagtgtttatttatttatttatttatttgtagagatagggttttggtatgttgtttaggttggtttagaatttttgagtttaagttatttttttattttttgagtagttgggattttaggcgttattatgtttggtaatattttttatagtgttaatttattttatttttataataaatttatgaggtagatattattttttttttattatttatagatggggaaattgaggtacggagttgttaaaagtttgattaaggttttacggttttttgtattatgttgttggtgggattaagtgcggggtgaggtggtgagaggaaggtagtttcgtaatttaagagttttggttgaaggaggttaaagagttttaggagttagaaggttttgtaggggattagaggcggtgtatggagttgggtattttagagaggaggagagtttttgtagaaggggttttaggaggtatttgtaattgttatattttttttaaggagtttttagttttagttatagggtatgtagttgggagggaggtagtgtaggggttattaggttgttagagaattttgaggtttaattggggattcgtgaggtgaaagaattgttttagagggaagagaagggttgttagggtcgttttttttttttatagtttatttcgtatatcgggcggggtttttagttggagtttttattataggtttttttttgagtttgtttttttttttattaggttttttttagttttttttttttttttttttttttttttatgtgagggaggtttacgttagttttgagtgttagggtagtcgtttagtttagttttttttatattcgttaatatatatatcgttttatagacgtacgcgggtttattatagttacgttagtttagtaggtatggtcggatacgtagttttgtgcgtttgtgtgtgagaggaagagagggcgcggtagtcggttgtggaggaaggagtattaattcgtagtttgggttttggttttgtggtttgagacgatttattgtttttttttgtattttttttttatttgtagaatagagaggattttgttttgggatattttttttagtagttatagggattggtatttaaatttgatttttatatataaatataaaaatgtattgtaggttggggttaagggttagggtaattgttttaagtttgattttagtttttttattttatcgtcgtagatatagatttagttttttagtttgatagtttaagtttttttgttttaaatttttggttcgtaggaggagaggttgagagtaagtgttgttatttttaaggttatataacgagttaagggtaaagattatatattgtttttttttggggtttttgataattttatttggttttgagagtttttgaaatagaagtttaggtgttattttttgagttgttttttttagtattaggaggttgtttttttttaattatttacgtggaggaggggatagggtaggtaggagtaattagttagttagttttaaggaaatttattttagttttttaaggtaggatatagggtagtaggatgataataaacggggttagaagtgtagaatgtgaaaatataatagtttttgtttattgagtgttaattgcgtgttaggaatttttttgagtttttaatatagattatttggtttaatttttataatagtttgaaaaggtaggtattattagtgtttttattttatagatgtaaatatttttttatagatgaggataatgttaattaattggtttaaagttattaggttaggaagtacgggtgggggtagaagaattcgggaagtttttttttaaagtttaaggtgttattgtttagagttgattttttgtttttgtttttttcgattcgaaaattatataattgagggattgtttaggtgaggtttgggtagggtttttttatatttttgttggtttttcgatttagtttttttagaagataagcgatgttttgtttttttttagattttggcggttgggttgagtcgggattattggatggtcggtgattaagttttgtttttggttcgcgtgagggagttgttaggtgttgatagggcgaggtttagggttttttcgatttcgtttcgttttagttgtcgtcgttttggatatttcggggttattcgtagatatttcgattttttttggcgttttttttggaatttagatacgtttggtatttggggagcgagtcgtcgtcgtcggggttgtgcgtatcgttagatggtaatgtcggtttttggtgttcgtttcggatttagatcgtgcggtcgtcgttggttatcgtttttaattttaatgcgattgcgaatttagaggagtttttaggtatagtttttcggggaagtgacgcggggttttttcgttaggtttcgtcggacgtcgttttagagttgttttcggtttcgcgcggggttttcgggtgggaaagttgagggagttcggattttattcggtattttgcgaggaacgtgtgggcgggagcgcgagtgcgagttttgtttgtgtgtgtttacgggggagcgcgagtagacgttagtagttgtatgtatgtgcgtgtgtgtgcgtacggttacgtttggatattagttcgttcgtgagagcgcgtgagtatgtcgcgtcgtgtgtatacgtgtatgtgtatgcgtgtgcgtgtttagggtgttgtggtcgggaggatgtatacggttcgggtgtttttatatttgtggatttgtatgtataagtaaatgtagggtcgagagtgggtgatcggttatattttaaacgtttttgtcggagatttagttagattttagttgttcgtttgagcgcgtagagggtcgggttaggagtttgtatcgggattgtatttggtttgtgggtgaagggttgtgcgggcgaggaggttagattattaggggttgtttgcgacgggttatttaattttgggacgtcgttttagttcggtgtttagaggtgtttaagtttttaaagatgtggtagagttttagtttttgattgatatttgtcgaggggtttttgcgagagtcgtttaatttggttttgagggatattaggtacgtttagttttaataatttttttaagaggcgttattgttaaaagtcgtttattttcgcggcgagagggtattcgtagtgtatttataaggcggaggttcggatagagttcgggttaggcgagtgtaagatttttgttttttttttttttttattttgtattttattttagaggtattgtttagtttttgtgattaaagtggggatttagttttttacgttagggtcgggcgggtttcgagggtcgtgtttttttaggttatttggaggtttttttatgttttcgtcgtggtcgaaggagttttggttttcgggtgtttcgttttttttttaagtttttagtacgtagtttttgtagtttttgggcgtgggtattgtgtttttcgagttttcgatatttttttttttcgggcgagatcggagggggtgtttcgtacgttcgtggggtggtttggggtgtaggttttcggtttttgggtatttattttatggttttgggaaggttgtggtttttggatttgtttttggggcgggagaggagattttagagtttaagggagggagaggcgaagatttggtatcgatattgtgtttaatattttcgttgcggggtcggaggagggggtttggagttggaggatttcggtttggaggttgggtagtaaaggggggtagtatcggagcgggggaggggtgtcggggagggtaggggtgtttttcgtcggggtttaaggtcgtagatggaggattttaggggtcggagtgggttggtagcgcgggggtaaaggggtggagggagagggagggcggggagacggcgggaaaagggttttttggggttttagcgttcggcgttttgttgagtcgttagtgggagggttggagtatagggttttattttcgacggttgtttttggtttcgtggggtttgtgggcgggtaatttttcgttttcgatattttggatgtttatttttttttacgggcgtattcgggcgtatttggagaagttttcgagagttttcggttttgtttttagcggggttttttagtttcggtttattgtcgttttcggttcgcgttcgttttagagggggtttggcgttttgttttagtcgaatttatttttggggagttttagagcgtttcgg

SEQ ID NO: 399 - DNA, 9810 bp, Artificial Sequence
  chemically treated genomic DNA (Homo sapiens)
tggttttgaatttttgatattaggtgatttatttattttggttttttaaagtgttgggattataggcgtgagttattacgtttagtttttaatttaatgttagttttttttttttttttgtttatattgatttttttgattttattttgttgtggttttaaataatatttattttagattttttaaattattgatttaaaaatttaattgtttgtttatatttttaatggatatttttagttgattatattttaggtagaatttttgaatttttttttttttaaatttgtttatttacggttttttttaatttatttgttggtatttaaatttttttttatgtttaagttaaaattttgtaaattattttaaatgttttttttttttttgtattttagattaaattttttaggaaattttattaatttttacgttaaaatatattttttaaatttaacgattttttattatttttattgtaattattttggtttaatttattattatttattttagggattattgtagtagtagtttttaatttatatttttatagtttggtgtttttaaagtagttagagtcgatttttgatagtatatgttagatggtgttatttttcggtttaaaatgttgtagaggttttttattttatagagaatgaaagtcgaggatgcgtgttgcgttttttttttttgggttgttttttgattttattttttagtagtttttttatttttcgttttgttttagtttgttagttttttggttatgttcgagattattagttttattttttttagggattgcgttgttgtttattttgtttgtaatgtttttgtatagatatttgtttgtattttttttaaacgttatttttttagtgaaatttattttatttgttgtgtttaaaattgtaatttttttttagttgttttggtttttttttattttgttttgtttttttttttttttatagtaatttttatttgatgatatattaaataatttatttattagttataataatttatttatataaattatatatattttatttatataatatataagaaaaaatatataaaaatatatattttatataaataaaaaatatatatttttttataatttatatattatatatgtttatatgtataatttattgtatatgtttatatatataatttattgtatatgtttatatatataatttattgtatatgtttgtatattatatataatatataatgtttatatattatgtatgtttatatataatatatgtattttatatataaatatataaatatatttatatatatatttatatatattttatttataatatatgtatatgtatatataatatatgtttatatataatatatgtaaatatataatatatgtaaatatatatgtaaatatatatagttaaatatatatgtatatatataatatataattatatattatataatatatgatataaaaataaattgttaaaaggatatatattttatttatgtaatatataatatatgtaatatatataaaaataaattgtaaaaaatatatatttttttaattatttattttttttaattagaatgtattttttttgagaattaggaatttttgtttgttgtgtttattgatgtattttaaatgtttagaatattgtttggtatatagtaaaatttagtgaaaaaatttttagtgaatgaatgaatggaatgtatggaaatagggtttgaatagatataaattaaaatattaaaataaatattttgggtagaaggatagtaggtttttttatttatttgttttttaatttttttaaaataaatttaaattatttgaataataaatttttaaatgaaaaaaatagtttatttttgaggataatattaatagtagttttagtaattttttttagtttatggttttaattgtttatttttagaagagatttttttgtttaaattgtgggagattatagtttgtttaaattgtggtaataaagggggaaagtttttaatgatattattgtgaagattttatgttaggtagtgggagaaattttgttttgagttgaggtttttttgattttgtattgagttgatttgagaggtggtagattggggagaagagatagagaaggagaggaagttaataaagggagggttattgagttatttttattatgggtaataggaatttatttttatagatatagagtgtagggtacgtttgggggttatttagtttaaggggagatggggcggggatatttattttttaatattggttgaggtttgtttttggaggtagtaatattttagtattttaggtttgttttatgtgtttttatggttaaaaaaaaagaaaaaaaaatttttcggttatagggttgtaggtattggtagtaagtagaaagttagggtaggtatagagaaggttttaatagatttttcgattcgattcgattttgttttgtgggtggaatttttttgttcgttgttgtttgaggtttttggttatgtttcggggaggtttttttttgtttatttttttttacggttataattgaaggaggggatggagaaagtattttttttggaagattgtgtagattttggagtttgttttttggtcgtgtgtgtttgggaatttaaggattgttttaagttttgaataattaaaatttttgtagtttgggttaatgaattttttggtaatataatttttttaaatattgagtaagtttttgtaatatttgtttttattatttttatgtgtttatatatatatatggttataattttttaatttgattaatttttttgtattttaattattatattttttttttttaatttaatagtagttattttgaagttatttgaaaaaaaaaatagatttggttgtgaagaaagtatttttaaagtgatttttgttgtggtgatgaaattgtttgtttaaagagaagttttaacgggttttggttgtttaaagtttttattttatgtttttatttatttttttgaagtttaaaatagaagattttatatttttggatttattttatttttttttatttttgtttttgaattagtatatttttgtttgagtttagtttttttttgtattgatttgttaaataaagttagaaagagttatggtgtattaattttgggtttattagtttttattttgggagttataggtttagtagatatattgtttattaagtaattgaggataatagtttatgaaatgatttgatattatataatatgggtttttatatttttagtttttagtattaatttttttgttttttgttgtagtgttatatattttagaatttatttttaattttaggatattagtgtaaaggattatatattttattaattacggaatattagttgttgtataaataaatttaaggattttgatggtttagtacgatgtatgttttgtttttattgaaatagtgttgggtggtgagtaggtggatagggggtttttttttatgtagttatttaaggatttagaatgttaaaagtaatattatttttagaatatggtttttaaggttaattttgggattatgtttattttagtcggttagaagattagaagggcggggttgagttttggtaggtttgtgagtttgagaatatttttttatttatgttattggttagaggttagttttatggttttatttagatggaaggggttggttagagggtgggggttgtatttttgttacggggttattttatggaagggagagaattaaatttttttttagtaaatagttaattgattttttatagtttaaataaaaaatataaatagtatgagtttgtagtttttttttttattttttaagttttttttttaatgatttgtttggatttattggaatgagaggatttgttaggatgttgttgtgggtttgaggtgagaggattttttttatttagttttatgtgggaaggaggtttggaaggaataggtagggtatttttaagtaattgtttttttttgggaatttattttatattttgtaaagaagtatagttagggtaataatattttttagattgagaaattattaattgttggtttttaggatgttttttaagtaagataattgaaaagttgaattattttgttttttgtttttttgagtgagagtaggtagagggacggatggaaggaggtaggaattcggaacgattgttgatgcggtgggatatttttttttaataattatttttcgtttgaattatagtgtataggacgtgggtaatttgttttagttaatggttcgtgtgggataggtattgtttgatatagaggtaggggttggaatagttattttgggggttagtaaagttagttttatggaagaagttgtttttgttaaaaattaaatttaattaacgtgggggttttttagtagtagatttaatattagttatatttttttgaaatttaggtagttagaaaagttttcggtatttttagtttaatattgaagtagaggaaatgaaattgaagttatgtttgtagaatgtggatttttgtggtttaggataaatagttgattatttatttagattaaatgattttaattaagttaatttatagagatgaggttttggtttatataaaagagaggtagtttgtttattatttaaaataatttttttttttttatatattttttttttattaagatttgattattggtgtatttaaaatataatgtagtttatatttagtttgttaagggtaagtaattgtgtaaagtgaggtatatttgtaatggtgtatagttttagtaattttttgggttttagggttgagggtagtttagttgtcgtttttataaataggtggtgtaaaataatagttttagtgagtcgattcgttttttaaattttttagtagataagtatttagttagagtgttagtgagaagtataggttattattttgttttggtttatataagtttcggtagtttatggagttttggtttttttttttgttttttagtttttgtttaggtaagtgttggggttaggggtggggagagggtttttttttgaggttaaagtgttggaggtttttaaattaaagttttgtttttttgatgagattatagaatggtagagtttttttaattaggggttgttttgttagtttttttttgatgttagtttgattgagtttttggataaagatttttagtttgttttatttaattaaaatagaaattgtttggttaaagattttaagatagatacgtatgtttttttttttattatgtttggtagtcgatttatttttttgaatattcggtattatttgtaggatttggattatttgtggattatggtagtgttcgggggtttatatttaaataattatggatatttagaatagtgttttataattatatataatggagttaataagtttttttattgttttaggagaattttaataataaagaggattgattgatagttatatgtgttggagatagaaattagttaataattataattaaattttttttatagagataaatattttttaatttttttaaaatttttgaagttaaaaaaaattttatatgaatatatttttatttattttttttttttaagatgttattatatataggtttgggtttgaattgaaattataaaattttgtatagtatttgatttgtattttattttggaatgtgttttaatatagtagttgaaatattattttgaattttagattttcgttagagggaaataggagatgtttgttgattgttttatataaaagtttattggtgatattattttaattgagaaataaggtggttgatattttgtgattttttatttttaatattgttttgaaaaatataggttttttggttaagaggtaaaaagttttattattaattttttttaatattagagttgagtgaaagagtttaaatttagataaattatattatgtgggatttggattttgtttagttaaagttggtttgatgtgtgtgtgtgtgtgtgtgtgtgtgtgcgcgcgcgtgtatatatatgcgtgtacgtaaaattatagttataggaaaatttttaaatgatatgttttaatgtaaatatttttaagagattttttaggattttggttattgttaattaaaaatgtatgattagttattaaagaagtatgtgatatgtatttaggttaaatttcgagtttgttggtattgatttttatgggtgttttatagaaatttagagttagattaggtagtttaatatttttaattttttattataaggaaattaaagttgatttgtttaaggttatttaatttatatattttggaatgtggttagttggagatttggtttattatatgtatagttagaaaatatagtttgaattagttaaaggtagtaagagatatagaattaggttaagataataatgatttatgggattagtaatagtttaaaattttttttgtttagtttagggagttattttttatatataaatataaatggaattagtgtggtataaaaggaatattttgaaattgtggttgagtttttttttttagaattagttttttgtagataaaattgttatttatattagggattttttttttgtgttagtttaatatagcgtgatttttgttttatttatatagtattttttattttaatttttttttttttttgtttttggaattttaagtattttattgtcgttttttttacggtatattattttttaatttgtttatagttatttacgtaaatgataaatgttaatttttatgagggtaggaagaaggatttagttttgaatatttcgaagtttttaaaataatgttttgtttatagtaaatgtttaataaatattttatgaataaattaatgttattattatttgaataaagattataaatataattttgttaaaaaggggaatttgatattatttaattttttatttgtatatttgtttatttatattttatttttttataaaagtatttattgtgattcgttgaatttatgaagaattaatttaattttttaggttatatgggagttgggaagagaattatagagttttgattttgagttttgtgagttttttattattttattttgtgttggggaggaaaaaagaaaagaatattagtgaattaatttaagaaatgaagttttttttttttagaaattttttatggaaggaataggtattttgttattggttagggtgggaaaggaggaggtgattgtttttgaaatgttgattatgtttgtttttgttattttttttttttttttagtgggttatagggttggtttgtatagtttttttgttatataatgttgattatttgttttgttttttgttttttaatatgttttttttgttaaattggagtgaatagttatttaaaaataagtagtttaaggtaaggttaaagtaatagttttaaatttaatggttaaggtgtttagtaatttattttagtttgtaattttattatgggatggatgaggtttaggatagaaaatgtatagaggatagaaggattattaagttttaggggtttaatggggtggttgtaaaaacggaatatttaaataatatattttttttaagagtttttaaatgtaggtggttttagggaaatgttatgtgaaatttttgcgtggttgggtattgagtgtttttggaatattttgggtttagaaaacgtgtgaaattagtcgggtgaggtggtttttgtttgtaattttagtattttgggaggatgaggtgggtggatggtttgagtttaggagtttgagattagtttgaataatgtggtaaaattttatttgtataaaaaatataaaaattagttgggtgtggtggtgcgtatttaggtaatttttgtattttttatagagatgtggttttagttgtttggttgggggaggttaaggtgggaggattgtttgagtttgggaggttaaggttgtagtgagttgtaattgagttattgtattgtagttttagtaataatttgcggaaaggggagatttggttacgtgaatgaaggtaaatgtattatgtgtttatttttttttttagttttgaatatatagtttttaatttacggaaggtttgaattataaagattttttataagatatttgggatttggaatatatttttttataggaatagtggtatttgtagttttgagtttttaggatagtttataatatattgttagtattaagaattagtttagaagtttagtataaaatgataggattttaatttgagttttgtttttattggttatatgattttggataagtggtttaatttttttgaattttaggtaagaatgtttgtttttttgttttatttgtggttgatgaagattgaaaaggggtgtagatagaaaagggggtcgtgggttttgagagtattagatgatattgttttttatattgaaggaaaatgtagtaaagattttttggaatcgtttatgttttaattaggagttttaaatttaggttaataaagtatagtttttattttattttaataatttaattgggatatggatttgttagtagtgatattttaaaaaatcgtggtaaaatatttattttataaaatttattattttaattattttaaagtatataatttagtggtattaagtatatttatatgttataagattattattattatttatttttagaacgtttttattattttaaagggaaatattaagtatattaaggagttttattcgattttttttttttttttagtttttggtaatttttgttttgttttttgtttgtatagatttatttattttggatgttttatgtagatgaaattatataatatttgttttattgtgtttggttttttttatttagtaaaatgtttttaagttttatttatgttgtattatgtgttagtatattatttttttattttttttttatgtttgaataatagtttatcgtaggggtatattataatttgtttatttatttatttgttgatggatatttgagttgtttttattttttggttatggtaaataatgttgttttttttttgggtgtggatttaggagtggaattgttggatcgtatggtatttgtgtttaatttgttgaggaattgttattttatatttttattagtaatatatgaggttttagtttttttgtaatttttttaatttttgttattttttatttgttagttatggttattttagtgggtttgaattagtattaattttggttgtttatggtattttgagatttgatgtagttagtttaagattttattatattgttttgaaatattgagattggtttttttgtgggtttttttttcgtgtgtgtgtgtgtgtgtgtgtgtgtgtgtatttggtaaatttgatttagttaggttgtatgaaggaatgttatttgtttaaagtataagcgttgtgattatttggtatattttattgttatcgggtaagggattatattagtaattgtaattggaaaaatataaggtaataattgttgtatttgggagttttttaataaggaggtttgtgtgttttttgttagaaggaattgaggtttatgttttagttttttagttttttatgtttatgtgtttggagggtggggagaagaatttgatagtgttggtgttatttgttgttttagt

SEQ ID NO: 400 - DNA, 9810 bp, Artificial Sequence
  chemically treated genomic DNA (Homo sapiens)
gttgagatagtagatgatattaatattgttagatttttttttttattttttaaatatatgaatatgaggaattgaggaattgaggtataagttttagttttttttaatagaaggtatataggtttttttgttgaaaggtttttaaatgtagtagttattgttttgtgtttttttaattatagttgttggtgtggttttttattcggtgatagtggggtgtgttaggtaattataacgtttgtattttggataggtgatatttttttatatagtttggttgaattaagtttgttaggtatatatatatatatatatatatatatatacgaaaaaaaagtttataaaaaagttaattttagtgttttagagtagtgtaatgaaattttggattggttgtattagattttaagatgttatgaatagttaaaattgatgttggtttaaatttattagagtggttataattaataagtggaaaataataagggttggggaggttgtagagaaattggaattttatatgttgttggtgggaatgtaaaatggtagttttttaataagttaaatataggtattatacgatttagtaattttatttttaggtttatatttaaaagaagagtagtattatttattatagttaaagggtggaaataatttaagtgtttattaataggtaaatggatggataaattatggtatatttttacgatgaattattatttagatatgaaaaaggaataaaggaatgatgtattgatatatggtataatatggatggagtttggaaatattttattaagtgaaagaagttagatataatggggtaaatattgtatgattttatttatatgaagtatttagaataggtaaatttatatagatagaaagtagagtaggagttattagggattgggggggagagagggatcgggtgggattttttaatgtgtttgatgtttttttttgggatgatgaaaacgttttggaaatagatagtggtgatggttttataatatgtgaatgtatttaatgttattgaattgtatattttaaagtggttaaaatggtaaattttatgaaatgggtattttattacgattttttaaaatattattgttggtaggtttatgttttagttaagttgttaaaatagagtgaaaattgtgttttgttgatttgggtttggggtttttagttggaatataagcgattttaaggaatttttattatatttttttttagtatagagagtaatattatttaatatttttagaatttacggtttttttttttatttatatttttttttaatttttattagttatagatgaagtaggagggtagatatttttatttgagatttagggaggttggattatttgtttaaggttatgtgattagtaagggtaaagtttagattggaattttgttattttgtgttgagtttttgggttaatttttggtattaatagtgtgttgtgagttgttttggaaatttagaattgtaagtgttattatttttatgagaaaatgtgttttaaattttaagtgttttatgaaggatttttgtaatttaagtttttcgtgggttggggattgtgtgtttagagttgggagaggaagtagatatatgatatatttgtttttatttacgtaattagatttttttttttcgtaggttattgttgaggttgtagtgtagtagtttaattatagtttattgtagttttgattttttaggtttaagtaatttttttattttagttttttttaattaagtagttgggattatatttttataaaaaatataaaaattatttgggtgcgtattattatatttagttaatttttgtattttttgtatagatggggttttgttatattgtttaggttggttttaaatttttgagtttaagttatttatttattttatttttttaaagtgttgggattataggtaagagttattttattcggttagttttatacgttttttgaatttaaaatgttttaagggtatttagtgtttaattacgtagagattttatatgatatttttttaaagttatttgtatttgaggatttttgaagggaatatgttgtttgaatatttcgtttttgtaattattttattgagtttttgggatttgataatttttttgttttttatgtattttttattttgggttttatttattttatggtggagttgtagattggaatggattattgagtattttggttattgaatttgaagttgttgttttggttttgttttgggttgtttatttttaaatgattgtttattttagtttgataggaagaatatattagaaagtagagggtagagtagatggttagtattatgtagtaggagaattatgtagattaattttatggtttattaagaggaaggggaggatgatagaagtagatataattagtattttagagatagttattttttttttttttattttagttaataataaggtgtttgttttttttataaggaatttttaaggaaggagggttttattttttagattggtttattggtatttttttttttttttttttttagtatagggtagagtgatagaaaatttatagggtttaaagttagaattttatgattttttttttaatttttatatggtttggagagttggattagttttttatggatttaacgaattatagtaaatatttttgtaaaaaggtagggtgtaaataaataaatatgtaaataaaaaattaaataatgttaaatttttttttttagtaagattatatttgtaatttttatttagatgatggtaatattaatttatttatgaaatatttgttgagtatttattgtaagtaaagtattgttttgggagtttcgagatatttaaaattgaatttttttttttatttttatggagattgatatttgttatttacgtaaataattgtgaataagttggaaagtgatatgtcgtaagaaagacggtaatgaagtgtttgagattttagaggtaaagaaaagaaaaagttgaaatgaaaagtgttgtataaatagaatagagattacgttgtgttaagttaatataggaaaagagtttttgatataaatgataattttgtttataaaggattgattttaagaagggaaatttaattatagttttaaagtgttttttttgtattatattggttttatttgtatttgtatgtaggaaatagttttttgggttgggtaaaagaaattttgaattgttattagttttatggattattattattttaatttgattttgtattttttgttatttttggttagtttaggttgtgttttttgattgtgtatgtaataaattaagtttttaattgattatattttaaaatgtataaattaagtgattttgggtaggttagttttagtttttttgtaataaaaaattgaggatgttggattgtttgatttagttttaaatttttataaaatatttatggaaattaatgttagtaaattcgagatttgatttaaatatatattatatatttttttaatagttaattatgtatttttggttagtaataattaaaattttaagagattttttaaggatgtttatattaaagtatattatttaagaatttttttgtgattgtggttttgcgtgtacgtatgtgtgtgtacgcgcgcgtatatatatatatatatatatatatatattaggttagttttggttggatagagtttaaattttatatgatataatttatttgagtttaggtttttttatttaattttgatattgaaaaaaattaataataaagttttttgttttttgattagaaggtttgtgttttttagagtaatattggaaatgaaaaattataggatgttagttattttgttttttagttgggatgatattattagtaaatttttatgtgaagtaattagtaaatattttttgtttttttttagcggaagtttgggatttaggatggtgttttagttgttgtgttaggatatattttagagtagaatgtaggttaaatgttgtgtaaggttttatagttttaatttaaatttaaatttatatatagtaatattttaaaaaaaaaaagtaggtaggaatgtatttatatggaattttttttaattttagaaattttgaaaaaattaaaaaatatttgtttttgtggagagagtttagttatgattattaattggtttttatttttagtatatgtagttgttaattagttttttttattattagaatttttttggagtagtaaagggatttgttaattttattgtatgtgattataaggtattgttttaagtatttatagttgtttaaatatgaattttcggatattattatgatttataagtggtttaggttttataaatggtgtcgagtgtttagagggatgagtcggttgttaggtatgatggagggagagatatgcgtgtttattttgaagtttttgattaggtagtttttattttaattagataaggtaaattaaaaatttttatttaaaaatttaattaagttaatattaggaagaaattgatagagtagtttttggttggggaggttttgttattttgtggttttattaaagaagtaagattttgatttgggggtttttagtattttagttttaaaggagagttttttttttatttttgattttagtatttatttgagtaaaggttaaagagtaggaggagaggttagggttttatgggttatcggagtttgtgtggattagggtagagtggtggtttgtgttttttattggtattttggttgggtgtttgtttgttggagggtttggaaagcgagtcggtttattagagttattgttttatattatttgtttgtgggagcgatagttgggttgtttttagttttggagtttagggagttattgggattgtatattattatagatatgttttattttatataattgtttatttttgataagttgagtatgaattgtattatattttaaatgtattagtagttagattttaatgaaaaaaaaatgtataggaaggaaggaattattttaaatggtgagtaaattgttttttttttgtgtaaattagaattttatttttgtgggttgatttgattagggttatttggtttgagtagatagttagttgtttgttttaaattataaaaatttatattttgtaaatatggttttagttttattttttttgttttagtgttaggttgagggtgtcgggggtttttttgattgtttggattttagaaaagtgtagttggtgttgagtttgttgttgggaagtttttacgttgattgggtttggtttttaataaagatagttttttttataaaattggttttattggtttttagagtggttgttttaatttttgtttttgtattaggtaatatttattttatacgaattattagttggagtaaattgtttacgttttatgtattgtgatttaagcgaagagtaattattgggaaaaagtgttttatcgtattagtagtcgtttcgggtttttgtttttttttattcgtttttttgtttatttttatttagggaagtaaagagtagagtggtttagttttttaattattttgtttgaaaaatattttaaaaattagtagttagtaattttttagtttgagaagtattgttattttagttgtgtttttttgtagggtgtgaggtgagtttttagaaggagatagttatttaaaggtattttgtttgttttttttaggttttttttttatatggaattaggtgagaaaggtttttttattttaagtttataataatattttgatagatttttttattttagtggatttaaataaattattagagaaggggtttggagggtagaggagagagttgtaagtttatattatttatattttttgtttaaattgtgggagattagttaattgtttgttaaaaaaaaatttggtttttttttttttatggaatagtttcgtggtagaaatataatttttattttttgattagttttttttatttaaatggagttatgggattgatttttggttagtggtatgagtggaaaaatgtttttagatttataaatttattagagtttagtttcgtttttttagttttttgatcggttagaatggatatggttttaaagttaattttagaaattatgttttgaaggtggtgttgtttttgatattttgaatttttgaatgattgtatggagggggattttttatttatttgtttattatttagtattattttaatgaaaataaaatatgtatcgtgttgagttattaaaatttttgggtttatttgtatagtagttagtgtttcgtaattaataaaatatgtaattttttgtattagtattttgaggttaaaaataaattttaaaatatgtagtattgtagtagaaggtaagaaaattgatattggaggttgaaaatatgaagatttatgttatatggtattaaattattttataaattgttgtttttaattatttggtgaataatgtgtttattgagtttgtagtttttagaatagaggttggtaaatttaaagttagtgtattatggttttttttggttttgtttagtaagttagtataaggaagagttgagtttaggtaaaaatgtgttggtttaagagtagaaatgaaaagaaatagaatgagtttagaaatgtggagttttttgttttgaattttaaaagagtaagtgaaaatatggaataaaggttttgagtaattaaagttcgttaagatttttttttaaataggtagttttattattatagtaaagattattttaagggtgttttttttatagttaaatttatttttttttttagatggttttaagatggttgttattaagttgaaggagagaggtatagtggttaggatgtaaagaaattaattagattaaagaattgtgattatgtgtgtatataggtatatgggaatgatggaaataaatattgtagaagtttatttagtatttgaaggaattatattgttaaagagtttattaatttaggttataaaagttttggttgtttaaggtttaaagtagtttttgagtttttaaatatatacggttagaaagtaggttttaagatttgtatagttttttaaaaagggtgttttttttatttttttttttaattgtggtcgtgagggaaagtgggtaaggaagaattttttcggggtatagttaggaattttaaatagtaacggataagggagttttatttatagagtagaatcgggtcgaatcgaggaatttgttgagattttttttgtgtttattttggttttttgtttattgttaatgtttgtaattttgtaatcgagggatttttttttttttttttttggttatgggaatatatgaaataagtttgagatgttaaagtgttattgtttttagaaataggttttaattaatgttggaggataaatattttcgttttatttttttttggattgggtaatttttaagcgtgttttatattttatgtttgtgggagtgagtttttgttgtttatgatggaaatggtttaataattttttttttattggttttttttttttttttgttttttttttttaatttgttattttttaagttaatttaatatagggttagggggattttaatttaagatagaattttttttattgtttggtatggggtttttatagtgatattattggaggttttttttttttattgttatagtttaaataaattgtgattttttataatttaaataaaaaaattttttttaaaggtgaatagttgaaattatagattaaaaaaaattattaaaattattattaatattatttttaggagtaaattgttttttttatttaaaagtttattatttaagtaatttgaatttattttagagaaattagagaatagatgaatgaaaagatttgttatttttttatttagaatatttattttgatgttttagtttgtgtttgtttagattttgtttttatgtattttatttatttatttattaaaaatttttttattgggttttgttatgtgttaagtagtgttttaggtatttggaatatattaataaatatagtagataaagatttttggtttttaggaaaaatgtattttaattggaggagatggatgattaaaaaaatatatattttttataatttatttttatatatattatatatgttatatattatataaataagatatatatttttttaataatttatttttatattatatgttatataatatatggttatatattatatatatatatatatgtttgattgtatatgtttatatatatgtttatatgtattatatgtttatatatattatatataaatatatattatatatatatatatatatattataaataaaatatatataaatgtatatataaatatatttatatatttatatatgaaatatatatattatatataaatatatataatatataaatattatatattatatataatatataaatatatataataaattatatatgtaaatatatataataaattatatatgtaaatatatataataaattatatatgtaaatatatataatatataaattgtaaaaagatgtatattttttatttatataaaatatatatttttatatatttttttttatatgttatataaataagatatatataatttatataagtaaattgttataattaataagtaaattgtttaatgtgttattaggtaaaaattgttataggaaaaagaaaaagtagagtaggataaaaggggattaggatagttggaaggggattgtaattttaaatatagtaggtagggtgggttttattgaggaggtggcgtttgaaggagatgtagatagatatttgtgtaggagtattgtaggtagagtgagtagtaacgtagtttttgaggggaatgggattggtgatttcgggtatagttaggaagttggtaggttggagtagggcgagagatggggaaattgttaggagatgaggttagggagtagtttagggaagggggacgtaatacgtattttcgatttttattttttgtgagatgaggagtttttgtagtattttgagtcgaagggtgatattatttgatatatgttgttaaaggtcgattttggttgttttggggatattaggttgtgggggtgtaaattaggagttattattgtagtaatttttgaggtagatggtgatgaattggattagagtggttgtagtgaaggtggtaagaagtcgttagatttgggaaatgtattttgacgtgagggttaatgggattttttgaaggatttgatttagaatgtaagaaaaagggaggtatttaagatgatttgtagggttttggtttgagtataaggaaggatttaaatgttaataagtggattaaggaagatcgtggatgagtaggtttaaaggggggaaaatttaagggttttgtttggggtgtgattaattggaggtgtttattagaaatgtgagtaggtagttggatttttgagttagtagtttgggaaatttagagtagatgttgtttaaagttataataggataaggttaaaggaattagtatgggtagaaaagagaagagaattaatattaagttggaggttgggcgtggtggtttacgtttgtaattttagtattttgggaggttaaggtgggtggattatttgatgttaggagtttaagatta

SEQ ID NO: 401 - DNA, 8147 bp, Artificial Sequence
  chemically treated genomic DNA (Homo sapiens)
agaagaaaagtaaattaaaaaaaaattggtagtatttattttataggattgttggaaaattaaattagtgaatatttattaaagtttttggattttgaagttagatggttggggtgatgggagatgggttggggaagtgggtatattagagtttgatgatttagaaagaggttgataatatagtttgacgtcggggagaagtttggaagttatttttattaaagtttgaatttatttttggtagttttgtatttgtttgatttttagttttgtttttttttagttgtgtgattttgggtaagttatttaatttttttgagttttattgttggggacgttaaataagttaatatatgtaaagtatttagtatagtatttgatatataggtgtatttaataaaagttaattgttagggtttggagtggtggtgcgcgtttgtagttttagttattcgggaggttgaagcgggaggattgtttgaggtttggaattggaggttgtagtgtattttgattgtgtttgtgaataattattgtgttttagtttgagtaatatagcgagattttattaagaatttatgtttaaataaataaataaataaataaaagtttttttgtggagtggttgtttaatgtttatgttaatttttttcgagtatatttttttgttaatgaagaggttggaaagttaaagattagattttttagagggaaagtaggaaagtagttttggggttcgagtagtgtttttttagtttttttaacgattttgttagtgtttaatatatgatagtatagtttttttttttttttttttttttgagatggagtttcgttttgtcgtttaggttgaagtgtagtggtgcgatttcggtttattgtaatttcgtttttcgggtttatattatttttttgttttaggtttcggagtagttgggacgatatgcgtttgttattacgtacggttaatttttttttttttgtatatttttgtagtagagatagggttttatcgtgttagttaggatagtttcgattttttaatttcgtgattcgttcgtttcggttttttaaagtgttgggattataggcgtgagttattgcgtttagttaatagtagagttttttttatttaagttgggtagtggttattttcgtttatatttgttagatatagttattattatttatttagttaataaatatttatttattttgagggtattggggagttatggtaagttttgaggaggggaggttagtaggtagggtttaggtgggaatggtaaagattgggataggagtttagggaggaagttgggttaggagggatagtggaggcggttttgagttagagtgggtagtggaggggtagaggtcggattgatagtcgggttttggggggtgggatgaagatacgtgatgagggttgtaaagttttttaaggttaattgtttttttaagatttaaagtagagggagtttacggtataaggttttgttggagcgtttgattggtttagtttaggttattggtttggattattgttgtaagggattttgggaaattgagtttttggtatttttggtttttttaaaggaggagggtttatagtggggaattttcgaatatagaaaaggtttttggtattgtgtggttaaaaagaatgtgtaatgggttcggtagggtgttttacgtttgtaattttagtattttgggaggtcgaggtgggtggattatttgaggtaggagtttgagattagtttggttaatatggtaaaattttttttttattaaaaatataaaagttagtagagcgtggtggtttatgtttgtagttttagttattcgggaggttgaggtaggagaatcgtttgaatttgggaggcggaggttgtagtgagttgatatcgtattattgtatttttgtttggtgatagagtaagattttattttaaaaaaaaaaaaaaaaaaataaatttttttataaggtgtggttggatcgtgttatttaaaatgcgtgtggtatggatttagttttttttttgtttatgatttttagtgttttttgttagttttatagtgggatgatgatgatgattttttttatttaatattttaaaaaattattttaaaaaattttttgtaggtatttagtaggtgtgtatatttatggggtatatgaaacgttttgtttttttttttttttttttttttgagatggagttttattttttttgtttaggttagagtgtaatggcgcgatttcggttcgtagaaatttttgtttttcgagtttaagcgatttttttgttttagtttatcgagtagttgggattataggtatgtgttattatttcggttaattttgtatttttagtagagatagggtttttttacgttgattaggttggttttgaattttcgattttaggtgatttgtttatttcggttttttaaagtgttgggattataggcgtgagttattgtattcggttatgaaatgttttgatataggtatgtaatttgtaataattatatcgtggagaatggggtatttatttttttaagtatttattttttatattataaataatttaattatatttttttagttattttaattaatttttgtgtgtgtgagatagggttttatttttttgtttaggatggagtgtagtagtggttcgattatagtttattgtagtttcgattgtttgggtttaagtaatttttttgttttagtttttttgttttgatttttagattttataaataatttgtgatgtttgtttttttatatttggtttatttaatattttttttttttttttttttttttttttttttttttgtgagattgagttttgttttgttatttaggttggagggtaatggtgttattttagtttattgtaatttttattttttaggtttaagtaatttttatgttttagttttttggttagttgggattataggcgtgtgttattatgttaggttaatttttgtatttttagtagagatggggttttattatgttggttaggttggttttgaatttttggttttaagtgatttattcgttttcgtttttgttttttaaagtgttgggattacgggtttgagttattgtgttcggtttatttaatatttttattgttaattataatgggattaaaattttttttatagtttttagggtattatgggtttgtttttgttttttttttaattttatttttttttttttattttttttttggttttatttgttttagttttttggttttttttttgtttgtttttagatgtgtttagttatttttattttagcgtttttgtatttgttgttttttttagagtcgtatatggttggttttttgtttttttttaggtttttgtttagatgttatttttttaaagaggtttgtttcgattttttttgttgttgtgtcgtttttttatttgtgatttttttgtattattatttttaggacggcgggggttttgtgttttgttgtagttttaggaagtgtttgatagatttttgtttcgagattagttttatttggttttttgggttttagttttcgtaatcgtgaaggagattttcggtaatttgagtttgttgggaaagggttgggttttatgtaaatatttttaaagtattttttttttttttttttttagattaggagtttgagggagaggtatagaggttttttttttttaagttagtttttatttgtttaagaagatgtgaaggagatttaggagattttgggatagggaggaatttagagggaagggatattttttttttcgtcgtaattttgggagttttttggaggaggagattcgattagtttgtaattttggcgcgttttaggaggagaaagcggttttttttatattgtatttttttttatagaattttttttttagttttggaagtttttgtttatagtcgaggcgtcgagagcgtttgttttgtttagatttgcgcgagtttggcgttcgcgttttgaacggcgtcgttgtttagttttttttttcgggaggtgggagcggttatttagggtttcgtggttgtttttgtaaggaggcgaggttcgaggatattcgagacgttcggttataattaattaggatacgtggcgaatttttttttaatatttgttttcgaatttttttatatttagcgtttcgggtttcggtttttgcggtagaggagatagtaaagcgttttttaaaaataatttttttttcggcgatcgagattttttttgtttttcgtatagcggaaattttttagtggtatcgagggggcgagggttaagtgggggggagggtgattatcgttttttatttttgttttgagtttgaatttttttaatttagttagttttagttttttttttatttagtttttaggaggaaggggcgtttaagcgcgggtttttggggttagattgttttttattgtaattggtttttttttcggtttttgttttttttagtttatagggtatttgttttttttggagttatattttggtttttcgaggtgtcgttgggattcgggtaggggtgagggtttagggggtatagggggagtcgagggttataggaagggttggtggttgaaggagatttaggggttaggggacggtggtttttacgtgtttgggacgtttttagttatcgttttatgttttcggcggggggttagttgtttttatcgttagtttaatttagtatttggttagggtattagtttggtgggggggcgtgagtttagtttttggggcggtttagtttatataaggttatggggttgggcgtaaagtatgtttgggtttagggtgggtatggtgcgggagtagggaggtgagaggtttagttgttttttagaatttttttttggggataattttttttagttaatagtatagtttaggtttttttatataaggttacggttgttggttttttttttgggttagtgttatttttaggatatagatagtttttttttagtttagtttagttaggtattgtacggggcgggaatttgggtgggggttagagtaggggatttttgtgggtgttagaggtttggtttgggaaagggtttgtgtgttattttttgttttattaatatttttttatataaaggtaggtcggtgcgtgggaaggttgatttttgtgtgtttgggaggtttttttatttgtgaggttgtttgaattttttattgggatttgtgatttttgcggtataagttttgggttatggggagggattcgagatgaaaggggttttgatagttgttaattgttattttttgtaaggggttgttgagttaggtttgtgtttattatagtttgtcgttaatattggcgttataagtcgtgggaggtgtgtttgtcgtttagtagagtttgtaagagtaggtgtcgtaggttttttttgcgtttgttattgtgtgggtttttgtgattttgtttttgatttagtagcggatatatgagtgttttgggtatgtttttgagtttggaagtgtgattgtgtgatttagtttatagtgtgatttggggagtttgcggtggtgggggtgtgtggttttggggttttttgtttatgttttttgtggggggggttattattttgttttagtgtttttttttggggtgtttttggtagggattaggggggtattttttgaagggagggggtttgggttgttattttaggatgtttttgagtttcgaggtttggattcgtgtttttttagttattttggtttatttgttttgggtttgttgatttggtgtaagtcgagtttcggaatgtgggggtggggcggggtagtagttgggggtgggatggtaggtagttgttagattttaaaaataattattttggatagtagtatttaaggtttttggcgggtttttgttttttttttttggttttagtttatcgtggttttaattttttttttataattttatttgttttttattttcgttttttatcgttgttggaggtttttttttttttttgggtttttttttttttttgggtttagtgaataaaataataataatagtaggatttggcgtagtggtttatacgtataattttagtattttgggaggtcgatgttggaggattatttgaggttaggagttttagattagtttgggtaatatagtgagattttatttttgtaaaaaagtagtaataataaataataataatagtagttattagggttttaggttttaattttatgttagggtttgtgtttagttaattttatggttaagtttagaggattttggtaattttacggggtaggtttagtttataggagatagaggtttagagaggtttagtgattggtttggggttatatagtagggaaatggtataggtgggatttgaatttgtttttgacgatttagaggttgagtttttttttttttttgagttttgtgggagaattgttagtaggtagaggtgggggtagttatttagttttttttcgatttagttttttgtttttggattgataatttaagaatttgtttatatatttttagtagtatttttatttttatttttttattagtttttcgtacgaatttttaaaataataataataggttaggtgtcgtgatttatgtttgtaattttagtattttgggaggtagaggtgggcggattatttgagtttaggagtttaagattagtttggttaatatggcgaaattttaattttattaaaaatattaaaaaaaaaaatagttaggtgtggtatacgtttgtagttgtagttatttaggaggttgaagtaggatagttgtttgaatttgggaggtggaggttgtagtgaattgagattatgttattgtattttagtttgggcgatagagcgagattttgttttaaatataataataataataataataatagtagttaagtgaaataatgtttattgtgtattaggtattgtttcgagagttatatttgtatttatatatttaatttttttaatatttttatgcggtaagtgttgttaggatttttattttttagatgagtaaattgaggtatagaggttaagtaatttgtttttggttatatagttggttgtaggtagtagagttgggaattaaattttgggttgattttagaatttatatttttatttatataaaatatttttttagttttcgggaggggttcgttttttatttggggaaattgagtttttagtaagaatgattagtttaggtttatttaattgggatacggtagagttaggtttttgatttaagatttcggatgtttttttgttgagatataggggtttagagagaggattttttttgttttaagttatatagtttgtttgattttaacgttttgtttagtttttttgttgttgtttgtaagatgcgagttaggcggggtatagtggtttacgtttgtaattttagtattttgggaggtcgaggcgggtggattatttgaggttaggagttcgagattagtttggttaattagtagagatggtgaaattttatttttaataaaaatataaaaaaattagttaggtatggtggtgtgcgtttgtaattttagttatttaggaggttgagataggagaattttttgaatttgggaggtggaggttgtagtgagtcgaggtttcgttattgtattttaatttgggtaatagagtgagattttattttaaaaaaaagaagaaaaggtcgggtgtagtggtttacgtttgtaattttagtattttgggaggtcgaggcgggcggattataaggttaggagattaagattattttggttaatatggtgaaatttcgtttttattaaaaatataaaaaatgagtcggcgtggtggcgggcgtttgtatttttagttattcgggaggttgaggcgggagaatggtgtgaatttaggaggtggagtttgtagtgagtcgagatcgtgttattgtattttagtttgggtgatagagcgagatttcgttttaaaaaaaaaaaaagaagaagaagaagaaaaaagatgttagttaatttttaattttttttttttgttttgtttattagg

SEQ ID NO: 402 - DNA, 8147 bp, Artificial Sequence
  chemically treated genomic DNA (Homo sapiens)
tttgatgggtagggtaggaggggaagattgaagattagttggtattttttttttttttttttttttttttttttttttgagacggagtttcgttttgttatttaggttggagtgtagtggtacgatttcggtttattgtaagttttattttttgggtttatattattttttcgttttagtttttcgagtagttgggaatataggcgttcgttattacgtcggtttattttttgtatttttagtagagacggggttttattatgttagttaggatagttttgattttttgattttgtgattcgttcgtttcggttttttaaagtgttgggattataggcgtgagttattgtattcggttttttttttttttttttgagatggagttttattttgttatttaggttggagtgtagtggcgagatttcggtttattgtagtttttattttttaggtttaagagatttttttgttttagttttttgagtagttgggattataggcgtatattattatgtttggttaatttttttgtatttttattagagatggggttttattatttttattggttggttaggttggtttcgaatttttggttttaagtgatttattcgtttcggttttttaaagtgttgggattataggcgtgagttattgtgtttcgtttagttcgtattttgtagatagtagtaagagaattgggtaaggcgttggggttaggtaggttgtgtaatttggagtaagagaaattttttttttgagtttttgtgttttagtaggaaggtattcggagttttagattaagggtttggttttgtcgtattttagttgggtgagtttggattagttatttttgttggaaatttaatttttttaggtggaaaacgggtttttttcggaggttggaaaaatattttgtgtgggtaagagtgtaggttttggaattagtttagggtttgatttttagttttgttatttataattagttgtgtggttaggggtaagttgtttaatttttgtgttttaatttatttatttagaaaatgaggattttaatagtatttgtcgtatgggagtgttgaaaagattaaatgtgtgaatataggtgtagttttcggaatagtgtttggtatataataagtattattttatttagttgttattattattattattattattatgtttgagatagagtttcgttttgtcgtttaggttagagtgtagtggtataattttagtttattgtaatttttattttttaggtttaagtaattattttgttttagttttttgagtagttgtaattataggcgtgtgttatatttggttatttttttttttggtatttttagtagagttggggtttcgttatgttggttaggttggttttgaatttttgaatttaagtgattcgtttatttttgttttttaaagtgttgagattataggtatgagttacggtatttggtttgttgttgttattttaaaggttcgtgcgaggagttggtgagaaggtggaggtgagggtgttgttgggagtatgtgagtaggtttttggattattaatttaaagataaagggttgggtcgggggagggttgggtagttgtttttatttttgtttgttgatagtttttttatagggtttagaagggaagaaaagtttagtttttgggtcgttagaggtaggtttaaattttatttatgttatttttttgttgtgtgattttaggttagttattaggtttttttggatttttgttttttgtgaattgagtttgtttcgtaggattgttaggattttttgagtttggttatgaggttggttgagtataggttttggtatggagttggagtttggaattttggtggttgttattattgttatttgttattattatttttttgtagagatggggttttattatgttgtttaggttggtttgggatttttggttttaagtgattttttagtatcggttttttaagatgttgggattatgcgtgtgagttattgcgttaggttttattgttattattattttatttattggatttagaaaggagaagggatttagaaaggagaaggggtttttagtagcggtgggagacggggatgggaagtaggtgggattgtgggagggagattgggattacggtgagttgaagttagggaagaggaatagggattcgttaaagattttgggtgttgttgtttagggtggttatttttagaatttggtaattgtttgttattttatttttagttgttgtttcgttttatttttatatttcggggttcggtttgtattaagttagtaggtttaagataggtgggttagggtggttgggaggatacgggtttaggtttcggggtttaaggatattttgggatggtagtttagattttttttttttagaggatgtttttttaatttttgttagggatattttaggagagggtattgaggtagggtggtgattttttttataagagatataagtagaaagttttagagttatatatttttattatcgtagattttttagattatattgtaaattaagttatatagttatatttttaaatttaaggatatgtttaggatatttatgtgttcgttattaagttagaaataaggttatagggatttatatagtagtaaacgtaaagaaagtttgcgatatttgtttttgtagattttgttaggcgatagatatattttttacggtttgtggcgttagtgttggcgataaattgtaatgaatataggtttggtttaatagttttttgtagggggtgatagttggtagttgttaggattttttttatttcggatttttttttataatttaagatttgtgtcgtagaaattataggttttagtggggggtttaggtagttttatagatggaggggttttttagatatataagggttaatttttttacgtatcgatttgtttttgtataggaggatgttggtggagtaaggggtgatatatagatttttttttaagttaagtttttagtatttatagaaattttttattttggtttttatttagattttcgtttcgtgtagtatttggttgggttgggttgaaggggggttgtttgtattttggaggtgatattgatttaaaggaagggttagtagtcgtggttttatatagggggatttaggttgtgttattggttgggaggggttgtttttagggaggagttttggagggtagttgagttttttatttttttgttttcgtattatatttattttgaatttaggtatgttttgcgtttagttttatggttttgtatgggttgagtcgttttaggggttgggtttacgtttttttattaagttgatattttgattaagtgttgagttgggttggcggtggggatagttggtttttcgtcgggaatatgggacggtggttgggaacgttttaagtacgtagaagttatcgttttttggtttttgagttttttttagttattagttttttttgtggttttcggttttttttgtgttttttgggtttttatttttattcgagttttagcggtatttcggggaattaaggtgtggttttaggaggagtagatattttgtgagttggaggaagtagaggtcgggagaaggattaattgtaatggagggtagtttaattttagaaattcgcgtttgggcgttttttttttttagggattgagtggaggggaaattgaggttggttgagttggagagatttaaatttagggtaagggtgggaggcggtggttatttttttttttatttaattttcgttttttcggtgttattgggagattttcgttgtgcgggggatagggagggtttcggtcgtcgggaaaggagttatttttagagggcgttttgttgttttttttgtcgtaaaggtcgagattcgaggcgttgggtatgggggggttcgggggtaggtgttggaggggggttcgttacgtgttttggttaattataatcgggcgtttcgggtgttttcgggtttcgtttttttataagggtagttacggggttttgggtggtcgtttttatttttcggggaagggggttgggtagcgacgtcgtttagagcgcgggcgttagattcgcgtagatttgggtagagtaagcgttttcggcgtttcggttgtgagtaaggatttttagggttgagaggggggttttgtggaggagagtatagtatagaggaagtcgttttttttttttgggacgcgttaggattgtaggttgatcgggtttttttttttagggagtttttaggattgcgacgaagaaaagaatgttttttttttttgagtttttttttattttagggttttttgggttttttttatatttttttaggtaggtgaggattggtttagagaaagggagtttttgtgttttttttttagatttttgatttgaggggggaggggagaggggtgttttagaaatatttatatggggtttagtttttttttagtaagtttagattgtcgagggttttttttacggttacggaaattgaggtttagaaaattaaatggaattggtttcgaaatagggatttattaggtattttttgaggttataataaaatataaaattttcgtcgttttggaggtgatagtgtaagagggttatagatgaggggacggtatagtagtaggggaggtcgaggtaggtttttttgggaagatgatatttgagtagagatttgaaggagaatagggagttagttatgtgcggttttggggggaatagtaggtgtaaaggcgttgaggtgagaatggttgggtatatttgaggatagataggaaggaggttaggggattggagtagatggggttaaggagagagtgggaggaagaagatgaggttggaggggagataggagtagatttatggtgttttaggggttgtgggaggagttttaattttattgtgattgatagtgaaaatgttagatgggtcgggtatagtggtttaggttcgtaattttagtattttgggaggtagaggcggaggcgggtggattatttgaggttaggagtttaagattagtttggttaatatggtgaaattttatttttattaaaagtataaaaattagtttggtatggtgatatacgtttgtaattttagttagttaggaggttgaggtataagaattgtttgaatttaggaggtggaggttgtagtgagttgagatggtattattgttttttagtttgagtgatagagtaagatttagttttataaaaaaaaaaaaaaagaaaagaaaagaaaaagaaaatgttaaatgaattaggtatagaaagataaatattataagttatttgtgggatttaaaaattaaaataaggaggttgaggtaggaggattgtttgaatttaggtagtcgaggttgtagtgagttgtgatcgagttattgttgtattttattttgggtaagagagtgagattttgttttatatatataaaaattaattaaaataattaaaggagtataattggattgtttgtaatataaaggataaatgtttgagaagatggatattttattttttacgatgtgattattataagttgtatgtttgtattaaaatattttatggtcgggtgtagtggtttacgtttgtaattttagtattttgggaggtcgaggtgggtagattatttgaggtcgggagtttaagattagtttgattaacgtggagaaattttgtttttattaaaaatataaaattagtcggggtggtggtatatgtttgtaattttagttattcggtaggttgaggtaggagaatcgtttgaattcgggaggtagaggtttttgcgggtcgaaatcgcgttattgtattttagtttgggtaaaaagagtgaaattttattttaaaaaaaaaaaaaaaaaaaagaataaaacgttttatatattttataaatatatatatttattaaatatttataaaaaattttttagaataattttttaaaatattaaatggaaaaaattattattattattttattgtgagattgataggaggtattgagggttataagtagggaagaggttggatttatgttatacgtattttgggtggtacggtttagttatattttgtgggagggtttgtttttttttttttttttttgagatggagttttgttttattattaggtaggagtgtaatggtgcgatgttagtttattgtaattttcgttttttaggtttaagcgatttttttgttttagtttttcgagtagttgggattataggtatgggttattacgttttgttaatttttatatttttagtagagaaggggttttgttatgttggttaggttagttttagatttttattttaggtgatttatttatttcggttttttagagtgttgggattataggcgtgaggtattttgtcgggtttattgtatattttttttagttatatagtgttagaagttttttttatgttcggggattttttattgtaagttttttttttttggagaagttaaagatgttagaaatttaattttttagaattttttgtagtaatggtttaggttagtgatttgggttgagttaattaaacgttttagtaggattttgtgtcgtgagttttttttgttttgagttttaaagaaatagttggttttggggagttttataatttttattacgtatttttattttattttttagagttcgattgttaattcgatttttgtttttttattgtttattttagtttaagatcgtttttattgttttttttgatttaattttttttttggatttttgttttagtttttgttatttttatttaaattttatttgttgattttttttttttagagtttgttatggttttttagtgtttttaaggtaaatgagtatttgttgattaaataaataatagtaattgtatttggtagatgtaggcgagagtaattattatttagtttaaatagaaaggattttgttattggttgggcgtagtggtttacgtttgtaattttagtattttgagaggtcgaggcgggcggattacgaggttaggagatcgagattattttggttaatacggtgaaattttgtttttattataaaaatatataaaaaaaaaaaaattagtcgtgcgtggtggtaggcgtatgtcgttttagttatttcggggtttgaggtaggagaatggtgtgaattcgggaggcggagttgtagtgagtcgagatcgtattattgtattttagtttgggcgatagagcgagattttattttaaaaaaaaaaaaaaaaaaaaggattgtattattatgtattaggtattgataaaatcgttggaagggttgaaggaatattgttcgggttttagaattatttttttattttttttttggaaaatttagtttttagttttttagtttttttattgataggagaatgtgttcgaaggaggttaatatggatattaaatagttattttataaagaagtttttgtttgtttgtttgtttgtttagatatgggtttttgatggggtttcgttatgttgtttaggttggagtatagtagttatttataggtataattagagtgtattgtagtttttaattttaagttttaagtaattttttcgttttagtttttcgagtagttgggattataggcgcgtattattattttaggttttgatagttaatttttattgaatatatttgtatgttaagtattgtgttaagtgttttatatatgttgatttatttaacgtttttaataataaggtttagagaggttaagtgatttgtttaaagttatatagttggaagggggtagaattgggaattaaataggtataaggttgttaagaatggatttaggttttggtggaaataatttttaggttttttttcgacgttagattgtattgttagtttttttttaggttattaggttttagtgtatttatttttttaatttattttttattattttagttatttgattttagggtttaaggattttaatgggtatttattagtttaattttttaatagttttatgaagtgagtattgttaatttttttttaatttatttttttttt

SEQ ID NO: 403 - DNA, 6113 bp, Artificial Sequence
  chemically treated genomic DNA (Homo sapiens)
ataaaaataaaattgtttttatttatagttgatataattatttatagagaatgtttaaaggatttgtaaaaggttttatttaagaattagtaggtgagtaaaataggttgtaagatatatgtttaatatggaaaaatttattgtattttaatataatagtaataaagaattagaaattacgttttttaaagtattatttataataataatataatataatatattttataataaatttaataaaatatattatgatttttatgttgaaaattataaattagtgataaatttttaaaaatgattaagtaaaaggtttttgtgaattaagttaaattgattttgatattaaattttatttttttaaatgttacgttatttaatttgttttttttgagtagtaaaaatattttgtgaggttaagtaggtattgttattttcgttttatagagtaagttggagttgttatggttaagtatttatatttttaggtatgtatttatggaaaatgaaaatttatgtttatacgaaatttatatgtgaatgttttttgtagttgtatttataattattaaaaattgtaagtaattaaatttaaatgttttttaatgagtaaatgaataaattggtatatttattaatatggaatattaattagtagtaaaaaggagtaaattattgatatacgtaatgaattttaaaggtattatgttgaatagaagaagttaggtttaaaaggttatatatggtataagtatatatgtgggatagttttaaatggaaaaaagtataatggtagagaataaattagtggttgttgaggttagggatgaggagagattgtaattataaaaaggtagtatgagggagttatttagggtgacggaattgttttgtattttgattttggtgttggttatattaattatatgtgtttaaatttatagaattatatattaattttaaaagttaattttattgtattttaaaaatagaatttaaaaaaattaattaatagtaaatagaaaattaaagaaaaaaaatgagatattataatatatttattagaagagttaaaattaaaaagattgattatattaagtgttgataaggatataggataattggaaattttatatatttttggtgggaaggtaaaacggtattattatttaggtagttttttaagaagttaaatatatatttaataagttgatttagttattttatttttaaatattatattaagagaaataaaaatataagtttatataaagatttatatatgaatgtttataatttatttgtaataatttttaattagaaataatttaaatatttatgaataggtgaatggataaataaattatggtatatatatataatggaatattatttagtattaaaaagaaataaattattgataaatataaaaatatggatgaattttaaaataattatgttgagtgaagaatttaaaaaataaaaaaaaaaaaagtagaatatgtgttgtatgtttttatttaaataaaattttagttaggcgtattgttttatatttgtaattttagtattttgggaggtcgaggtaggtagattataaagttaggagtttaagattagtttaattaatatggtgaaatttcgtttttattaaagatataaaaagttaattgggtagggtggtatatattttagttatttgggaggttgacgtaggagaattatttgaatttgggaggtagaggttgtagtaagtcgagatagcgttattgtattttagtttgggcgatagggcgagattttattttaaaataaataaataaaaataattaaataaaaattataaaaaatataaattaatgtatagtgttagaaattagatgagtgtttatttatggaagtagaagtataaggtaagattagaaaggagtataataaattgttgtggatattgaatatgttaatttttttgattgtgttgatggttttatagatatatatatatgttaaaatttattaaattatatattttaagtatgggtaattttttttgttaattatattttaataaaatttttaaaatgtaattataattatgtaagaaaatatataaattagtgagaatatgtaaaaataaaatatttatgttattgtagaatagatatgattgttaatttgaaattttaatggtattgtatttttatataaatgaatgatataaaaattggtataaatatatttgtttgttgttttttgggtttgtttttttttttttttttgaggtggagttttattttgttatttaggttggagtgtagtggtgtgatttcggtttattgtaatattcgttttttaggtttaagtgatttttttgttttagtttttcgattagttgggattataggcgcgtgttattatgtttagttaatttttgtatttttagtagagatggggttttattatgttggttaggttggtttggaatttttgattttaggtgatttatttatttcggttttttaaagtggtgggattataggtatgagttatcggatttagttataaatggattttttaatgggtaaaaggtttgaataatattttatcgaagatttgtagatagtaaataagtatatgaaaagattgttaatatttttaggtattaggaaaatgaaatttaaaattataatgagatattattatatatttattaaaatggttaaaataaaaataaaaatatatttaaaaattagataatattaagtgttggtgagggtgtggaaataattagaattttaatgtattgttggtaggaatataaaatggtatagttattttgaaaaatagtttggtagttttttataaagttaaatatatattgattatataatttagtaattttattattagatatttatttaagagatatgaaaatttacgtttatataaattttgtatgggaatgtttgtagagtttttgttataattatagaaattggaaatattttaatgttttttagtttgtgaatagataaattggtaaatttatataatggaatattattgagtaataaaaaggaataattattgatatatggatgaattttagttatattatgttatgtgaagtaagttagatttaaaagtttaaattttgtataattttatttatatgatattttagaaaagataaaattataggtttataaaatatattagtagttgttaaagggtgtgggaatgaattattaaggagttggaggaaattttgatggtgatggaattattttattatttgaatttagtgaggttattttatttatttgttaaaaataataaaattgtatattataaagggtgaatgttattgtatgtaaattatattttaatttaaaaaaatttagtttgatagtttgtatatttttaattttattgataatttatggaaaagaaatatttttttgtttgtaatttgttaagaaatatttaatattatgttatgttttttgtaggtttttttttttttttgtgagatatattttttgtttgatagaggagtttattagggaaataagtttaaatattaaaataagttatagaaaaaggttaggtaaaaataaattaattgagtgataaattatagaatatattttatatgtgtgggaaatgaatggtatataattttggaaaggttttagtgttttttaatattgttgattttatattatttttaatttttaagtgaggatgatgagatttggagaggataagtatttttttcgtgattttcgagttattaggtgttaaagttgagattttaatttacgttttttcgtttaaaatttgatattttttgtatgcggcgatggaataatatagaagaggttacgacggcggttatatagtgtgattttaatggatagtatcgtttttttattttttaaataattcgtttaattatttggtacgaattttatatagtaatattatgattattgttacgttttttaaattgagtttaacggggttttggaatgttaattttcgagaaaggaattagcgagttttgtggggatatggatttatttttgataagttttggtagtaaggaaggcgtatggggttagcgtcggagttagggtgttatcgaaaagggtaaatattaagaaagaagatagtcgaggcgttgaagatatttttttttaattatattatttagttttgggttataaggcggggaatagcgtacgaaaaattttttttttggtttttttagtttttttggtgaaagattttcgtggatttttttttgttttcgtcgttagtttagggttaaaattgaggtttttttataggcgtggttgggaggaaagtggtggtgcgttttaatagcgtaagtagttcggggtacgtcgggggaaggcgttgggtagtagggatcgcggacgtacgaggtcgggttaaggcgtttagagtcgggtcgggtagggtttcgatgttagagtgaaggggtcgataggggagaacgaattcgggaaatttttttcggtgatattttaagtgtcgtatgatgcgttagttgattaggggtttttattttttttttttttattgatttcgtaattattgattacgtaatcgttgtttacgtcgttattttatttttttagtttttgtattgcgggatgtagtagtatttgttttcgaattggttcgtgtttacgtgtttttttattttttttgatagcgatttttataaggcgcggaataaattttgagattaatttatgtcgtttatttagtttttagcgttgttagtagcgggattcgtagtaggggtaatgttttagtcgtcgatttagtttatcgaggcggagaagttaggtcggtttttattttggagtttttttagtaacggcgtttattattggtcggatatattatcgattgattaatgggagattttgttgttttagtttcgtttttgagttttgttatggcgacgtttagtgttttagtcggtgtgaggatacgatatgttggggtttttgttcgtacgttaaacgggtttggaggatttttttcgttttcggagagtagagttaatacggaggtaaagaaaattttattttttggttaataggttagttagaatttggattaatgattgtaagttttgttttatattttttcgttttatcgtttttttgttattaaattattatttgttttttaatgttgtgtggtttgttaaaataggattttttttatttattggtaataatttgtaggcgggggggcggcgggggtgggggggggtttttcgggggtggggggggttttttcgcgggtttaggtgaagatattataaatttaaataagaatatttcgttgtattgtatttttttttttttaagttattttaaagaataattgttttttacggattcgtttatttatttagtttgtatatttagtgaatttttatagtgtgttaggtagtttattaaaggtagaggatataggttaggaattgaataaagtttagaatgattagagcggagaattggggtagggattattgataagagatgaagtagatagaaattagatgaggaagagttttgtgtatttgagtagaggtgtgaagatgagaataaggtaatagttattgtattttgttttttgtttggagaatgggttgtaattgagaataagagtgggagttaagttaggtaattgttgtgattatatttgttcgggagagagttgttggaagtttgggttatagagttgttaagtagaataaagatagtggagagatttgaataacgtttgagaaatagaattaataggttatggaaattgagtggatacgtgaatgataaaaagagaagaatgaataatgatttttagatttatgttttgtataagaagttgaatgttggtaatatattttgagagagggttttttaaagggaagaagtaagttgtatttttaattttgtttatattaattgaggaatttgtgaagatatttatttggagaatatagttgtttatgagttttgcgttttggagaaatttaaatattagtttttaatattttattt

SEQ ID NO: 404 - DNA, 6113 bp, Artificial Sequence
  chemically treated genomic DNA (Homo sapiens)
ggataaaatgttggaaattaatatttaaatttttttagaacgtagaatttataagtaattgtgttttttaagtaaatatttttataggttttttaattaatgtgggtaaaattaaaagtataatttgttttttttttttggaaaatttttttttagagtatattattaatatttaattttttatataaggtatagatttgggaattattatttatttttttttttttgttatttacgtatttatttaatttttatggtttgttgattttattttttagacgttgtttaaatttttttattatttttattttatttggtaattttgtggtttaggtttttaataattttttttcggataagtgtaattataatagttatttaatttggtttttatttttgtttttagttgtaatttattttttaagtagaaaataaaatgtaatagttgttattttatttttatttttatatttttatttaagtatataaggtttttttttatttagtttttgtttattttattttttgttaatggtttttattttaatttttcgttttagttattttgaattttgtttaatttttggtttgtgttttttgtttttaataggttgtttggtatattgtaggaatttattaaatatgtagattgaatgaatgaacgagttcgtggagggtagttattttttggagtaatttaagagagaaggaatatagtataacgaagtatttttatttaggtttatagtgtttttatttgagttcgcgggggaattttttttattttcggggaatttttttttattttcgtcgttttttcgtttgtaagttgttattagtaaataaaagggattttattttagtaagttatatagtattagagggtaaataatagtttggtggtaggagagcgatgagacgggaaagtgtggggtaaagtttatagttattggtttagattttaattggtttgttagttaaaaagtaaggttttttttattttcgtgttgattttgtttttcgaaggcgaagagggttttttaaattcgtttggcgtgcggataaaaattttagtatatcgtgtttttatatcggttggagtattggacgtcgttatgatagagtttaggggcgggattggaatagtagagttttttattggttagtcggtgatatattcggttaatggtgagcgtcgttattagaagggttttaggatggaggtcggtttgattttttcgtttcggtgggttgggtcggcggttggagtattatttttattgcgggtttcgttgttggtagcgttggaaattgggtggacggtatgggttggttttaggatttgtttcgcgttttgtggagatcgttgttaagggaagtgaaagagtacgtgggtacggattaattcgggaataaatattattatatttcgtagtataagaattggagaggtgaggtggcggcgtgggtagcgattgcgtggttagtgattgcgaggttagtaaaggaaggaaaagtgagagtttttagttaattaacgtattatgcgatatttagggtgttatcggagagaatttttcgagttcgtttttttttgtcgatttttttattttggtatcggagttttattcggttcggttttgggcgttttggttcggtttcgtgcgttcgcggtttttattatttagcgttttttttcggcgtgtttcgggttgtttgcgttgttaaggcgtattattattttttttttagttacgtttgtagaggagttttagttttagttttggattggcgacggaggtagggaaaagtttacggaaattttttattaaaggggttagaagggttaggggaggggtttttcgtacgttgtttttcgttttgtgatttagagttgagtggtgtaattgaagaggagtatttttagcgtttcggttgtttttttttttggtgtttatttttttcggtggtattttggtttcggcgttggttttatgcgttttttttattattaagatttgttagaagtaggtttatatttttataaggttcgttgatttttttttcgggagttgatattttaagatttcgttgagtttaatttaagaaacgtggtaataattatggtgttattgtgtaggattcgtgttaagtagttgagcgggttgtttggggagtaaggaggcggtgttgtttattgaaattatattgtgtagtcgtcgtcgtaattttttttgtgttgttttatcgtcgtatgtagaaaatgttaggttttgggcgaagaggcgtgggttagaattttagttttgatatttgatagttcgggaattacggaaaaagtatttgttttttttaagttttattatttttatttgaaagttagagataatataagattagtaatgttgagaagtattaagatttttttaagattatgtgttatttattttttatatatataaaatgtattttgtgatttattatttaattaatttatttttgtttggtttttttttgtaatttattttaatatttagatttgtttttttaatgagtttttttgttaggtagggaatatgttttataaaaaaagaaaaaagtttgtaaagaatatagtatggtgttaagtattttttgataggttgtaagtagagagatgttttttttttataagttgttagtaaaattaaaaatatgtaaattgttagattgagtttttttaaattgaaatataatttatatatagtaatatttattttttatggtgtatagttttattgtttttgataaatgagtagagtaattttattggatttaagtaatagaataattttattattattagaattttttttaattttttagtagtttatttttatattttttggtaattattgatgtgttttatgggtttatagttttgttttttttagaatattatataaatggaattatataggatttagatttttgagtttggtttgttttatatagtataatgtagttgagatttatttatgtgttagtagttgtttttttttattgtttagtagtattttattgtatgggtttgttagtttatttgtttataagttgaaggatattaggatgtttttagtttttgtgattgtgataaaagttttataaatatttttatataggatttgtgtgaacgtaagtttttatattttttgggtaaatatttagtagtgggattattaagttgtgtgattaatgtgtgtttaattttatgagaaattattaaattgttttttaaagtggttgtattattttgtatttttgttagtaatgtattaaaattttagttgtttttatatttttattagtatttagtattatttgatttttgggtgtgtttttatttttattttagttattttgataggtatatagtggtattttattgtgattttaagttttatttttttaatgtttgaggatgttgatagtttttttatgtgtttatttattatttatagattttcggtgaagtattgtttaaattttttgtttattaaaaaatttatttatggttgggttcggtggtttatgtttgtaattttattattttgggaggtcgaggtgggtggattatttgagattaggagttttagattagtttggttaatatggtgaaattttatttttattaaaaatataaaaattagttgggtatggtggtacgcgtttgtaattttagttagtcgggaggttaaggtaggaaaattatttgaatttgggaggcggatgttgtagtgagtcgagattatattattgtattttagtttgggtgatagagtgagattttattttaaaaaaaaaaaaaaaaataagtttaaaaaataataaataaatatatttatattagtttttgtattatttatttatatagagatataatattattaaagttttaaattaatagttatgtttattttataataatatgaatattttatttttatatatttttattaatttgtatatttttttatataattgtaattgtattttgagagttttattgaagtataattgataaaaaaaattgtttatgtttaaaatgtataatttggtaagttttgatatatgtatatatttgtgaaattattaatatagttaagaaaattaatatatttaatatttataataatttgttgtgtttttttttagttttgttttatgtttttgtttttatggataggtatttatttgatttttgatattatatattagtttgtattttttataatttttatttagttatttttatttgtttattttgagatggagtttcgttttgtcgtttaggttggagtgtagtggcgttatttcggtttattgtaatttttgttttttaggtttaagtgatttttttgcgttagttttttaagtaattgagatgtgtgttattttgtttagttaattttttgtatttttagtagagacggggttttattatgttggttaggttggttttgaatttttggttttgtgatttgtttgtttcggttttttaaagtgttgggattatagatgtgagatagtgcgtttggttagaattttatttaagtggaagtatatagtatatattttgttttttttttttttgttttttaggttttttatttagtataattattttgagatttatttatgtttttgtgtttattagtagtttatttttttttaatgttgagtaatattttattgtatgtatatattataatttgtttatttatttatttgtttatagatatttgggttgtttttagttaggggttattataaataaattatgaatatttatgtgtaagtttttgtatggatttatgtttttattttttttgatgtaatatttagaaatggaatggttgagttaatttgttaggtgtatgtttaattttttaagaaattgtttaagtggtggtatcgttttatttttttattaggagtgtatgagatttttagttgttttatatttttattaatatttggtatggttagtttttttaattttagtttttttagtaggtgtgttgtggtattttattttttttttttagttttttgtttgttattagttggtttttttagattttatttttaaaatatagtaaaattaatttttaaaattggtgtatagttttataaatttgaatatatgtgattgatgtaattaatattaaaattaggatatagaatagtttcgttattttgaataatttttttatgttatttttttgtagttataatttttttttatttttaattttagtaattattgatttgttttttgttattatatttttttttatttgagattgttttatatgtatatttatattatatgtaattttttggatttggttttttttatttagtataatgtttttgagatttattacgtatattagtagtttgtttttttttattgttgattagtattttatgttaatggatgtattagtttgtttatttatttattaaagggtatttgagtttagttatttgtagtttttggtgattatgaatatagttgtaagaaatatttatatatgggtttcgtgtgaatataagtttttattttttatgagtatatatttaagagtgtgagtgtttggttatagtagttttagtttattttgtaaaacggaaataatagtatttatttagttttataaagtatttttgttatttaagagagataaattggataacgtagtatttaagagaatgggatttaatgttaaaattagtttgatttaatttatagagattttttatttggttatttttaaaaatttattattgatttgtagtttttagtatagagattatgatatgttttgttaaatttattataaagtatattatattgtattgttattataaatgatgttttaaaaaacgtaatttttaattttttgttattattatattgaagtataatagatttttttatgttgagtatgtattttgtaatttgttttatttatttattagtttttgaatgaagttttttgtagattttttggatattttttgtaggtaattatattaattgtggatagagatagttttgtttttat

SEQ ID NO: 405 - DNA, 8530 bp, Artificial Sequence
  chemically treated genomic DNA (Homo sapiens)
tgttaggattataggtatgagttatttataataaattagaaataaaatttttttgtttggtaggaaatagttgtgggagttggaaatattgttgagttatatagagaagggtatggtagtttaggaagagtagaaggggattgaggtgagttgaagtatttcggtagatagagtagaatttggtatagaatattggagataaaagggtatgaaaaatggattgaaattggttggttgtattgtaagaaaaataattatgggatagttttaagggaaggatataaaatttaggataggcgaagaaattatggaaatagtggaagtaagataaatatttatttttaatgatttatttaaaattttaaaagaggtcgggtgtagtggtttatatttgtaattttaatattttgggaggttaaagcgggtagattatttgaggttaggagtttaagattagtttggttaatatggtgagaaatttatttttataaaaatataaaaattagtcgggtatgatcgtaagtgtttgtaattttagttattcgggaggttgaggtgatagaatcgtttaaattcgggagacggaggttgtagtgagtagagatcgcgttattgtattttagtttgggtgatagtgagatattattttaaaaaataaataaataaaataaataaaattcgaaagaatatatattatttatgtatgtttatgaatttgtttttatatttaggagttttataggaatttttagaagtttatttttgtgtttttaaataagaatttaagttattaagtttagcgggatgatggagtgaggagtgggtatggtttatattttttttttttgtttttttgtagggatttaaatttatgggatttaaattatttttaattttaaatataggatatttatttttaaatttttgtttattagtattggtagtttgtatatgtttttgatttttttaattttagaatttggttttaagaatcgtagttggtgttttttttttagattatacgtttttatttagtttggttggatgtgagtatttttttattttattggtttttgtttttaaattttagagtttatgattaggttgttttgttttagggttttgttttttttagaaatagtaagaaagttataattgtattttatattttgttgtttatatttattaagtttttatagtaattgattatttttaggaaagttatattttttaaatgggagaattttgtttttgaagttttttaaggaatgtagtgttattttggtattttatttttttgtgtgtgtaataatgttttttattatgtatgcggttttaaaattattttttgaatttttttatatataggtaaaaaataagtgtgttatttaatatattggaatttgtttaatttaattattgtttagagaagggaaaattattattaaaatgtgtttaattaggaggttaatgtatttgttaatttttaagaatatggagatgaatttgatagatagattgtttattatttgaatttttatttattattatttgataatttttatttaggtttaaattagtagtatattttttgttaataattattaagtgtttaagaagattttcgttattattttttgttgtagaaatttgggatatatgttttttcgatattaatagaaaacgtgttggtgtttgaggggaagtgttatggaaagtaaggtattggttatttttaaaaatgattttggttgggatttttttgtagatgattttttcgaagatagtgttgttattaggtcgagcgatttgagttttggcgattttatttgttatttttgtttgttttttatatagtaggtagggtagaggtttagaaggagggaggaatttatagattttattttttttgttaagaaagtaattttttttgtttatattaattttatagatgtttatttttattttttgtttgtagaaaaggtgggtattattatagaatgtttagttttttaatttattatatatttgtaattttttggagagattataggttttgaggtttgtaggattgttgttagagtaggtgttttgtttttttttttttttagttatattggtgtataattgataattagaaattatatatatttaattattatttgagatcgtgattatagtagttattattgttattatttgaaattattattatgatcgaataaagggacgaatgtagaaatgaaaatttaagataaaagaaattgttttaaggaaaggtaatatgaagaagaagagagttttttgtttttagtgagtaaaggtagtttttttgtcgagttttttagttttttatatttattgggtaataagaataagaaggaggtaacgattggttagttgttgaattgattataggtttatattgttattgataagttttaattgtatttaattataagaaatatttgtgcggtttttaataatgtataatttgatgtgttgatatatgtgtatattgtgaatgattattataattaagtcggttaatatatttattattttatatagttgttttgggggtgtagggaggtgagaatatttaagatttatttttttagtaaattttaagtatgtggtattattatttatagttattatgtatattagatttttaggatttttttattttgtataagtgaattttgtattttttgattaaatttttttatttttttattttttattttagtttagtttttggtaattattttttattttttgtttttatgagtttgattattttagattttatatataagtgtaattatgtagtatttttttttttgtgtttgtaatgtttgatttagcgtaatgttttttaagtttatttatgttgttataagtggtaggatttttttttttgttagggttgaatagtattttattatatatatttatatatatatgatattatttatttgttagtggatatttaggttgtttttatttttaggttattgtgaataatgttgtaatgaatatgggagtgtagatatttttttgagatattgatttttttttttttggatgtatgggagttgttgagttatatggtagttttgtttttattttttgaggaatttttatattgttttttataatgattatattagtttatatttttattaatagtgtataagggtttttttttttttgtatttttattaatatttattttatttttttatttaatttttttttgagatataattttattttgtagattaggatggattgtagtggtgtttttttagtttattgtagtttttatttttcgggttttagtgatttttttgttttagttttttaagtagttgggattataggcgtgtattattatatatggttgatttttataatttttatagagatagggtttttttatgttgttaggttggtttcgaattgttgggtttaagtattttattcgttttggttatttatattgttgggattataagtatgaattataatatttatagttataataatggttattttttgtttttttgataatagttattttaataggtatgaggcgatattgtattatgattttggttttttgatgattaatgatgttgaggttttagaaaaagtatttttaatgatattggttttttttttgttttgggtggttttatttagtttaggttaaaattatattgtagattagatgtttggtgtttttattttgtagtttttgaatttggattgttttgggatagattttatttggtaatgtattttaaattttattttggtttagtttatatttttttttttatagtgaagagtttatagggaagatatgttataggaaaattggttttataacgtgatgttaggaagaaaagtttgtttttggttaaaaaagtatttattgatttgaaaagggaagaatagtagagagtatttttttattattttttatgtttgtcgggtttgttatgagaagtttttattttttttttattttttttttttttgtgtttttttttattttcgatttttttttgttattttttttgttatttatttgatggagttagtgtgggtattttatagtttaaatggaagtttagttttttcgggttggtagtgtggttgatatttaatagtttgggaagtgggagaaattttagaatttaaggttattatcgattttcgattttttattttttataagtgttttatatttagtgagtgataaggatgggattaggggatgtttttaagttgttattagtagtttttggtagatagaagggtaaagagttagagaagaacgttggatatgggatgggttggtagagttggttagatagaattttgggtggatatagagttgggaataagttggttaggagatgtggtagagaggtattagttatttttttaggtgagttaatgtgttagtgtttttagaatttcgagtcgttttatttttatttagtatttattttttatttttcgtattttgaagaagagagatgggtaattggagggtttttatgtagattcggttttatatataggtttgagagtatatttagtagttttttattttggtttaggcgatatttatagagggattagtgatatggagttggaagtttattattggtgattaagaagggggataatgttattggtttagtagagggaattttttgtggggttgttttttaggtttttattttaatttttatttttatattgtatttatatttgtttcgattttaagtagattagatgtggtagtggggggttatgtgacggagaggggtttataaatagttggaggtgggtatgttgttttagacgttttggggatagtaagagtagaggtttaaggagttatattgggggaaggataggggtaagtaggttaaggtttggtcggggttcggggggagggaatatggagtaatttcggttatagtagcgtgggggtgaataaagttggtggggtagtgatttttagtattagtatatgttttttgaatattgtattagttacggattgttttttgagaatgggggtttttagtataggtttcggaaggatgtaggttttcgttataacgtttattttatataggtaaagtgttttaaggggagaggggagttatggatgaggggagatagtggtgttagagattggtgaaaatgaggaattgggtgaaaagagggagtagtgttatatttttttaatttaaaaaataagtacgtggtgatgtgtttaaaatatgaaaatttttgaaagtttgggtttatttaagtatgtatttagagagatatgtatgtatttttatataatttttattaatagagtatttaaattatatggggaaatagtagagttttatatgtatgaatagttcgtgtttatataatttacgtggagtggattgcgtaggagtttatattgtagtgtgttgggagttgttttttatatttttatttataggtagatattgttagatttttgtttttgggattttttgtagaatatatataaatatgaatttttttgtagaaggtagaagaaaggaattgggtaagtgtagaaaatagattgaattgtttattagtgattaaagatttattaacgttaaaatgagtagagatgtataagtttttaggtcgtaagatgattaagtaagaatttattaagtgttaggtatttggaaaagggtagagatgtgattttagtaatagaagtatgtaggttaattaggagtgtttatggatgagtagtttttcgttgtgggattggtgggatatgaatatttaggaaagggggaatggggatgggtataattaaaggaaaggttgtgaaattgttatggaaaaagataggttatggttaataagtaagtgtgtttttttttttaaagaatgtagagaataatagaggatagaatttgtttagagggtagttggttagaatttttttttttttttttttttttgagatggagtttcgttttgttttttaggttggagtgtagtggtgttattttggtttattgcgattttcgtttttcgggtttaagtaattttttttttttagttttttgagtagttgggattataagtatttgttattatatttggtaaatttttgtatttttagtagagacggggttttgttatgttggttaggttgtttcgaatttttgattttaggtaatttattcgttttggttttttaaagtgttggaattataggtgttaattattgtgtttagtttggttagaatttaaaaggttttttttttttttttttttttttttttaatagggagtttttagtttttttaggtttaaggttgggaagttgaggtatgagttatgtaggggattttagtattgggggttaaaaggatttgtttttagtttttgattaatttttaggagtatttgtaaaggtagcgttagggatttagtagggaagagggatatataggttagtgtaggttggaatcgagtattgggaaggttttttggagatagcggggtttgattaggtttttgaatattgtgtgggattagtaggagggaagatttttttttttggttttgtgtttttattcgtgtatatggttgtatttgggtgggatggtaatttgagtaatagtgttattatggtattttttgatgatagttttcgtgttgggaagttatggttagtttggggagtagaattggtttgttttttataggttttaaaagtaaataagagtttggattagtttttttttgtttaatttttattatggaagatttatataaaaatggaatggtatagtgaagttttaagtatttattagttgttaatattttgttattattgttttatttattttttttttttttatttttattattttatatattatggaatattttttttttgttttttgttttttgttttttgtttttgagatggagtttcgtttttgttgtttaggttggaatgtaatggcgcgattttagtttatcgtaattttcgtttttttggtttaagtaatttttttgttttcgttttttaggtagttgagattataggtatgcgttattatgtttggttaatttttgtatttttagtagagacgaggtttttttatgttggttaggttggttttgattttttgattttaggtaatttgtttattttaggtttttaaagtgttggggttataggggtgagttattgagttttgtttttattttggaatattttttaataaattttagatattgtattatttgtagatttgagttttgattttttttttgttttttttttattttgttttgtatgggattagttagaatagatttggttttttaagtgtttttttagtttaggtatgatgatatgaagtaatttttttttttgtttttattggtttggggttttgaggagttgagatagttttagttgtttgatttttattgggaagtatgttttttttttgggttttacgtagggtttggaaggaaatattgtttttttcggttattgatttagaagataaatagttatgagtagggtaatttatgtgcgtgtttgtttaggattgcggtgtaaaatgttgtttatattgtgaaattagattttttttatttaggtttttttagaatttagtaatatggtttggtttgattttggttttagaggatagttagtgtagtgggagtggggtaggttaaaagtggttggagtttttgtatattttatatagatatacgtgttttgttttaggatggaagcggagggttattagatttgggggagttgttttgttttttttatatgtggggtaggtaggggtttaattatttagttgtgggaagaagtagatggatttgttttttcgggttagtttttgtgtgtgtatataagtattgggagatgaagtggatggttttgaagtttgatagaggatttgaggtgttttaggtaaggttagatatattaaggtaaagtgtaattaagattgttttgttagttagtttagtttgtttttattttgtttatgttaggagaaaagttaatgtaagtggtttggggaaattgtgggatatatagaaagcgtagtgatataaaatatttgattgatatggttatttgggtttagtatagttttgtatttttgttttaaagtaaaaattggtttttttgataaaggttattttggattaaggtgagtataggttggagaatgggtgtagagaaggtaggatgaatgaataagggaaagggtgggaagtgtgggaatggagggtggagagtagagggtagggatgattataaagttattttgtatgtagttaatatttagaatttaaaaagttgttgttttttttttttgtgagtttgtttgttggtttttgtttattatttttttagttttttataaggtagatattgattattttttttttgtttaga

SEQ ID NO: 406 - DNA, 8530 bp, Artificial Sequence
  chemically treated genomic DNA (Homo sapiens)
tttggatagagagagaatgattagtgtttgttttgtggaagattaaaaaaataatagatagaggttagtagatagatttatagaagaaaagaataatagttttttgaattttgggtgttgattgtatgtagggtgattttgtggttatttttgttttttattttttattttttatttttatattttttatttttttttttgtttatttattttattttttttatatttattttttaatttgtatttattttgatttagggtagtttttattaaggaggttagtttttgttttgaagtagaggtatagaattgtgttgaatttaggtggttatattaattaggtgttttgtgttattgcgttttttgtatgttttataatttttttagattatttgtattgattttttttttaatatgaatagggtgaggatagattgggttaattagtagggtagttttggttgtattttgttttggtgtgtttagttttatttgaggtattttaggttttttattaagttttaagattatttattttattttttagtgtttgtatgtatatataagaattagttcgaaaaggtaggtttatttatttttttttatagttagataattagatttttatttgttttatatgtgaagaggatagagtagtttttttaggtttggtggtttttcgtttttattttgaggtagagtacgtgtgtttgtgtggggtatataagagttttaattatttttagtttgttttatttttattatattaattgttttttggggttagggttaggttaggttatgttgttggattttgggagagtttgagtagaagagatttgattttataatatgagtagtattttatatcgtagttttgaataagtacgtatatgaattgttttgtttatggttgtttgttttttgggttagtgatcgagggaggtagtgtttttttttaaattttgcgtgggatttagagagagaatatattttttagtggaagttagatagttgaggttgttttagttttttaaggttttaggttagtggagataaggaagggggttgttttatattattatatttgggttgggaaaatatttaaagggttagatttgttttggttggttttatgtagggtagggtgaggggagggtaagggagaagttaaaatttaagtttataagtgatataatgtttgggatttgttaaaaagtattttaaggtggaagtaaggtttagtggtttatttttgtaattttagtattttaggagtttgagatgggtaggttatttgaggttaggagattaagattagtttgattaatatggagaaatttcgtttttattaaaaatataaaaattagttaggtatggtggcgtatgtttgtaattttagttatttgggaggcggaggtaggagaattgtttgaattagggaggcggagattgcggtgagttgagatcgcgttattgtattttagtttgggtaataagagcgaaattttattttaaaaataaaaaataaaaaataaaaaataaaaaaaaagtattttatggtgtgtagagtggtgagggtggggaagggaagaatagatggaataatagtgataaaatattgataattggtgggtatttggggttttattatattattttatttttgtgtaagttttttataataaaaattaaataaagaaaaattaatttaaatttttgtttatttttgagatttgtagaaaataggttaattttattttttaaattaattatagttttttaatacgagaattgttattaggaagtgttataatggtattgttatttaagttgttattttatttagatataattatgtatacgagtgagaatatagggttagggggaggggtttttttttttgttgattttatatagtgtttaaaggtttagttagatttcgttgtttttaagaaatttttttaatgttcgattttagtttatattgatttgtatgttttttttttttattgggtttttagcgttgtttttgtaaatatttttgggggttggttagggattgagagtagatttttttgatttttagtgttgagattttttgtatagtttatgttttagttttttagttttaaatttaaaggaattgaaggttttttgttaaaaaaaaaaaaaagaaagaaaaaaaagttttttaagttttgattagattgggtatagtggttaatatttgtaattttagtattttgggaggttaaggcgggtgaattatttgaggttaggagttcgagatagtttggttaatatggtaaaatttcgtttttattgaaagtataaaaatttgttaggtatggtggtaggtgtttgtaattttagttatttaggaggttgaggaaagagaattgtttgaattcgggaggcggaggtcgtagtgagttaagatagtattattgtattttagtttgggagatagagcgagattttattttaaaaaaaaaaaaaaaaaaaaaagttttggttaattgttttttagataaattttattttttgttattttttgtattttttggagggagaggtatatttatttattaattatgatttatttttttttatgataattttataattttttttttagttgtgtttatttttatttttttttttttaggtgtttatattttattaattttatagcgggaggttgtttatttatagatatttttaattagtttgtatgtttttgttgttgggattatatttttgtttttttttaggtgtttaatatttaataggtttttatttgattattttgcgatttaaaagtttgtatatttttgtttattttgacgttggtagatttttgattattgataagtaatttagtttgttttttatatttgtttaattttttttttttgttttttgtagaaagatttatgtttgtgtgtattttgtagagggttttagaggtagaaatttggtagtgtttatttgtgggtgagggtgtgggagatagtttttagtatattgtagtgtgggtttttacgtaatttattttacgtaggttatgtaagtacgagttatttatgtatgtgaggttttgttgtttttttatatgatttgggtattttgttggtaaaggttgtatgaaagtgtatgtatatttttttaagtgtatatttaagtgagtttagatttttaaagatttttatattttgaatatattattacgtatttgttttttaagttaaaaaaatgtaatattgttttttttttttatttaattttttatttttattagtttttggtattattgtttttttttatttatggtttttttttttttttagagtattttatttgtgtggggtggacgttgtggcgggggtttgtattttttcggagtttgtgttggaggtttttatttttagagggtagttcgtagttggtgtagtgtttaaagggtatatattggtattgggggttattattttattagttttgtttatttttacgttgttgtgatcgggattgttttatatttttttttttcgagtttcggttaggttttggtttgtttgtttttgttttttttttagtgtagttttttaagtttttgtttttgttgtttttaaggcgtttggggtagtatgtttatttttagttatttatagattttttttcgttatatgattttttattgttatatttgatttgtttggggtcgaagtaggtgtgagtgtagtgtgggggtgggggttgggatgagaatttgagggatagttttatagggaattttttttgttgagttagtggtattgtttttttttttagttattagtagtaggtttttagttttatgttattggtttttttataaatatcgtttggattaggatgagaaattgttgagtatgtttttaaatttatgtgtagagtcggatttgtatggaagttttttagttgtttattttttttttttaggatgcggaaggtgaggggtgggtgttggataaagatgaagcgattcgaagttttggaaatattggtatattaatttatttgggaaagtaattggtgtttttttgttatattttttggttagtttgtttttaattttgtgtttatttagggttttgtttggttagttttgttagtttattttatgtttagcgtttttttttagttttttgtttttttgtttgttagaggttgttaataatagtttgggggtattttttgattttatttttattatttattgggtgtggaatatttatgggaagtgggaagtcgagggtcggtaatagttttgggttttagaattttttttattttttagattgttaggtgttagttatattgttaattcggagggattgagtttttatttggattgtggagtgtttatattggttttattagatagataataagggagataataggggagaatcgaaagtagaaagaggtatagggaagggagaggtgggaaaggggtgagggttttttatgataagttcgataaatatgaaagatgatggggaagtgttttttgttatttttttttttttaggttaataaatatttttttggttaaggataaatttttttttttggtattacgttataaaattaatttttttatgatatgttttttttatgaattttttattgtaggagaaaagatatgaattgagttaaagtaaagtttaggatgtattattaagtggggtttgttttaggatagtttaagtttagggattgtagggtagggatattaaatatttggtttataatgtgattttgatttaggttaaatggaattatttaaagtaggagggaagttaatattattaaaagtattttttttagggttttaatattattaattattaggaaattaaaattataatgtaatatcgttttatatttgttaggatggttattattaaaaaagtaagagatagttattattatggttatggatattatggtttatgtttataattttagtaatgtgggtgattaaggcgggtggaatgtttaagtttagtagttcgagattaatttggtaatatggggagattttgtttttataaaaattataaaaattagttatgtgtggtggtgtacgtttgtagttttagttatttgggaggttgagataggaggattattgaagttcgggaggtggaggttgtagtgagttgggaaggtattattgtaatttattttggtttatagagtgagattatgttttaaaaaaaaattaaataaaaagatgagataaatgttagtgagaatgtagagaaaagggaatttttgtgtattgttggtgggaatgtaaattggtatagttattatgaaaaatagtataaaagttttttaaaaggtaaaaatagaattgttatatgatttagtaatttttatatatttaagggaaaggaaattagtattttaaagaggtatttgtatttttatgtttattatagtattatttataatagtttagaaatggaaataatttaagtgtttattaatagatgaataatgttatgtgtatataaatatatataatggaatattatttaattttgataaagaagaaaattttgttatttgtgataatatggatgaatttggaggatattacgttaagttaaatattgtagatatagaaagaaaaatattgtatgattgtatttgtatgtggaatttaaaatagttaaatttatagaagtagaaagtagagggtagttgttaggggttgggttggagtagggggtgggagaatggggaaatttggttaaaggatataaggtttatttatataagatgagaaagttttggagatttaatgtgtatggtaattataggtagtaatattatatatttgaaatttgttaagagggtagattttgaatgtttttatttttttgtatttttaaagtaattatgtgaggtgatggatatgttaatcggtttgattgtgatgattatttataatgtatatatatattaatatattaagttgtatattgttggaggtcgtataaatgttttttatgattaggtataattgaagtttgttagtaataatatgaatttgtgattaatttagtagttgattaatcgttattttttttttgtttttgttatttagtaaatatgaagggttgagaagttcggtaggggagttgtttttgtttattagaagtagggagttttttttttttttatgttgtttttttttaaaatagttttttttgttttaagtttttatttttatattcgtttttttgttcggttataatgatggttttaagtggtaatagtagtaattgttgtaattacggttttaagtagtaattaaatatgtataatttttagttgttaattatatattaatgtagttaaaaaaaaaaaaaaataaaatatttgttttaataataattttataaattttaaggtttataatttttttaaaaaattataaatgtgtgatgaattgagagattaaatattttgtgatgatatttattttttttgtaggtagaaaataaggatagatatttatgggattggtatgagtagaaaggattatttttttaataaagaaaatagaatttgtgggtttttttttttttttgagtttttattttgtttgttgtgtgggagataggtagagatggtaggtgagatcgttaaggtttaggtcgttcggtttggtggtaatattgttttcgggaagattatttgtaaggaaattttagttaaaattatttttgaggatgattagtgttttgttttttatgatatttttttttaagtattaatacgttttttgttgatatcgaaaaaatatatattttagatttttgtagtagaagataatgacgaaagtttttttggatatttaatgattgttggtaagaaatgtgttgttgatttgggtttgaataagggttattaaatggtggtgaataaaggtttagatggtggatagtttgtttgttaagtttatttttatgtttttggaggttggtagatgtattggttttttggttaagtatattttggtgataatttttttttttttgggtaatgattaagttaggtaagttttagtatgttaagtagtatatttattttttgtttgtgtatggagagatttaagaaataattttaaaatcgtatatataataaaagatattgttgtatatataaaaaaatagagtgttaaggtaatattgtattttttggaggattttagaaataagatttttttatttgaggagtatagtttttttgaaagtgattagttgttgtagaaatttgataaatataagtagtaagatatgagatataattatgatttttttattatttttgagaaagatagggttttaaaatagagtagtttagttatggattttgagatttgaaggtagagattagtggagtagggaagtgtttatatttagttaagttgagtggaagcgtgtggtttagaaggaaagtattaattgcgatttttaaaattagattttgaaattaggagggttaaagatatgtatagattgttagtgttggtgggtaagggtttgagagtaaatattttgtgtttgaaattaggaatagtttaaattttatgggtttaaatttttgtaagagaataagaaaagaaaatgtaaattatgtttattttttattttattatttcgttgggtttagtagtttaggtttttatttggaggtataaagatgggtttttagggatttttgtaaggtttttgaatgtggaagtaaatttataagtatgtataaatgatatatattttttcgggttttatttattttatttatttattttttgagatggtgttttattgttatttaggttggagtgtaatggcgcgatttttgtttattgtaattttcgtttttcgggtttgagcgattttgttattttagtttttcgagtagttgggattataggtatttacggttatgttcggttaatttttgtatttttgtagagatgggttttttattatgttggttaggttggttttgaatttttgattttaggtaatttgttcgttttggttttttaaagtgttgggattataggtgtaagttattgtattcggttttttttggggttttaaatagattattgaaaatgggtatttattttatttttattatttttataattttttcgtttgttttagattttgtattttttttttgaggttattttatggttgttttttttgtagtataattaattagttttagtttattttttatgtttttttgtttttagtgttttgtattaaattttgttttatttgtcgaggtgttttagtttattttaatttttttttgttttttttagattgttatatttttttttgtatgatttaataatatttttagtttttatagttgttttttattaaataaaaaagttttgtttttggtttgttataggtggtttatatttataattttagta

(The sequence listing continues in the following parts.)
